United States Patent Application Publication US 2020/0163878 A1 - sequence listing, part 49

SEQ ID NO: 186174 - RNA, 1410 nt, Artificial Sequence
  derived and/or modified CDS sequence (opt4) from neuraminidase__InfluenzaA__BAF57522
augaaccccaaccagaagaucaucaccaucggcagcgugagccugaccaucagcaccaucugcuucuucaugcagaucgccauccugaucaccaccgugacccugcacuucaagcaguacgaguucaacagcccccccaacaaccaggugaugcugugcgagcccaccaucaucgagagaaacaucaccgagaucguguaccugaccaacaccaucaucgagaaggagaucugccccaagcuggccgaguacagaaacuggagcaagccccagugcaacaucaccggcuucgcccccuucagcaaggacaacagcaucagacugagcgccggcggcgacaucugggugaccagagagcccuacgugagcugcgaccccgacaagugcuaccaguucgcccugggccagggcaccacccugaacaacgugcacagcaacgacaccgugcacgacagaacccccuacagaacccugcugaugaacgagcugggcgugcccuuccaccugggcaccaagcaggugugcaucgccuggagcagcagcagcugccacgacggcaaggccuggcugcacgugugcgugaccggcgacgacgagaacgccaccgccagcuucaucuacaacggcagacugguggacagcaucgugagcuggagcaagaagauccugagaacccaggagagcgagugcgugugcaucaacggcaccugcaccguggugaugaccgacggcagcgccagcggcaaggccgacaccaagauccuguucaucgaggagggcaagaucgugcacaccagcacccugagcggcagcgcccagcacguggaggagugcagcugcuaccccagauaccccggcgugagaugcgugugcagagacaacuggaagggcagcaacagacccaucguggacaucaacaucaaggacuacagcaucgugagcagcuacgugugcagcggccuggugggcgacacccccagaaagaacgacagaagcagaagcagccacugccuggaccccaacaacgaggagggcggccacggcgugaagggcugggccuucgacgacggcaacgacguguggaugggcagaaccaucagcgagaagcugagaagcggcuacgagaccuucaaggugaucgagggcuggagcaagcccaacagcaagcugcagaucaacagacaggugaucguggacagaggcaacagaaccggcuacagcggcaucuucagcguggagggcaagagcugcaucaacagaugcuucuacguggagcugaucagaggcagaaagcaggagaccgaggugcuguggaccagcaacagcaucgugguguucugcggcaccagcggcaccuacggcaccggcagcuggcccgacggcgccgacaucaaccugaugcccaucuga

SEQ ID NO: 186175 - RNA, 1410 nt, Artificial Sequence
  derived and/or modified CDS sequence (opt4) from neuraminidase__InfluenzaA__BAF57529
augaaccccaaccagaagaucaucaccaucggcagcgugagccugaccaucagcaccaucugcuucuucaugcagaucgccauccugaucaccaccgugacccugcacuucaagcaguacgaguucaacagcccccccaacaaccaggugaugcugugcgagcccaccaucaucgagagaaacaucaccgagaucguguaccugaccaacaccaccaucgagaaggagaucugccccaagcuggccgaguacagaaacuggagcaagccccagugcgacaucaccggcuucgcccccuucagcaaggacaacagcaucagacugagcgccggcggcgacaucugggugaccagagagcccuacgugagcugcgaccccgacaagugcuaccaguucgcccugggccagggcaccacccugaacaacgugcacagcaacgacaaggugcacgagagaacccccuacagaacccugcugaugaacgagcugggcgugcccuuccaccugggcaccaagcaggugugcaucgccuggagcagcagcagcugccacgacggcaaggccuggcugcacgugugcgugaccggcgacgacaagaacgccaccgccagcuucaucuacaacggcagacugguggacagcaucgugagcuggagcaagaagauccugagaacccaggagagcgagugcgugugcaucaacggcaccugcaccguggugaugaccgacggcagcgccagcggcaaggccgacaccaagauccuguucaucgaggagggcaagaucgugcacaccagcacccugagcggcagcgcccagcacguggaggagugcagcugcuaccccagauaccccggcgugagaugcgugugcagagacaacuggaagggcagcaacagacccaucguggacaucaacaucaaggacuacagcaucgugagcagcuacgugugcagcggccuggugggcgacacccccagaaagaacgacagcagcagcagcagccacugccuggaccccaacaacgaggagggcggccacggcgugaagggcugggccuucgacgacggcaacgacguguggaugggcagaaccaucagcgagaagcugagaagcggcuacgagaccuucaaggugaucgagggcuggagcaaccccaacagcaagcugcagaucaacagacaggugaucguggacagaggcaacagaagcggcuacagcggcaucuucagcguggagggcaagagcugcaucaacagaugcuucuacguggagcugaucagaggcagaaaggaggagaccgaggugcuguggaccagcaacagcaucgugguguucugcggcaccagcggcaccuacggcaccggcagcuggcccgacggcgccgacaucaaccugaugcccaucuga

SEQ ID NO: 186176 - RNA, 1410 nt, Artificial Sequence; identical to SEQ ID NO: 181611
  derived and/or modified CDS sequence (opt4) from neuraminidase__InfluenzaA__BAF57532

SEQ ID NO: 186177 - RNA, 1410 nt, Artificial Sequence; identical to SEQ ID NO: 181611
  derived and/or modified CDS sequence (opt4) from neuraminidase__InfluenzaA__BAF57536

SEQ ID NO: 186178 - RNA, 1410 nt, Artificial Sequence
  derived and/or modified CDS sequence (opt4) from neuraminidase__InfluenzaA__BAF57539
augaaccccaaccagaagaucaucaccaucggcagcgugagccugaccaucagcaccaucugcuucuucaugcagaucgccauccugaucaccaccgugacccugcacuucaagcaguacgaguucaacagcccccccaacaaccaggugaugcugugcgagcccaccaucaucgagagaaacaucaccgagaucguguaccugaccaacaccaccaucgagaaggagaucugccccaagcuggccgaguacagaaacuggagcaagccccagugcgacaucaccggcuucgcccccuucagcaaggacaacagcaucagacugagcgccggcggcgacaucugggugaccagagagcccuacgugagcugcgaccccgacaagugcuaccaguucgcccugggccagggcaccacccugaacaacgugcacagcaacgacaccgugcacgacagaacccccuacagaacccugcugaugaacgagcugggcgugcccuuccaccugggcaccaagcaggugugcaucgccuggagcagcagcagcugccacgacggcaaggccuggcugcacgugugcgugaccggcgacgacaagaacgccaccgccagcuucaucuacaacggcagacugaucgacagcaucgugagcuggagcaagaagauccugagaacccaggagagcgagugcgugugcaucaacggcaccugcaccguggugaugaccgacggcagcgccagcggcaaggccgacaccaagauccuguucaucgaggagggcaagaucgugcacaccagcacccugagcggcagcgcccagcacguggaggagugcagcugcuaccccagauaccccggcgugagaugcgugugcagagacaacuggaagggcagcaacagacccaucguggacaucaacaucaaggacuacagcaucgugagcagcuacgugugcagcggccuggugggcgacacccccagaaagaacgacagcagcagcagcagccacugccuggaccccaacaacgaggagggcggccacggcgugaagggcugggccuucgacgacggcaacgacguguggaugggcagaaccaucagcgagaagcugagaagcggcuacgagaccuucaaggugaucgagggcuggagcaaccccaacagcaagcugcagaucaacagacaggugaucguggacagaggcaacagaagcggcuacagcggcaucuucagcguggagggcaagagcugcaucaacagaugcuucuacguggagcugaucagaggcagaaaggagaagaccgaggugcuguggaccagcaacagcaucgugguguucugcggcaccagcggcaccuacggcaccggcagcuggcccgacggcgccgacaucaaccugaugcccaucuga

SEQ ID NO: 186179 - RNA, 1410 nt, Artificial Sequence
  derived and/or modified CDS sequence (opt4) from neuraminidase__InfluenzaA__BAF57543
augaaccccaaccagaagaucaucaccaucggcagcgugagccugaccaucagcaccaucugcuucuucaugcagaucgccauccugaucaccaccgugacccugcacuucaagcaguacgaguucaacagcccccccaacaaccaggugaugcugugcgagcccaccaucaucgagagaaacaucaccgagaucguguaccugaccaacaccaccaucgagaaggagaucugccccaagcuggccgaguacagaaacuggagcaagccccagugcgacaucaccggcuucgcccccuucagcaaggacaacagcaucagacugagcgccggcggcgacaucugggugaccagagagcccuacgugagcugcgaccccgacaagugcuaccaguucgcccugggccagggcaccacccugaacaacgugcacagcaacgacaccgugcacgacagaacccccuacagaacccugcugaugaacgagcugggcgugcccuuccaccugggcaccaagcaggugugcaucgccuggagcagcagcagcugccacgacggcaaggccuggcugcacgugugcgugaccggcgacgacaagaacgccaccgccagcuucaucuacaacggcagacugguggacagcaucgugagcuggagcaagaagauccugagaacccaggagagcgagugcgugugcaucaacggcaccugcaccguggugaugaccgacggcagcgccagcggcaaggccgacaccaagauccuguucaucgaggagggcaagaucgugcacaccagcacccugagcggcagcgcccagcacguggaggagugcagcugcuaccccagauaccccggcgugagaugcgugugcagagacaacuggaagggcagcaacagacccaucguggacaucaacaucaaggacuacagcaucgugagcagcuacgugugcagcggccuggugggcgacacccccagaaagaacgacagcagcagcagcagccacugccuggaccccaacaacgaggagggcggccacggcgugaagggcugggccuucgacgacggcaacgacguguggaugggcagaaccaucagcgagaagcugagaagcggcuacgagaccuucaaggugaucgagggcuggagcaaccccaacagcaagcugcagaucaacagacaggugaucguggacagaggcaacagaagcggcuacagcgccaucuucagcguggagggcaagagcugcaucaacagaugcuucuacguggagcugaucagaggcagaaaggaggagaccgaggugcuguggaccagcaacagcaucgugguguucugcggcaccagcggcaccuacggcaccggcagcuggcccgacggcgccgacaucaaccugaugcccaucuga

SEQ ID NO: 186180 - RNA, 1410 nt, Artificial Sequence
  derived and/or modified CDS sequence (opt4) from neuraminidase__InfluenzaA__BAF57547
augaaccccaaccagaagaucaucaccaucggcagcgugagccugaccaucagcaccaucugcuucuucaugcagaucgccauccugaucaccaccgugacccugcacuucaagcaguacgaguucaacagcccccccaacaaccaggugaugcugugcgagcccaccaucaucgagagaaacaucaccgagaucguguaccugaccaacaccaccaucgagaaggagaucugccccaagcuggccgaguacagaaacuggagcaagccccagugcgacaucaccggcuucgcccccuucagcaaggacaacagcaucagacugagcgccggcggcgacaucugggugaccagagagcccuacgugagcugcgaccccgacaagugcuaccaguucgcccugggccagggcaccacccugaacaacgugcacagcaacgacaccgugcacgacagaacccccuacagaacccugcugaugaacgagcugggcgugcccuuccaccugggcaccaagcaggugugcaucgccuggagcagcagcagcugccacgacggcaaggccuggcugcacgugugcgugaccggcgacgacaagaacgccaccgccagcuucaucuacaacggcagacugguggacagcaucgugagcuggagcaagaagauccugagaacccaggagagcgagugcgugugcaucaacggcaccugcaccguggugaugaccgacggcagcgccagcggcaaggccgacaccaagauccuguucaucgaggagggcaagaucgugcacaccagcacccugagcggcagcgcccagcacguggaggagugcagcugcuaccccagauaccccggcgugagaugcgugugcagagacaacuggaagggcagcaacagacccaucguggacaucaacaucaaggacuacagcaucgugagcagcuacgugugcagcggccuggugggcgacacccccagaaagaacgacagcagcagcagcagccacugccuggaccccaacaacgaggagggcggccacggcgugaagggcugggccuucgacgacggcaacgacguguggaugggcagaaccaucagcgagaagcugagaagcggcuacgagaccuucaaggugaucgagggcuggagcaaccccaacagcaagcugcagaucaacagacaggugaucguggacagaggcaacagaagcggcuacagcggcaucuucagcguggagggcaagagcugcaucaacagaugcuucuacguggagcugaucagaggcagaaaggaggagaccgaggcccuguggaccagcaacagcaucgugguguucugcggcaccagcggcaccuacggcaccggcagcuggcccgacggcgccgacaucaaccugaugcccaucuga

SEQ ID NO: 186181 - RNA, 1410 nt, Artificial Sequence; identical to SEQ ID NO: 174774
  derived and/or modified CDS sequence (opt4) from neuraminidase__InfluenzaA__BAF57551

SEQ ID NO: 186182 - RNA, 1410 nt, Artificial Sequence; identical to SEQ ID NO: 174774
  derived and/or modified CDS sequence (opt4) from neuraminidase__InfluenzaA__BAF57555

SEQ ID NO: 186183 - RNA, 1410 nt, Artificial Sequence; identical to SEQ ID NO: 174772
  derived and/or modified CDS sequence (opt4) from neuraminidase__InfluenzaA__BAF57559

SEQ ID NO: 186184 - RNA, 1410 nt, Artificial Sequence
  derived and/or modified CDS sequence (opt4) from neuraminidase__InfluenzaA__BAF57563
augaaccccaaccagaagaucaucaccaucggcagcgugagccugaccaucagcaccaucugcuucuucaugcagaucgccauccugaucaccaccgugacccugcacuucaagcaguacgaguucaacagcccccccaacaaccaggugaugcugugcgagcccaccaucaucgagagaaacaucaccgagaucguguaccugaccaacaccaccaucgagaaggagaucugccccaagcuggccgaguacagaaacuggagcaagccccagugcgacaucaccggcuucgcccccuucagcaaggacaacagcaucagacugagcgccggcggcgacaucugggugaccagagagcccuacgugagcugcgaccccgacaagugcuaccaguucgcccugggccagggcaccacccugaacaacgugcacagcaacgacaucgugcacgacagaacccccuacagaacccugcugaugaacgagcugggcgugcccuuccaccugggcaccaagcaggugugcaucgccuggagcagcagcagcugccacgacggcaaggccuggcugcacgugugcgugaccggcgacgacaagaacgccaccgccagcuucaucuacaacggcagacugguggacagcaucgugagcuggagcaaggagauccugagaacccaggagagcgagugcgugugcaucaacggcaccugcaccguggugaugaccgacggcagcgccagcggcaaggccgacaccaagauccuguucaucgaggagggcaagaucgugcacaccagcacccugagcggcagcgcccagcacguggaggagugcagcugcuaccccagauaccccggcgugagaugcgugugcagagacaacuggaagggcagcaacagacccaucguggacaucaacaucaaggacuacagcaucgugagcagcuacgugugcagcggccuggugggcgacacccccagaaagaacgacagcagcagcagcagccacugccuggaccccaacaacgaggagggcggccacggcgugaagggcugggccuucgacgacggcaacgacguguggaugggcagaaccaucagcgagaagcugagaagcggcuacgagaccuucaaggugaucgagggcuggagcaaccccaacagcaagcugcagaucaacagacaggugaucguggacagaggcaacagaagcggcuacagcggcaucuucagcguggagggcaagagcugcaucaacagaugcuucuacguggagcugaucagaggcagaaaggaggagaccgaggugcuguggaccagcaacagcaucgugguguucugcggcaccagcggcaccuacggcaccggcagcuggcccgacggcgccgacaucaaccugaugcccaucuga

SEQ ID NO: 186185 - RNA, 1410 nt, Artificial Sequence; identical to SEQ ID NO: 174772
  derived and/or modified CDS sequence (opt4) from neuraminidase__InfluenzaA__BAF57571

SEQ ID NO: 186186 - RNA, 1410 nt, Artificial Sequence; identical to SEQ ID NO: 181516
  derived and/or modified CDS sequence (opt4) from neuraminidase__InfluenzaA__BAF57575

SEQ ID NO: 186187 - RNA, 1410 nt, Artificial Sequence; identical to SEQ ID NO: 174387
  derived and/or modified CDS sequence (opt4) from neuraminidase__InfluenzaA__BAF57579

SEQ ID NO: 186188 - RNA, 1410 nt, Artificial Sequence
  derived and/or modified CDS sequence (opt4) from neuraminidase__InfluenzaA__BAF57583
augaaccccaaccagaagaucaucaccaucggcagcgugagccugaccaucagcaccaucugcuucuucaugcagaucgccauccugaucaccaccgugacccugcacuucaagcaguacgaguucaacagcccccccaacaaccaggugaugcugugcgagcccaccaucaucgagagaaacaucaccgagaucguguaccugaccaacaccaccaucgagaaggagaucugccccaagcuggccgaguacagaaacuggagcaagccccagugcaacaucaccggcuucgcccccuucagcaaggacaacagcaucagacugagcgccggcggcgacaucagagugaccagagagcccuacgugagcugcgaccccgacaagugcuaccaguucgcccugggccagggcaccacccugaacaacgugcacagcaacgacaccgugcacgacagaacccccuacagaacccugcugaugaacgagcugggcgugcccuuccaccugggcaccaagcaggugugcaucgccuggagcagcagcagcugccacgacggcaaggccuggcugcacgugugcgugaccggcgacgacaagaacgccaccgccagcuucaucuacaacggcagacugguggacagcaucgugagcuggagcaaggagauccugagaacccaggagagcgagugcgugugcaucaacggcaccugcaccguggugaugaccgacggcagcgccagcggcaaggccgacaccaagauccuguucaucgaggagggcaagaucgugcacaccagcacccugagcggcagcgcccagcacguggaggagugcagcugcuaccccagauaccccggcgugagaugcgugugcagagacaacuggaagggcagcaacagacccaucguggacaucaacaucaaggacuacagcaucgugagcagcuacgugugcagcggccuggugggcgacacccccagaaagaacgacagcagcagcagcagccacugccuggaccccaacaacgaggagggcggccacggcgugaagggcugggccuucgacgacggcaacgacguguggaugggcagaaccaucagcgagaagcugagaagcggcuacgagaccuucaaggugaucgagggcuggagcaaccccaacagcaagcugcagaucaacagacaggugaucguggacagaggcaacagaagcggcuacagcggcaucuucagcguggagggcaagagcugcaucaacagaugcuucuacguggagcugaucagaggcagaaaggaggagaccgaggugcuguggaccagcaacagcaucgugguguucugcggcaccagcggcaccuacggcaccggcagcuggcccgacggcgccgacaucaaccugaugcccaucuga

SEQ ID NO: 186189 - RNA, 1410 nt, Artificial Sequence
  derived and/or modified CDS sequence (opt4) from neuraminidase__InfluenzaA__BAF57587
augaaccccaaccagaagaucaucaccaucggcagcgugagccugaccaucagcaccaucugcuucuucaugcagaucgccauccugaucaccaccgugacccugcacuucaagcagugcgaguucaacagcccccccaacaaccaggugaugcugugcgagcccaccaucaucgagagaaacaucaccgagaucguguaccugaccaacaccaccaucgagaaggagaucugccccaagcuggccgaguacagaaacuggagcaagccccagugcaacaucaccggcuucgcccccuucagcaaggacaacagcaucagacugagcgccggcggcgacaucugggugaccagagagcccuacgugagcugcgaccccgacaagugcuaccaguucgcccugggccagggcaccacccugaacaacgugcacagcaacgacaccgugcacgacagaacccccuacagaacccugcugaugaacgagcugggcgugcccuuccaccugggcaccaagcaggugugcaucgccuggagcagcagcagcugccacgacggcaaggccuggcugcacgugugcgugaccggcgacgacaagaacgccaccgccagcuucaucuacaacggcagacugguggacagcaucgugagcuggagcaaggagauccugagaacccaggagagcgagugcgugugcaucaacggcaccugcaccguggugaugaccgacggcagcgccagcggcaaggccgacaccaagauccuguucaucgaggagggcaagaucgugcacaccagcacccugagcggcagcgcccagcacguggaggagugcagcugcuaccccagauaccccggcgugagaugcgugugcagagacaacuggaagggcagcaacagacccaucguggacaucaacaucaaggacuacagcaucgugagcagcuacgugugcagcggccuggugggcgacacccccagaaagaacgacagcagcagcagcagccacugccuggaccccaacaacgaggagggcggccacggcgugaagggcugggccuucgacgacggcaacgacguguggaugggcagaaccaucagcgagaagcugagaagcggcuacgagaccuucaaggugaucgagggcuggagcaaccccaacagcaagcugcagaucaacagacaggugaucguggacagaggcaacagaagcggcuacagcggcaucuucagcguggagggcaagagcugcaucaacagaugcuucuacguggagcugaucagaggcagaaaggaggagaccgaggugcuguggaccagcaacagcaucgugguguucugcggcaccagcggcaccuacggcaccggcagcuggcccgacggcgccgacaucaaccugaugcccaucuga

SEQ ID NO: 186190 - RNA, 1410 nt, Artificial Sequence
  derived and/or modified CDS sequence (opt4) from neuraminidase__InfluenzaA__BAF57591
augaaccccaaccagaagaucaucaccaucggcagcgugagccugaccaucagcaccaucugcuucuucaugcagaucgccauccugaucaccaccgugacccugcacuucaagcaguacgaguucaacagcccccccaacaaccaggugaugcugugcgagcccaccaucaucgagagaaacaucaccgagaucguguaccugaccaacaccaccaucgagaaggagaucugccccaagcuggccgaguacagaaacuggagcaagccccagugcgacaucaccggcuucgcccccuucagcaaggacaacagcaucagacugagcgccggcggcgacaucugggugaccagagagcccuacgugagcugcgaccccgacaagugcuaccaguucgcccugggccagggcaccacccugaacaacgugcacagcaacgacaccgugcacgacagaacccccuacagaacccugcugaugaacgagcugggcgugcccuuccaccugggcaccaagcaggugugcaucgccuggagcagcagcagcugccacgacggcaaggccuggcugcacgugugcgugaccggcgacgacaagaacgccaccgccagcuucaucuacaacggcagacugguggacagcaucgugagcuggagcaaggagauccugagaacccaggagagcgagugcgugugcaucaacggcaccugcaccguggugaugaccgacggcagcgccagcggcaaggccgacaccaagauccuguucaucgaggagggcaagaucgugcacaccagcacccugagcggcagcgcccagcacguggaggagugcagcugcuaccccagauaccccggcgugagaugcgugugcagagacaacuggaagggcagcaacagacccaucgugcacaucaacaucaaggacuacagcaucgugagcagcuacgugugcagcggccuggugggcgacacccccagaaagaacgacagcagcagcagcagccacugccugaaccccaacaacgaggagggcggccacggcgugaagggcugggccuucgacgacggcaacgacguguggaugggcagaaccaucagcgagaagcugagacugggcuacgagaccuucaaggugaucgagggcuggagcaaccccaacagcaagcugcagaucaacagacaggugaucguggacagaggcaacagaagcggcuacagcggcaucuucagcguggagggcaagagcugcaucaacagaugcuucuacguggagcugaucagaggcagaaaggaggagaccgaggugcuguggaccagcaacagcaucgugguguucugcggcaccagcggcaccuacggcaccggcagcuggcccgacggcgccgacaucaaccugaugcccaucuga

SEQ ID NO: 186191 - RNA, 1410 nt, Artificial Sequence
  derived and/or modified CDS sequence (opt4) from neuraminidase__InfluenzaA__BAF57595
augaaccccaaccagaagaucaucaccaucggcagcgugagccugaccaucagcaccaucugcuucuucaugcagaucgccauccugaucaccaccgugacccugcacuucaagcaguacgaguucaacagcccccccaacaaccaggugaugcugugcgagcccaccaucaucgagagaaacaucaccgagaucguguaccugaccaacaccaccaucgagaaggagaucugccccaagaucgccgaguacagaaacuggagcaagccccagugcaacaucaccggcuucgcccccuucagcaaggacaacagcaucagacugagcgccggcggcgacaucugggugaccagagagcccuacgugagcugcgaccccgacaagugcuaccaguucgcccugggccagggcaccacccugaacaacgugcacagcaacgacaccgugcacgacagaacccccuacagaacccugcugaugaacgagcugggcgugcccuuccaccugggcaccaagcaggugugcaucgccuggagcagcagcagcugccacgacggcaaggccuggcugcacgugugcgugaccggcgacgacaagaacgccaccgccagcuucaucuacaacggcagacugguggacagcaucgugagcuggagcaaggagauccugagaacccaggagagcgagugcgugugcgugaacggcaccugcaccguggugaugaccgacggcagcgccagcggcaaggccgacaccaagauccuguucaucgaggagggcaagaucgugcacaccagcacccugagcggcagcgcccagcacguggaggagugcagcugcuaccccagauaccccggcgugagaugcgugugcagagacaacuggaagggcagcaacagacccaucguggacaucaacaucaaggacuacagcaucgugagcagcuacgugugcagcggccuggugggcgacacccccagaaagaacgacagcagcagcagcagccacugccuggaccccaacaacgaggagggcggccacggcgugaagggcugggccuucgacgacggcaacgacguguggaugggcagaaccaucagcgagaagcugagaagcggcuacgagaccuucaaggugaucgagggcuggagcaaccccaacagcaagcugcagaucaacagacaggugaucguggacagaggcaacagaagcggcuacagcggcaucuucagcguggagggcaagagcugcaucaacagaugcuucuacguggagcugaucagaggcagaaaggaggagaccgaggugcuguggaccagcaacagcaucgugguguucugcggcaccagcggcaccuacggcaccggcagcuggcccgacggcgccgacaucaaccugaugcccaucuga

SEQ ID NO: 186192 - RNA, 1410 nt, Artificial Sequence; identical to SEQ ID NO: 181516
  derived and/or modified CDS sequence (opt4) from neuraminidase__InfluenzaA__BAF57599

SEQ ID NO: 186193 - RNA, 1410 nt, Artificial Sequence
  derived and/or modified CDS sequence (opt4) from neuraminidase__InfluenzaA__BAF57603
augaaccccaaccagaagaucaucaccaucggcagcgugagccugaccaucagcaccaucugcuucuucaugcagaucgccauccugaucaccaccgugacccugcacuucaagcaguacgaguucaacagcccccccaacaaccaggugaugcugugcgagcccaccaucaucgagagaaacaucaccgagaucguguaccugaccaacaccaccaucgagaaggagaucugccccaagcuggccgaguacagaaacuggagcaagccccagugcaacaucaccggcuucgcccccuucagcaaggacaacagcaucagacugagcgccggcggcgacaucugggugaccagagagcccuacgugagcugcgaccccgacaagugcuaccaguucgcccugggccagggcaccacccugaacaacgugcacagcaacgacaccgugcacgacagaacccccuacagaacccugcugaugaacgagcugggcgugcccuuccaccugggcaccaagcaggugugcaucgccuggagcagcagcagcugccacgacggcaaggccuggcugcacgugugcgugaccggcgacgacaagaacgccaccgccagcuucaucuacaacggcagacugguggacagcaucgugagcuggagcaaggagauccugagaacccaggagagcgagugcgugugcaucaacggcaccugcaccguggugaugaccgacggcagcgccagcggcaaggccgacaccaagauccuguucaucgaggagggcaagaucgugcacaccagcacccugagcggcagcgcccagcacguggaggagugcagcugcuaccccagauaccccggcgugagaugcgugugcagagacaacuggaagggcagcaacagacccaucguggacaucaacaucaaggacuacagcaucgugagcagcuacgugugcagcggccuggugggcgacacccccagaaagaacgacagcagcagcagcagccacugccuggaccccaacaacgaggagggcggccacggcgugaagggcugggccuucgacgacggcaacgacguguggaugggcagaaccaucagcgagaagcugagaagcggcuacgagaccuucaaggugaucgagggcuggagcaaccccgacagcaagcugcagaucaacagacaggugaucguggacagaggcaacagaagcggcuacagcggcaucuucagcguggagggcaagagcugcaucaacagaugcuucuacguggagcugaucagaggcagaaaggaggagaccgaggugcugggcaccagcaacagcaucgugguguucugcggcaccagcggcaccuacggcaccggcagcuggcccgacggcgccgacaucaaccugaugcccaucuga

SEQ ID NO: 186194 - RNA, 1410 nt, Artificial Sequence; identical to SEQ ID NO: 181611
  derived and/or modified CDS sequence (opt4) from Neuraminidase__InfluenzaA__BAF62620

SEQ ID NO: 186195 - RNA, 1413 nt, Artificial Sequence
  derived and/or modified CDS sequence (opt4) from neuraminidase__InfluenzaA__BAF63036
augaaccccaaccagaagaucaucaccaucggcagcaucagcaucgccaucggcaucaucagccugaugcugcagaucggcaacaucaucagcaucugggccagccacagcauccagaccggcagccagaaccacaccggcaucugcaaccagagaaucaucaccuacgagaacagcaccugggugaaccacaccuacgugaccaucaacaacaccaacgugguggccggcaaggacaagaccagcgugacccuggccggcaacagcagccugugcagcaucagcggcugggccaucuacaccaaggacaacagcaucagaaucggcagcaagggcgacguguucgugaucagagagcccuucaucagcugcagccaccuggagugcagaaccuucuuccugacccagggcgcccugcugaacgacaagcacagcaacggcaccgugaaggacagaagccccuacagagcccugaugagcugcccccugggcgaggcccccagccccuacaacagcaaguucgagagcguggccuggagcgccagcgccugccacgacggcaugggcuggcugaccaucggcaucagcggccccgacaacggcgccguggccgugcugaaguacaacggcaucaucaccgagaccaucaagagcuggaagaagagaauccugagaacccaggagagcgagugcgugugcgugaacggcagcugcuucaccaucaugaccgacggccccagcaacggcgccgccagcuacaagaucuucaagaucgagaagggcaaggugaccaagagcaucgagcugaacgcccccaacuuccacuacgaggagugcagcugcuaccccgacaccggcaccgugaugugcgugugcagagacaacuggcacggcagcaacagacccugggugagcuucaaccagaaccuggacuaccagaucggcuacaucugcagcggcguguucggcgacaaccccagacccaaggacggcaagggcagcugcaaccccgugaccguggacggcgccgacggcgugaagggcuucagcuacaaguacggcaacggcguguggaucggcagaaccaagagcaacagacugagaaagggcuucgagaugaucugggaccccaacggcuggaccgacaccgacagcgacuucagcgugaagcaggacgugguggccaucaccgacuggagcggcuacagcggcagcuucgugcagcaccccgagcugaccggccuggacugcaucagacccugcuucuggguggagcuggugagaggccugcccagagagaacaccaccaucuggaccagcggcagcagcaucagcuucugcggcgugaacagcgacaccgccaacuggagcuggcccgacggcgccgagcugcccuucaccaucgacaaguga

SEQ ID NO: 186196 - RNA, 1413 nt, Artificial Sequence; identical to SEQ ID NO: 181501
  derived and/or modified CDS sequence (opt4) from neuraminidase__InfluenzaA__BAF63040

SEQ ID NO: 186197 - RNA, 1413 nt, Artificial Sequence
  derived and/or modified CDS sequence (opt4) from neuraminidase__InfluenzaA__BAF63047
augaaccccaaccagaagaucaucaccaucggcagcaucagcaucgccaucggcaucaucagccuggugcugcagaucggcaacaucaucagcaucugggccagccacagcauccagaccggcagccagaaccacaccggcaucugcaaccagagaaucaucaccuacgagaacagcaccugggugaaccacaccuacgugaacaucaacaacaccaacgugguggccggcaaggacaagaccagcgugacccuggccggcaacagcagccugugcagcaucagcggcugggccaucuacaccaaggacaacagcaucagaaucggcagcaagggcgacguguucgugaucagagagcccuucaucagcugcagccaccuggagugcagaaccuucuuccugacccagggcgcccugcugaacgacaagcacagcaacggcaccgugaaggacagaagccccuacagagcccugaugagcugcccccugggcgaggcccccagccccuacaacagcaaguucgagagcguggccuggagcgccagcgccugccacgacggcaugggcuggcugaccaucggcaucagcggccccgacaacggcgccguggccgugcugaaguacaacggcaucaucaccgagaccaucaagagcuggaagaagagaauccugagaacccaggagagcgagugcgugugcgugaacggcagcugcuucaccaucaugaccgacggccccagcaacggcgccgccagcuacaagaucuucaagaucgagaagggcaaggugaccaagagcaucgagcugaacgcccccaacuuccacuacgaggagugcagcugcuaccccgacaccggcaccgugaugugcgugugcagagacaacuggcacggcagcaacagacccugggugagcuucaaccagaaccuggacuaccagaucggcuacaucugcagcggcguguucggcgacaaccccagacccaaggacggcgagggcagcugcaaccccgugaccguggacggcgccgacggcgugaagggcuucagcuacaaguacggcaacggcguguggaucggcagaaccaagagcaacagacugagaaagggcuucgagaugaucugggaccccaacggcuggaccgacaccgacagcgacuucagcgugaagcaggacgugguggccaucaccgacuggagcggcuacagcggcagcuucgugcagcaccccgagcugaccggccuggacugcaucagacccugcuucuggguggagcuggugagaggccugcccagagagaacaccaccaucuggaccagcggcagcagcaucagcuucugcggcgugaacagcgacaccgccgacuggagcuggcccgacggcgccgagcugcccuucaccaucgacaaguga

SEQ ID NO: 186198 - RNA, 1413 nt, Artificial Sequence
  derived and/or modified CDS sequence (opt4) from neuraminidase__InfluenzaA__BAF63058
augaaccccaaccagaagaucaucaccaucggcagcaucagcaucgccaucggcaucaucagccugaugcugcagaucggcaacaucaucagcaucugggccagccacagcauccagaccggcagccagaaccacaccggcaucugcaaccagagaaucaucaccuacgagaacagcaccugggugaaccacaccuacgugaacaucaacaacaccaacgugguggccggcaaggacaagaccagcgugacccuggccggcaacagcagccugugcgccaucagcggcugggccaucuacaccaaggacaacagcaucagaaucggcagcaagggcgacguguucgugaucagagagcccuucaucagcugcagccaccuggagugcagaaccuucuuccugacccagggcgcccugcugaacgacaagcacagcaacggcaccgugaaggacagaagccccuacagagcccugaugagcugcccccugggcgaggcccccagccccuacaacagcaaguucgagagcguggccuggagcgccagcgccugccacgacggcaugggcuggcugaccaucggcaucagcggccccgacaacggcgccguggccgugcugaaguacaacggcaucaucaccgagaccaucaagagcuggaagaagagaauccugagaacccaggagagcgagugcgugugcgugaacggcagcugcuucaccaucaugaccgacggccccagcaacgaggccgccagcuacaagaucuucaagaucgagaagggcaaggugaccaagagcaucgagcugaacgcccccaacuuccacuacgaggagugcagcugcuaccccgacaccggcaccgugaugugcgugugcagagacaacuggcacggcagcaacagacccugggugagcuucaaccccaaccuggacuaccagaucggcuacaucugcagcggcguguucggcgacaaccccagacccaaggacggcgagggcagcugcaaccccgugaccguggacggcgccgacggcgugaagggcuucagcuacaaguacggcaacggcguguggaucggcagaaccaagagcaacagacugagaaagggcuucgagauggugugggaccccaacggcuggaccgacaccgacagcgacuucagcgugaagcaggacgugguggccaucaccgacuggagcggcuacagcggcagcuucgugcagcaccccgagcugaccggccuggacugcaucagacccugcuucuggguggagcuggugagaggccugcccaaggagaacaccaccaucuggaccagcggcagcagcaucagcuucugcggcgugaacagcgacaccgccaacuggagcuggcccgacggcgccgagcugcccuucaccaucgacaaguga

SEQ ID NO: 186199 - RNA, 1413 nt, Artificial Sequence; identical to SEQ ID NO: 181501
  derived and/or modified CDS sequence (opt4) from neuraminidase__InfluenzaA__BAF63065

SEQ ID NO: 186200 - RNA, 1413 nt, Artificial Sequence; identical to SEQ ID NO: 181501
  derived and/or modified CDS sequence (opt4) from neuraminidase__InfluenzaA__BAF63069

SEQ ID NO: 186201 - RNA, 1413 nt, Artificial Sequence; identical to SEQ ID NO: 181501
  derived and/or modified CDS sequence (opt4) from neuraminidase__InfluenzaA__BAF63079

SEQ ID NO: 186202 - RNA, 1413 nt, Artificial Sequence; identical to SEQ ID NO: 181501
  derived and/or modified CDS sequence (opt4) from neuraminidase__InfluenzaA__BAF63092

SEQ ID NO: 186203 - RNA, 1413 nt, Artificial Sequence; identical to SEQ ID NO: 181501
  derived and/or modified CDS sequence (opt4) from neuraminidase__InfluenzaA__BAF63098

SEQ ID NO: 186204 - RNA, 1413 nt, Artificial Sequence
  derived and/or modified CDS sequence (opt4) from neuraminidase__InfluenzaA__BAF63104
augaaccccaaccagaagaucaucaccaucggcagcaucagcaucgccaucggcaucaucagccugaugcugcaggugggcaucguggugagcaucugggccagccacagcauccagaccggcagccagaaccacaccggcaucugcaaccagagaaucaucaccuacgagaacagcaccugggugaaccacaccuacgugaacaucaacaacaccaacgugguggccggcaaggacaagaccagcguggcccuggccggcaacagcagccugugcagcaucagcggcugggccaucuacaccaaggacaacagcaucagaaucggcagcaagggcgacguguucgugaucagagagcccuucaucagcugcagccaccuggagugcagaaccuucuuccugacccagggcgcccugcugaacgacaagcacagcaacggcaccgugaaggacagaagccccuacagagcccugaugagcugcccccugggcgaggcccccagccccuacaacagcaaguucgagagcguggccuggagcgccagcgccugccacgacggcaugggcuggcugaccaucggcaucagcggccccgacaacggcgccguggccgugcugaaguacaacggcaucaucaccgagaccaucaagagcuggaagaagagaauccugagaacccaggagagcgagugcgugugcgugaacggcagcugcuucaccaucaugaccgacggccccagcaacggcgccgccagcuacaagaucuucaagaucgagaagggccaggugaccaagagcguggagcugaacgcccccaacuuccacuacgaggagugcagcugcuaccccgacaccggcaccgugaugugcgugugcagagacaacuggcacggcagcaacagacccugggugagcuucaaccagaaccuggacuaccagaucggcuacaucugcagcggcguguucggcgacaaccccagacccaaggacggcaagggcagcugcaaccccgugaccguggacggcgccgacggcgugaagggcuucagcuacaaguacggcaacggcguguggaucggcagaaccaagagcaacagacugagaaagggcuucgagaugaucugggaccccaacggcuggaccgacaccgacagcgacuucagcgugaagcaggacgugguggccaucaccgacuggagcggcuacagcggcagcuucgugcagcaccccgagcugaccggccuggacugcaucagacccugcuucuggguggagcuggugagaggccugcccagagagaacaccaccaucuggaccagcggcagcagcaucagcuucugcggcguggacagcgacaccgccaacuggagcuggcccgacggcgccgagcugcccuucaccaucgacaaguga

SEQ ID NO: 186205 - RNA, 1413 nt, Artificial Sequence
  derived and/or modified CDS sequence (opt4) from neuraminidase__InfluenzaA__BAF63112
augaaccccaaccagaagaucaucaccaucggcagcaucagcaucgccaucggcaucaucagccugaugcugcaggugggcaacaucaucagcaucugggccagccacagcauccagaccggcagccagaaccacaccggcaucugcaaccagagaaucaucaccuacgagaacagcaccugggugaaccacaccuacgugaacaucaacaacaccaacgugguggccggcaaggacaagaccagcguggcccuggccggcaacagcagccugugcagcaucagcggcugggccaucuacaccaaggacaacagcaucagaaucggcagcaagggcgacguguucgugaucagagagcccuucaucagcugcagccaccuggagugcagaaccuucuuccugacccagggcgcccugcugaacgacaagcacagcaacggcaccgugaaggacagaagccccuacagagcccugaugagcugcccccugggcgaggcccccagccccuacaacagcaaguucgagagcguggccuggagcgccagcgccugccacgacggcaugggcuggcugaccaucggcaucagcggccccgacaacggcgccguggccgugcugaaguacaacggcaucaucaccgagaccaucaagagcuggaagaagagaauccugagaacccaggagagcgagugcgugugcgugaacggcagcugcuucaccaucaugaccgacggccccagcaacggcgccgccagcuacaagaucuucaagaucgagaagggccaggugaccaagagcguggagcugaacgcccccaacuuccacuacgaggagugcagcugcuaccccgacaccggcaccgugaugugcgugugcagagacaacuggcacggcagcaacagacccugggugagcuucaaccagaaccuggacuaccagaucggcuacaucugcagcggcguguucggcgacaaccccagacccaaggacggcaagggcagcugcaaccccgugaccguggacggcgccgacggcgugaagggcuucagcuacaaguacggcaacggcguguggaucggcagaaccaagagcaacagacugagaaagggcuucgagaugaucugggaccccaacggcuggaccgacaccgacagcgacuucagcgugaagcaggacgugguggccaucaccgacuggagcggcuacagcggcagcuucgugcagcaccccgagcugaccggccuggacugcaucagacccugcuucuggguggagcuggugagaggccugcccagagagaacaccaccaucuggaccagcggcagcagcaucagcuucugcggcguggacagcgacaccgccaacuggagcuggcccgacggcgccgagcugcccuucaccaucgacaaguga

SEQ ID NO: 186206 - RNA, 1413 nt, Artificial Sequence
  derived and/or modified CDS sequence (opt4) from neuraminidase__InfluenzaA__BAF63116
augaaccccaaccagaagaucaucaccaucggcagcaucagcaucgccaucggcaucaucagccugaugcugcaggugggcaacaucaucagcaucugggccagccacagcauccagaccggcagccagaaccacaccggcaucugcaaccagagaaucaucaccuacgagaacagcaccugggugaaccacaccuacgugaacaucaacaacaccaacgugguggccggcaaggacaagaccagcguggcccuggccggcaacagcagccugugcagcaucagcggcugggccaucuacaccaaggacaacagcaucagaaucggcagcaagggcgacguguucgugaucagagagcccuucaucagcugcagccaccuggagugcagaaccuucuuccugacccagggcgcccugcugaacgacaagcacagcaacggcaccgugaaggacagaagccccuacagagcccugaugagcugcccccugggcgaggcccccagccccuacaacagcaaguucgagagcguggccuggagcgccagcgccugccacgacggccugggcuggcugaccaucggcaucagcggccccgacaacggcgccguggccgugcugaaguacaacggcaucaucaccgagaccaucaagagcuggaagaagagaauccugagaacccaggagagcgagugcgugugcgugaacggcagcugcuucaccaucaugaccgacggccccagcaacggcgccgccagcuacaagaucuucaagaucgagaagggccaggugaccaagagcguggagcugaacgcccccaacuuccacuacgaggagugcagcugcuaccccgacaccggcaccgugaugugcgugugcagagacaacuggcacggcagcaacagacccugggugagcuucaaccccgaccuggacuaccagaucggcuacaucugcagcggcguguucggcgacaaccccagacccaaggacggcaagggcagcugcaaccccgugaccguggacggcgccgacggcgugaagggcuucagcuacaaguacggcaacggcguguggaucggcagaaccaagagcaacagacugagaaagggcuucgagaugaucugggaccccaacggcuggaccgacaccgacagcgacuucagcgugaagcaggacgugguggccaucaccgacuggagcggcuacagcggcagcuucgugcagcaccccgagcugaccggccuggacugcaucagacccugcuucuggguggagcuggugagaggccugcccagagagaacaccaccaucuggaccagcggcagcagcaucagcuucugcggcguggacagcgacaccgccaacuggagcuggcccgacggcgccgagcugcccuucaccaucgacaaguga

SEQ ID NO: 186207 - RNA, 1413 nt, Artificial Sequence
  derived and/or modified CDS sequence (opt4) from neuraminidase__InfluenzaA__BAF63124
augaaccccaaccagaagaucaucaccaucggcagcaucagcaucgccaucggcaucaucagccugaugcugcagaucggcaacaucaucagcaucugggccagccacagcauccagaccggcagccagaaccacaccggcaucugcaaccagagaaucaucaccuacgagaacagcaccugggugaaccacaccuacgugaacaucaacaacaccaacgugguggccggcaaggacaagaccagcgugacccuggccggcaacagcagccugugcagcaucagcggcugggccaucuacaccaaggacaacagcaucagaaucggcagcaagggcgacguguucgugaucagagagcccuucaucagcugcagccaccuggagugcagaaccuucuuccugacccagggcgcccugcugaacgacaagcacagcaacggcaccgugaaggacagaagccccuacagagcccugaugagcugcccccugggcgaggcccccagccccuacaacagcaaguucgagagcguggccuggagcgccagcgccugccacgacggcaugggcuggcugaccaucggcaucagcggccccgacaacggcgccguggccgugcugaaguacaacggcaucaucaccgagaccaucaagagcuggaagaagagaauccugagaacccaggagagcgagugcgugugcgugaacggcagcugcuucaccaucaugaccgacggccccagcaacggcgccgccagcuacaagaucuucaagaucgagaagggcaaggugaccaagagcagagagcugaacgcccccaacuuccacuacgaggagugcagcugcuaccccgacaccggcaccgugaugugcgugugcagagacaacuggcacggcagcaacagacccugggugagcuucaaccccaaccuggacuaccagaucggcuacaucugcagcggcguggugggcgacaaccccagacccaaggacggcaagggcagcugcaaccccgugaccgccgacggcgccgacggcgugaagggcuucagcuacaaguacggcaacggcguguggaucggcagaaccaagagcaacagacugagaaagggcuucgagaugaucugggaccccaacggcuggaccgacaccgacagcgacuucagcgugaagcaggacgugguggccaucaccgacuggagcggcuacagcggcagcuucgugcagcaccccgagcugaccggccuggacugcaucagacccugcuucuggguggagcuggugagaggccugcccagagagaacaccaccaucuggaccagcggcagcagcaucagcuucugcggcguggacagcgacaccgccaacuggagcuggcccgacggcgccgagcugcccuucaccaucgacaaguga

SEQ ID NO: 186208 - RNA, 1413 nt, Artificial Sequence; identical to SEQ ID NO: 181563
  derived and/or modified CDS sequence (opt4) from neuraminidase__InfluenzaA__BAF63132

SEQ ID NO: 186209 - RNA, 1413 nt, Artificial Sequence
  derived and/or modified CDS sequence (opt4) from neuraminidase__InfluenzaA__BAF63136
augaaccccaaccagaagaucaucaccaucggcagcaucagcaucgccaucggcaucaucagccugaugcugcagaucggcaacaucaucagcaucugggccagccacagcauccagaccggcagccagaaccacaccggcaucugcaaccagagaaucaucaccuacgagaacagcaccugggugaaccacaccuacgugaacaucaacaacaccaacgugguggccggcaaggacaagaccagcgugacccuggccggcaacagcagccugugcagcaucagcggcugggccaucuacaccaaggacaacagcaucagaaucggcagcaagggcgacguguucgugaucagagagcccuucaucagcugcagccaccuggagugcaagaccuucuuccugacccagggcgcccugcugaacgacaagcacagcaacggcaccgugaaggacagaagccccuacagagcccugaugagcugcccccugggcgaggcccccagccccuacaacagcaaguucgagagcguggccuggagcgccagcgccugccacgacggcaugggcuggcugaccaucggcaucagcggccccgacaacggcgccguggccgugcugaaguacaacggcaucaucaccggcaccaucaagagcuggaagaagcagauccugagaacccaggagagcgagugcgugugcaugaacggcagcugcuucaccaucaugaccgacggccccagcaacggcgccgccagcuacaagaucuucaagaucgagaagggcaaggugaccaagagcaucgagcugaacgcccccaacuuccacuacgaggagugcagcugcuaccccgacaccggcaccgugaugugcgugugcagagacaacuggcacggcagcaacagacccugggugagcuucaaccagaaccuggacuaccagaucggcuacaucugcagcggcguguucggcgacaaccccagacccaaggacggcgagggcagcugcaaccccgugaccguggacggcgccaacggcgugaagggcuucagcuacaaguacggcaacggcguguggaucggcagaaccaagagcaacagacugagaaagggcuucgagaugaucugggaccccaacggcuggaccaacaccgacagcgacuucagcgugaagcaggacgugguggccaucaccgacuggagcggcuacagcggcagcuucgugcagcaccccgagcugaccggccuggacugcaucagacccugcuucuggguggagcuggugagaggccugcccagagagaacaccaccaucuggaccagcggcagcagcaucagcuucugcggcgugaacagcgacaccgccaacuggagcuggcccgacggcgccgagcugcccuucaccaucgacaaguga

SEQ ID NO: 186210 - RNA, 1350 nt, Artificial Sequence
  derived and/or modified CDS sequence (opt4) from neuraminidase__InfluenzaA__BAH24021
augaaccccaaccagaagaucaucaccaucggcagcaucugcauggugaucggcaucgugagccugaugcugcagaucggcaacauggugagccugugggugagccacagcauccagaccggcaaccagcaccagguggagcccaucagcaacaccaacuuccugaccgagaaggccguggccagcgugacccuggccggcaacagcagccugugccccaucagaggcugggccgugcacagcaaggacaacagcaucagaaucggcagcaagggcgacguguucgugaucagagagcccuucaucagcugcagccaccuggagugcagaaccuucuuccugacccagggcgcccugcugaacgacaagcacagcaacggcaccgugaaggacagaagcccccacagaacccugaugagcugccccgugggcgaggcccccagccccuacaacagcagauucgagagcguggccuggagcgccagcgccugccacgacggcaccagcuggcugaccaucggcaucagcggccccgacaacggcgccguggccgugcugaaguacaacggcaugaucaccgacaccaucaagagcuggagaaacaacauccugagaacccaggagagcgagugcgccugcgugaacggcagcugcuucaccgugaugaccgacggccccagcaacggccaggccagcuacaagaucuucaagauggagaagggcaagguggugaagagcguggagcuggacgcccccaacuaccacuacgaggagugcagcugcuaccccgacgccggcgagaucaccugcgugugcagagacaacuggcacggcagcaacagacccugggugagcuucaaccagaaccuggaguaccagaucggcuacaucugcagcggcguguucggcgacaaccccagacccaacggcggcaccggcagcugcggccccgugagccccaacggcgccuacggcgugaagggcuucagcuucaaguacggcaacggcguguggaucggcagaaccaagagccccagcagcagaagcggcuucgagaugaucugggaccccaacggcuggaccgagaccgacagcagcuucagcgugaagcaggacaucguggccaucaccgacuggagcggcuacagcggcagcuucgugcagcaccccgagcugaccggccuggacugcaucagacccugcuucuggguggagcugaucagaggcagacccaaggagagcaccaucuggaccagcggcagcagcaucagcuucugcggcgugaacagcgacaccgugagcuggagcuggcccgacggcgccgagcugcccuucaccaucgacaaguga

SEQ ID NO: 186211 - RNA, 1410 nt, Artificial Sequence; identical to SEQ ID NO: 176953
  derived and/or modified CDS sequence (opt4) from neuraminidase__InfluenzaA__BAH95825

SEQ ID NO: 186212 - RNA, 1410 nt, Artificial Sequence; identical to SEQ ID NO: 176788
  derived and/or modified CDS sequence (opt4) from neuraminidase__InfluenzaA__BAH95826

SEQ ID NO: 186213 - RNA, 1410 nt, Artificial Sequence
  derived and/or modified CDS sequence (opt4) from neuraminidase__InfluenzaA__BAJ07994
augaaccccaaccagaagaucaccaccaucggcagcaucugcauggugaucggcaucgugagccugaugcugcagaucggcaacaucaucagcaucugggugagccacagcauccagaccggcaaccagcaccaggccgagcccugcaaccagagcaucaucaccuacgagaacaacaccugggugaaccagaccuacgugaacaucagcaacaccaacuuccugaccgagaaggccguggccagcgugacccuggccggcaacagcagccugugccccaucagcggcugggccguguacagcaaggacaacggcaucagaaucggcagcaagggcgacguguucgugaucagagagcccuucaucagcugcagccaccuggagugcagaaucuucuuccugacccagggcgcccugcugaacgacaagcacagcaacggcaccgugaaggacagaagcccccacagaacccugaugagcugccccgugggcgaggcccccagccccuacaacagcagauucgagagcguggccuggagcgccagcgccugccacgacggcaccagcuggcugaccaucggcaucagcggccccgacaacggcgccguggccgugcugaaguacaacggcaucaucaccgacaccaucaagagcuggagaaacaacaucaugagaacccaggagagcgagugcgccugcgugaacggcagcugcuucaccgugaugaccgacggccccagcaacggccaggccagcuacaagaucuucagaaucgagaagggcaagguggugaagagcgccgagcugaacgcccccaacuaccacuacgaggagugcagcugcuaccccgacgccggcgagaucaccugcgugugcagagacaacuggcacggcagcaacagacccugggugagcuucaaccagaaccuggaguacagaaucggcuacaucugcagcggcguguucggcgacaaccccagacccaacgacggcaccggcagcugcggccccgugagccccaagggcgccuacggcaucaagggcuucagcuucaaguacggcaacggcguguggaucggcagaaccaagagcaccaacagcagaagcggcuucgagaugaucugggaccccaacggcuggaccggcaccgacagcaacuucagcgugaagcaggacaucguggccaucaccgacuggagcggcuacagcggcagcuucgugcagcaccccgagcugaccggccuggacugcaucagacccugcuucuggguggagcugaucagaggcagacccaaggagagcaccaucuggaccagcggcagcagcaucagcuucugcggcgugaacagcgacaccgugggcuggagcuggcccgacggcgccgagcugcccuucaccaucgacaaguga

SEQ ID NO: 186214 - RNA, 1350 nt, Artificial Sequence
  derived and/or modified CDS sequence (opt4) from neuraminidase__InfluenzaA__BAK23415
augaaccccaaccagaagaucaucaccaucggcagcgugugcaugaucaucggcaucgugagccugaugcugcagaucggcaacaugaucagcaucugggugggccacagcauccagaccggcaaccagugccacgccgagcccaucagcaacaccaaguuccccaccgagaaggccgccgccagcgugacccuggccggcaacagcagccugugccccaucagcggcugggccguguacagcaaggacaacagcaucagaaucggcagcagaggcgacguguucgugaucagagagcccuucaucagcugcagccaccuggagugcagaaccuucuuccugacccagggcgcccugcugaacgacaagcacagcaacggcaccgugaaggacagaagcccccacagaacccugaugagcugccccgugggcgaggcccccagccccuacaacagcagauucgagagcguggccuggagcgccagcgccugccacgacggcaccagcuggcugaccaucggcaucagcggccccgacaacggcgccguggccgugcugaaguacaacggcaucaucaccgacaccaucaagagcuggagaaacaacauccugagaacccaggagagcgagugcgccugcaucaacggcagcugcuucaccgugaugaccgacggccccagcagcggccaggccagcuacaagaucuucaagauggagaagggcaagguggugaagagcguggagcuggacgcccccaacuaccacuacgaggagugcagcugcuaccccgacgccggcgagaucaccugcgugugcagagacaacuggcacggcagcaacagacccugggugagcuucaaccagaaccuggaguaccagaucggcuacaucugcagcggcguguucggcgacaaccccagacccaacgacggcaccggcagcugcggccccgugagccccaacggcgccuacggcgugaagggcuucagcuucaaguacggcaacggcguguggaucggcagaaccaagagcaccaacagcagaagcggcuucgagaugaucugggaccccaacggcuggaccggcaccgacagcagcuucagcgugaagcaggacaucguggccaucaccgacuggagcggcuacagcggcagcuucgugcagcaccccgagcugaccggccuggacugcaucagacccugcuucuggguggagcugaucagaggcagacccaaggagagcaccaucuggaccagcggcagcagcaucagcuucugcggcgugaacagcgacaccgugagcuggagcuggcccgacggcgccgagcugcccuucaccaucgacaaguga

SEQ ID NO: 186215 - RNA, 1350 nt, Artificial Sequence
  derived and/or modified CDS sequence (opt4) from neuraminidase__InfluenzaA__BAK23416
augaaccccaaccagaagaucaucaccaucggcagcaucugcauggugaucggcaucgugagccugaugcugcagaucggcaacaugaucagcaucugggugagccacagcauccagaccggcaaccagugccaggccgagcccaucagcaacaccaaguuccugaccgagaaggccguggccagcgugacccuggccggcaacagcagccugugccccaucagcggcugggccguguacagcaaggacaacagcaucagaaucggcagcagaggcgacguguucgugaucagagagcccuucaucagcugcagccaccuggagugcagaaccuucuuccugacccagggcgcccugcugaacgacaagcacagcaacggcaccgugaaggacagaagcccccacagaacccugaugagcugccccgugggcgaggcccccagccccuacaacagcagauucgagagcguggccuggagcgccagcgccugccacgacggcaccagcuggcugaccaucggcaucagcggccccgacaacggcgccguggccgugcugaaguacaacggcaucaucaccgacaccaucaagagcuggagaaacaacauccugagaacccaggagagcgagugcgccugcgugaacggcagcugcuucaccgugaugaccgacggccccagcagcggccaggccagcuacaagaucuucaagauggagaagggcaagguggugaagagcguggagcuggacgcccccaacuaccacuacgaggagugcagcugcuaccccgacgccggcgagaucaccugcgugugcagagacaacuggcacggcagcaacagacccugggugagcuucaaccagaaccuggaguaccagaucggcuacaucugcagcggcguguucggcgacaaccccagacccaacgacggcaccggcagcugcggccccgccagccccaacggcgccuacggcgugaagggcuucagcuucaaguacggcaacggcguguggaucggcagaaccaagagcaccaacagcagaagcggcuucgagaugaucugggaccccaacggcuggaccggcaccgacagcagcuucagcgugaagcaggacaucguggccaucaccgacuggagcggcuacagcggcagcuucgugcagcaccccgagcugaccggccuggacugcaucagacccugcuucuggguggagcugaucagaggcagacccaaggagagcaccaucuggaccagcggcagcagcaucagcuucugcggcgugaacagcgacaccgugagcuggagcuggcccgacggcgccgagcugcccuucaccaucgacaaguga

SEQ ID NO: 186216 - RNA, 1350 nt, Artificial Sequence
  derived and/or modified CDS sequence (opt4) from neuraminidase__InfluenzaA__BAK23417
augaaccccaaccagaagaucaucaccaucggcagcaucugcauggugaucggcaucgugagccugaugcugcagaucggcaacaugaucagcaucugggugagccacagcauccagaccggcaaccagugccagagcgagcccaucagcaacaccaaguuccugaccgagaaggccguggccagcgugacccuggccggcaacagcagccugugccccaucagcggcugggccguguacagcaaggacaacagcaucagaaucggcagcagaggcgacguguucgugaucagagagcccuucaucagcugcagccaccuggagugcagaaccuucuuccugacccagggcgcccugcugaacgacaagcacagcaacggcaccgugaaggacagaagcccccacagaacccugaugagcugccccgugggcgaggcccccagccccuacaacagcagauucgagagcguggccuggagcgccagcgccugccacgacggcaucagcuggcugaccaucggcaucagcggccccgacaacggcgccguggccgugcugaaguacaacggcaucaucaccgacaccaucaagagcuggagaaacaacauccugagaacccaggagagcgagugcgccugcgugaacggcagcugcuucaccgugaugaccgacggccccagcagcggccaggccagcuacaagaucuucaagauggagaagggcaagguggugaagagcguggagcuggacgcccccaacuaccacuacgaggagugcagcugcuaccccgacgccggcgagaucaccugcgugugcagagacaacuggcacggcagcaacagacccugggugagcuucaaccagaaccuggaguaccagaucggcuacaucugcagcggcguguucggcgacaaccccagacccaacgacggcaccggcagcugcggccccgugagccccaacggcgccuacggcgugaagggcuucagcuucaaguacggcaacggcguguggaucggcagaaccaagagcaccaacagcagaagcggcuucgagaugaucugggaccccaacggcuggaccggcaccgacagcagcuucagcgugaagcaggacaucguggccaucaccgacuggagcggcuacagcggcagcuucgugcagcaccccgagcugaccggccuggacugcaucagacccugcuucuggguggagcugaucagaggcagacccaaggagagcaccaucuggaccagcggcagcagcaucagcuucugcggcgugaacggcgacaccgugagcuggagcuggcccgacggcgccgagcugcccuucaccaucgacaaguga

SEQ ID NO: 186217 - RNA, 1350 nt, Artificial Sequence
  derived and/or modified CDS sequence (opt4) from neuraminidase__InfluenzaA__BAK23418
augaaccccaaccagaccaucaucaccaucggcagcaucugcauggugaucggcaucgugagccugaugcugcagaucggcaacaugaucagcaucugggugagccacagcauccagaccggcaaccagugccaggccgagcccaucagcaacaccaaguuccugaccgagaaggccguggccagcgugacccuggccggcaacagcagccugugccccaucagcggcugggccguguacagcaaggacaacagcaucagaaucggcagcagaggcgacguguucgugaucagagagcccuucaucagcugcagccaccuggagugcagaaccuucuuccugacccagggcgcccugcugaacgacaagcacagcaacggcaccgugaaggacagaagcccccacagaacccugaugagcugccccgugggcgaggcccccagccccuacaacagcagauucgagagcguggccuggagcgccagcgccugccacgacggcaccagcuggcugaccaucggcaucagcggccccgacaacggcgccguggccgugcugaaguacaacggcaucaucaccgacaccaucaagagcuggagaaacaacauccugagaacccaggagagcgagugcgccugcgugaacggcagcugcuucaccgugaugaccgacggccccagcagcggccaggccagcuacaagaucuucaagauggagaagggcaagguggugaagagcguggagcuggacgcccccaacuaccacuacgaggagugcagcugcuaccccgacgccggcgagaucaccugcgugugcagagacaacuggcacggcagcaacagacccugggugagcuucaaccagaaccuggaguaccagaucggcuacaucugcagcggcguguucggcgacaaccccagacccaacgacggcaccggcagcugcggccccgugagccccaacggcgccuacggcgugaagggcuucagcuucaaguacggcaacggcguguggaucggcagaaccaagagcaccaacagcagaagcggcuucgagaugaucugggaccccaacggcuggaccggcaccgacagcagcuucagcgugaagcaggacaucguggccaucaccgacuggagcggcuacagcggcagcuucgugcagcaccccgagcugaccggccuggacugcaucagacccugcuucuggguggagcugaucagaggcagacccaaggagagcaccaucuggaccagcggcagcagcaucagcuucugcggcgugaacagcgacaccgugagcuggagcuggcccgacggcgccgagcugcccuucaccaucgacaaguga

SEQ ID NO: 186218 - RNA, 1350 nt, Artificial Sequence; identical to SEQ ID NO: 176637
  derived and/or modified CDS sequence (opt4) from neuraminidase__InfluenzaA__BAK23420

SEQ ID NO: 186219 - RNA, 1350 nt, Artificial Sequence; identical to SEQ ID NO: 176637
  derived and/or modified CDS sequence (opt4) from neuraminidase__InfluenzaA__BAK23421

SEQ ID NO: 186220 - RNA, 1350 nt, Artificial Sequence
  derived and/or modified CDS sequence (opt4) from neuraminidase__InfluenzaA__BAK23422
augaaccccaaccagaagaucaucaccaucggcagcgugugcauggugaucggcaucgugagccugaugcugcagaucggcaacaugaucagcaucugggugggccacagcauccagaccggcaaccagugccacgccgagcccaucagcaacaccaaguuccccaccgagaaggccgccgccagcgugacccuggccggcaacagcagccugugccccaucagcggcugggccguguacagcaaggacaacagcaucagaaucggcagcagaggcgacguguucgugaucagagagcccuucaucagcugcagccaccuggagugcagaaccuucuuccugacccagggcgcccugcugaacgacaagcacagcaacggcaccgugaaggacagaagcccccacagaacccugaugagcugccccgugggcgaggcccccagccccuacaacagcagauucgagagcguggccuggagcgccagcgccugccacgacggcaccagcuggcugaccaucggcaucagcggccccgacaacggcgccguggccgugcugaaguacaacggcaucaucaccgacaccaucaagagcuggagaaacaacauccugagaacccaggagagcgagugcgccugcgugaacggcagcugcuucaccgugaugaccgacggccccagcagcggccaggccagcuacaagaucuucaagauggagaagggcaagguggugaagagcguggagcuggacgcccccaacuaccacuacgaggagugcagcugcuaccccgacgccggcgagaucaccugcgugugcagagacaacuggcacggcagcaacagacccugggugagcuucaaccagaaccuggaguaccagaucggcuacaucugcagcggcguguucggcgacaaccccagacccaacgacggcaccggcagcugcggccccgugagccccaacggcgccuacggcgugaagggcuucagcuucaaguacggcaacggcguguggaucggcagaaccaagagcaccaacagcagaagcggcuucgagaugaucugggaccccaacggcuggaccggcaccgacagcagcuucagcgugaagcaggacaucguggccaucaccgacuggagcggcuacagcggcagcuucgugcagcaccccgagcugaccggccuggacugcaucagacccugcuucuggguggagcugaucagaggcagacccaaggagagcaccaucuggaccagcggcagcagcaucagcuucugcggcgugaacagcgacaccgugagcuggagcuggcccgacggcgccgagcugcccuucaccaucgacaaguga

SEQ ID NO: 186221 - RNA, 1350 nt, Artificial Sequence
  derived and/or modified CDS sequence (opt4) from neuraminidase__InfluenzaA__BAK23423
augaaccccaaccagaagaucaucaccaucggcagcaucugcauggugaucggcaucgugagccugaugcugcagaucggcaacaugaucagcaucugggugagccacagcauccagaccggcaaccagugccaggccgagcccaucagcaccaccaaguuccugaccgagaaggccguggccagcgugacccuggccggcaacagcagccugugccccaucagcggcugggccguguacagcaaggacaacagcaucagaaucggccccagaggcgacguguucgugaucagagagcccuucaucagcugcagccaccuggagugcagaaccuucuuccugacccagggcgcccugcugaacgacaagcacagcaacggcaccgugaaggacagaagcccccacagaacccugaugagcugccccgugggcgaggcccccagccccuacaacagcagauucgagagcguggccuggagcgccagcgccugccacgacggcaucagcuggcugaccaucggcaucagcggccccgacaacggcgccguggccgugcugaaguacaacggcaucaucaccgacaccaucaagagcuggagaaacaacauccugagaacccaggagagcgagugcgccugcgugaacggcagcugcuucaccgugaugaccgacggccccagcagcggccaggccagcuacaagaucuucaagauggagaagggcaagguggugaagagcguggagcuggacgcccccaacuaccacuacgaggagugcagcugcuaccccgacgccggcgagaucaccugcgugugcagagacaacuggcacggcagcaacagacccugggugagcuucaaccagaaccuggaguaccagaucggcuacaucugcagcggcguguucggcgacaaccccagacccaacgacggcaccggcagcugcggccccgugagccccaacggcgccuacggcgugaagggcuucagcuucaaguacggcaacggcguguggaucggcagaaccaagagcaccaacagcagaagcggcuucgagaugaucugggaccccaacggcuggaccggcaccgacagcagcuucagcgugaagcaggacaucguggccaucaccgacuggagcggcuacagcggcagcuucgugcagcaccccgagcugaccggccuggacugcaucagacccugcuucuggguggagcugaucagaggcagacccaaggagagcaccaucuggaccagcggcagcagcaucagcuucugcggcgugaacagcgacaccgugagcuggagcuggcccgacggcgccgagcugcccuucaccaucgacaaguga

SEQ ID NO: 186222 - RNA, 1350 nt, Artificial Sequence
  derived and/or modified CDS sequence (opt4) from neuraminidase__InfluenzaA__BAK23424
augaaccccaaccagaagaucaucaccaucggcagcaucugcauggugaucggcaucgugagccugaugcugcagaucggcaacaugaucagcaucugggugagccacagcauccagaccggcaaccagugccagggcgagcccaucagcaacaccaaguuccugaccgagaaggccguggccagcgugacccuggccggcaacagcagccugugccccaucagcggcugggccguguacagcaaggacaacagcaucagaaucggcagcagaggcgacguguucgugaucagagagcccuucaucagcugcagccaccuggagugcagaaccuucuuccugacccagggcgcccugcugaacgacaagcacagcaacggcaccgugaaggacagaagcccccacagaacccugaugagcugccccgugggcgaggcccccagccccuacaacagcagauucgagagcguggccuggagcgccagcgccugccacgacggcaccagcuggcugaccaucggcaucagcggccccgacaacggcgccguggccgugcugaaguacaacggcaucaucaccgacaccaucaagagcuggagaaacaacauccugagaacccaggagagcgagugcgccugcgugaacggcagcugcuucaccgugaugaccgacggccccagcagcggccaggccagcuacaagaucuucaagauggagaagggcaagguggugaagagcguggagcuggacgcccccaacuaccacuacgaggagugcagcugcuaccccgacgccggcgagaucaccugcgugugcagagacaacuggcacggcagcaacagacccugggugagcuucaaccagaaccuggaguaccagaucggcuacaucugcagcggcguguucggcgacaaccccagacccaacgacggcaccggcagcugcggccccguguucagcaacggcgccuacggcgugaagggcuucagcuucaaguacggcaacggcguguggaucggcagaaccaagagcaccaacagcagaagcggcuucgagaugaucugggaccccaacggcuggaccggcaccgacagcagcuucagcggcaagcaggacaucguggccaucaccgacuggagcggcuacagcggcagcuucgugcagcaccccgagcugaccggccuggacugcaucagacccugcuucuggguggagcugaucagaggcagacccaaggagagcaccaucuggaccagcggcagcagcaucagcuucugcggcgugaacagcgacaccgugagcuggagcuggcccgacggcgccgagcugcccuucaccaucgacaaguga

SEQ ID NO: 186223 - RNA, 1350 nt, Artificial Sequence
  derived and/or modified CDS sequence (opt4) from neuraminidase__InfluenzaA__BAK23425
augaaccccaaccagaagaucaucaccaucggcagcaucugcauggugaucggcaucgugagccugaugcugcagaucggcaacaugaucagcaucugggugagccacagcauccagaccggcaaccagugccaggccgagcccaucagcaacaccaaguuccugaccgagaaggccguggccagcgugacccuggccggcaacagcagccugugccccaucagcggcugggccguguacagcaaggacaacagcaucagaaucggcagcagaggcgacguguucgugaucagagagcccuucaucagcugcagccaccuggagugcagaaccuucuuccugacccagggcgcccugcugaacgacaagcacagcaacggcaccgugaaggacagaagcccccacagaacccugaugagcugccccgugggcgaggcccccagccccuacaacagcagauucgagagcguggccuggagcgccagcgccugccacgacggcaucagcuggcugaccaucggcaucagcggccccgacaacggcgccguggccgugcugaaguacaacggcaucaucaccgacaccaucaagagcuggagaaacaacauccugagaacccaggagagcgagugcgccugcgugaacggcagcugcuucaccgugaugaccgacggccccagcagcggccaggccagcuacaagaucuucaagauggagaagggcaagguggugaagagcguggagcuggacgcccccaacuaccacuacgaggagugcagcugcuaccccgacgccggcgagaucaccugcgugugcagagacaacuggcacggcagcaacagacccugggugagcuucaaccagaaccuggaguaccagaucggcuacaucugcagcggcguguucggcgacaaccccagacccaacgacggcaccggcagcugcggccccgugagccccaacggcgccuacggcgugaagggcuucagcuucaaguacggcaacggcguguggaucggcagaaccaagagcaccaacagcagaagcggcuucgagaugaucugggaccccaacggcuggaucggcaccgacagcagcuucagcgugaagcaggacaucguggccaucaccgacuggagcggcuacagcggcagcuucgugcagcaccccgagcugaccggccuggacugcaucagacccugcuucuggguggagcugaucagaggcagacccaaggagagcaccaucuggaccagcggcagcagcaucagcuucugcggcgugaacagcgacaccgugagcuggagcuggcccgacggcgccgagcugcccuucaccaucgacaaguga

SEQ ID NO: 186224 - RNA, 1350 nt, Artificial Sequence
  derived and/or modified CDS sequence (opt4) from neuraminidase__InfluenzaA__BAK23426
augaaccccaaccagaagaucaucaccaucggcagcaucugcauggugaucggcaucgugagccugaugcugcagaucggcaacaugaucagcaucugggugagccacagcauccagaccggcaaccagugccaggccgagcccaucagcaacaccaaguucuucaccgagaaggccguggccagcgugacccuggccggcaacagcagccugugccccaucagcggcugggccguguacagcaaggacaacagcaucagaaucggcagcagaggcgacguguucaucaucagagagcccuucaucagcugcagccaccuggagugcagaaccuucuuccugacccagggcgcccugcugaacgacaagcacagcaacggcaccgugaaggacagaagcccccacagaacccugaugagcugccccgugggcgaggcccccagccccuacaacagcagauucgagagcguggccuggagcgccagcgccugccacgacggcaccagcuggcugaccaucggcaucagcggccccgacaacggcgccguggccgugcugaaguacaacggcaucaucaccgacaccaucaagagcuggagaaacaacauccugagaacccaggagagcgagugcgccugcgugaacggcagcugcuucaccgugaugaccgacggccccagcagcggccaggccagcuacaagaucuucaagauggagaagggcaagguggugaagagcguggagcuggacgcccccaacuaccacuacgaggagugcagcugcuaccccgacgccggcgagaucaccugcgugugcagagacaacuggcacggcagcaacagacccugggugagcuucaaccagaaccuggaguaccagaucggcuacaucugcagcggcguguucggcgacaaccccagacccaacgacggcaccggcagcugcggccccgugagccccaacggcgccuacggcgugaagggcuucagcuucaaguacggcaacggcguguggaucggcagaaccaagagcaccaacagcagaagcggcuucgagaugaucugggaccccaacggcuggaccggcaccgacagcagcuucagcgugaagcaggacaucguggccaucaccgacuggagcggcuacagcggcagcuucgugcagcaccccgagcugaccggccuggacugcaucagacccugcuucuggguggagcugaucagaggcagacccaaggagagcaccaucuggaccagcggcagcagcaucagcuucugcggcgugaacagcgacaccgugagcuggagcuggcccgacggcgccgagcugcccuucaccaucgacaaguga

SEQ ID NO: 186225 - RNA, 1350 nt, Artificial Sequence; identical to SEQ ID NO: 186223
  derived and/or modified CDS sequence (opt4) from neuraminidase__InfluenzaA__BAK23427

SEQ ID NO: 186226 - RNA, 1350 nt, Artificial Sequence
  derived and/or modified CDS sequence (opt4) from neuraminidase__InfluenzaA__BAK23428
augaaccccaaccagaagaucaucaccaucggcagcaucugcauggugaucggcaucgugagccugaugcugcagaucggcaacaugaucagcaucugggugagccacagcauccagaccggcaaccagugccaggccgagcccaucagcaacaccaaguuccugaccgagaaggccguggccagcgugacccuggccggcaacagcagccugugccccaucagcggcugggccguguacagcaaggacaacagcaucagaaucggcagcagaggcgacguguucgugaucagagagcccuucaucagcugcagccaccuggagugcagaaccuucuuccugacccagggcgcccugcugaacgacaagcacagcaacggcaccgugaaggacagaagcccccacagaacccugaugagcugccccgugggcgaggcccccagccccuacaacagcagauucgagagcguggccuggagcgccagcgccugccacgacggcaccagcuggcugaccaucggcaucagcggccccgacaacggcgccguggccgugcugaaguacaacggcaucaucaccgacaccaucaagagcuggagaaacaacauccugagaacccaggagagcgagugcgccugcgugaacggcagcugcuucaccgugaugaccgacggccccagcagcggccaggccagcuacaagaucuucaagauggagaagggcaagguggugaagagcguggagcuggacgcccccaacuaccacuacgaggagugcagcugcuaccccgacgccggcgagaucaccugcgugugcagagacaacuggcacggcagcaacagacccugggugagcuucaaccagaaccuggaguaccagaucggcuacaucugcagcggcguguucggcgacaaccccagacccaacgacggcaccggcagcugcggccccgugagccccaacggcgccuacggcgugaagggcuucagcuucaaguacggcaacggcguguggaucggcagaaccaagagcaccaacagcagaagcggcuucgagaugaucugggaccccaacggcuggaccggcaccgacagcagcgugagcgugaagcaggacaucguggccaucaccgacuggagcggcuacagcggcagcuucgugcagcaccccgagcugaccggccuggacugcaucagacccugcuucagaguggagcugaucagaggcagacccaaggagagcaccaucuggaccagcggcagcagcaucagcuucugcggcgugaacagcgacaccgugagcuggagcuggcccgacggcgccgagcugcccuucaccaucgacaaguga

SEQ ID NO: 186227 - RNA, 1350 nt, Artificial Sequence; identical to SEQ ID NO: 186223
  derived and/or modified CDS sequence (opt4) from neuraminidase__InfluenzaA__BAK23429

SEQ ID NO: 186228 - RNA, 1350 nt, Artificial Sequence
  derived and/or modified CDS sequence (opt4) from neuraminidase__InfluenzaA__BAK23430
augaaccccaaccagaagaucaucaccaucggcagcaucugcauggugaucggcaucgugagccugaugcugcagaucggcaacaugaucagcaucugggugagccacagcauccagaccggcaaccagugccaggccgagcccaucagcaacaccaaguuccugaccgagaaggccguggccagcgugacccuggccggcaacagcagccugugccccaucagcggcugggccguguacagcaaggacaacagcaucagaaucggcagcagaggcgacguguucgugaucagagagcccuucaucagcugcagccaccuggagugcagaaccuucuuccugacccagggcgcccugcugaacgacaagcacagcaacggcaccgugaaggacagaagcccccacagaacccugaugagcugccccgugggcgaggcccccagccccuacaacagcagauucgagagcguggccuggagcgccagcgccugccacgacggcaucagcuggcugaccaucggcaucagcggccccgacaacggcgccguggccgugcugaaguacaacggcaucaucaccgacaccaucaagagcuggagaaacaacauccugagaacccaggagagcgagugcgccugcgugaacggcagcugcuucaccgugaugaccgacggccccagcagcggccaggccagcuacaagaucuucaagauggagaagggcaagguggugaagagcguggagcuggacgcccccaacuaccacuacgaggagugcagcugcuaccccgacgccggcgagaucaccugcgugugcagagacaacuggcacggcagcaacagacccugggugagcuucaaccagaaccuggaguaccagaucggcuacaucugcagcggcguguucggcgacaaccccagacccaacgacggcaccggcagcugcggccccgugagccccaacggcgccuacggcgugaagggcuucagcuucaaguacggcaacggcguguggaucggcagaaccaagagcaccaacagcagaagcggcuucgagaugaucugggaccccaacggcuggaucggcaccgacagcagcuucagcgugaagcaggacaucguggccaucaccgacuggagcggcuacagcggcagcuucgugcagcaccccgagcugaccggccuggacugcaugagacccugcuucuggguggagcugaucagaggcagacccaaggagagcaccaucuggaccagcggcagcagcaucagcuucugcggcgugaacagcgacaccgugagcuggagcuggcccgacggcgccgagcugcccuucaccaucgacaaguga

SEQ ID NO: 186229 - RNA, 1350 nt, Artificial Sequence
  derived and/or modified CDS sequence (opt4) from neuraminidase__InfluenzaA__BAK23431
augaaccccaaccagaagaucaucaccaucggcagcaucugcauggugaucggcaucgugagccugaugcugcagaucggcaacaugaucagcaucugggugagccacagcauccagaccggcaaccagugccaggccgagcccaucagcaacaccaaguuccugaccgagaaggccguggccagcgugacccuggccggcaacagcagccugugccccaucagcggcugggccguguacagcaaggacaacagcaucagaaucggcagcagaggcgacguguucgugaucagagagcccuucaucagcugcagccaccuggagugcagaaccuucuuccugacccagggcgcccugcugaacgacaagcacagcaacggcaccgugaaggacagaagcccccacagaacccugaugagcugccccgugggcgaggcccccagccccuacaacagcagauucgagagcguggccuggagcgccagcgccugccacgacggcaccagcuggcugaccaucggcaucagcggccccgacaacggcgccguggccgugcugaaguacaacggcaucaucaccgacaccaucaagagcuggagaaacaacauccugagaacccaggagagcgagugcgccugcgugaacggcagcugcuucaccgugaugaccgacggccccagcagcggccaggccagcuacaagaucuucaagauggagaagggcaagguggugaagagcguggagcuggacgcccccaacuaccacuacgaggagugcagcugcuaccccgacgccggcgagaucaccugcgugugcagagacaacuggcacggcagcaacagacccugggugagcuucaaccagaaccuggaguaccagaucggcuacaucugcagcggcguguucggcgacaaccccagacccaacgacggcaccggcagcugcggccccgugagccccaacggcgccuacggcgugaagggcuucagcuucaaguacggcaacggcguguggaucggcagaaccaagagcaccaacagcagaagcggcuucgagaugaucuggggccccaacggcuggaccggcaccgacagcagcuucagcgugaagcaggacaucguggccaucaccgacuggagcggcuacagcggcagcuucgugcagcaccccgagcugaccggccuggacugcaucagacccugcuucuggguggagcugaucagaggcagacccaaggagagcaccaucuggaccagcggcagcagcaucagcuucugcggcgugaacagcgacaccgugagcuggagcuggcccgacggcgccgagcugcccuucaccaucgacaaguga

SEQ ID NO: 186230 - RNA, 1350 nt, Artificial Sequence; identical to SEQ ID NO: 186223
  derived and/or modified CDS sequence (opt4) from neuraminidase__InfluenzaA__BAK23432

SEQ ID NO: 186231 - RNA, 1350 nt, Artificial Sequence; identical to SEQ ID NO: 186223
  derived and/or modified CDS sequence (opt4) from neuraminidase__InfluenzaA__BAK23433

SEQ ID NO: 186232 - RNA, 1410 nt, Artificial Sequence
  derived and/or modified CDS sequence (opt4) from neuraminidase__InfluenzaA__BAM65748
augaaccccaaccagaagaucaucaccaucggcagcgugagccugaccaucagcaccaucugcuucuucaugcagaucgccauccugaucaccaccgugacccugcacuucaagcaguacgaguucaacagcccccccaacaaccaggugaugcugugcgagcccaccaucaucgagagaaacaucaccgagaucguguaccugaccaacaccaccaucgagaaggagaucugccccaagcuggccgaguacagaaacuggagcaagccccagugcgacaucaccggcuucgcccccuucagcaaggacaacagcaucagacugagcgccggcggcgacaucugggugaccagagagcccuacgugagcugcgaccccgacaagugcuuccaguucgcccugggccagggcaccacccugaacaacgugcacagcaacgacaccgugcacgacagaacccccuacagaacccugcugaugaacgagcugggcgugcccuuccaccugggcaccaagcaggugugcaucgccuggagcagcagcagcugccacgacggcaaggccuggcugcacgugugcgugaccggcgacgacaagaacgccaccgccagcuucaucuacaacggcagacugguggacagcaucgugagcuggagcaagaagauccugagaacccaggagagcgagugcgugugcaucaacggcaccugcaccguggugaugaccgacggcagcgccagcggcaaggccgacaccaagauccuguucaucgaggagggcaagaucgugcacaccagcacccugagcggcagcgcccagcacguggaggagugcagcugcuaccccagauaccccggcgugagaugcgugugcagagacaacuggaagggcagcaacagacccaucguggacaucaacaucaaggacuacagcaucgugagcagcuacgugugcagcggccuggugggcgacacccccagaaagaccgacagcagcagcagcagccacugccuggaccccaacaacgaggagggcggccacggcgugaagggcugggccuucgacgacggcaacgacguguggaugggcagaaccaucagcgagaagagcagacugggcuacgagaccuucaaggugaucggcggcuggagcaaccccaacagcaagagccagaucaacagacaggugaucguggacaugggcaacagaagcggcuacagcggcaucuucagcguggagggcaagagcugcaucaacagaugcuucuacguggagcugaucagaggcagaaaggacgagaccgaggugcuguggaccagcaacagcaucgugguguucugcggcaccagcggcaccuacggcaccggcagcuggcccgacggcgccgacaucaagcugaugagcaucuga

SEQ ID NO: 186233 - RNA, 1350 nt, Artificial Sequence
  derived and/or modified CDS sequence (opt4) from neuraminidase__InfluenzaA__BAM85817
augaaccccaaccagaagaucaucaccaucggcagcaucugcauggugaccggcaucgugagccugaugcugcagaucggcaacaugaucagcaucugggugagccacagcauccacaccggcaaccagcaccagagcgagcccaucagcaacaccaacuuccugaccgagaaggccguggccagcgugaagcuggccggcaacagcagccugugccccaucaacggcugggccguguacagcaaggacaacagcaucagaaucggcagcaagggcgacguguucgugaucagagagcccuucaucagcugcagccaccuggagugcagaaccuucuuccugacccagggcgcccugcugaacgacaagcacagcaacggcaccgugaaggacagaagcccccacagaacccugaugagcugccccgugggcgaggcccccagccccuacaacagcagauucgagagcguggccuggagcgccagcgccugccacgacggcaccagcuggcugaccaucggcaucagcggccccgacaacggcgccguggccgugcugaaguacaacggcaucaucaccgacaccaucaagagcuggagaaacaacauccugagaacccaggagagcgagugcgccugcgugaacggcagcugcuucaccgugaugaccgacggccccagcaacggccaggccagccacaagaucuucaagauggagaagggcaagguggugaagagcguggagcuggacgcccccaacuaccacuacgaggagugcagcugcuaccccaacgccggcgagaucaccugcgugugcagagacaacuggcacggcagcaacagacccugggugagcuucaaccagaaccuggaguaccagaucggcuacaucugcagcggcguguucggcgacaaccccagacccaacgacggcaccggcagcugcggccccgugagcagcaacggcgccuacggcgugaagggcuucagcuucaaguacggcaacggcguguggaucggcagaaccaagagcaccaacagcagaagcggcuucgagaugaucugggaccccaacggcuggaccgagaccgacagcagcuucagcgugaagcaggacaucguggccaucaccgacuggagcggcuacagcggcagcuucgugcagcaccccgagcugaccggccuggacugcaucagacccugcuucuggguggagcugaucagaggcagacccaaggagagcaccaucuggaccagcggcagcagcaucagcuucugcggcgugaacagcgacaccgugggcuggagcuggcccgacggcgccgagcugcccuucaccaucgacaaguga

SEQ ID NO: 186234 - RNA, 1350 nt, Artificial Sequence
  derived and/or modified CDS sequence (opt4) from neuraminidase__InfluenzaA__BAM85818
augaaccccaaccagaagaucaucaccaucggcagcaucugcauggugaucggcaucgugagccugaugcugcagaucggcaacaugaucagcaucugggugagccacagcauccagaccggcaaccagcaccaggccgagcccaucagaaacaccaacuuccugaccgagaacgccguggccagcgugacccuggccggcaacagcagccugugccccaucagaggcugggccgugcacagcaaggacaacagcaucagaaucggcagcaagggcgacguguucgugaucagagagcccuucaucagcugcagccaccuggagugcagaaccuucuuccugacccagggcgcccugcugaacgacaagcacagcaacggcaccgugaaggacagaagcccccacagaacccugaugagcugccccgugggcgaggcccccagccccuacaacagcagauucgagagcguggccuggagcgccagcgccugccacgacggcaccagcuggcugaccaucggcaucagcggccccgacaacggcgccguggccgugcugaaguacaacggcaucaucaccgacaccaucaagagcuggagaaacaacauccugagaacccaggagagcgagugcgccugcgugaacggcagcugcuucaccgugaugaccgacggccccagcaacggccaggccagcuacaagaucuucaagauggagaagggcaagguggugaagagcguggagcugaacgcccccaacuaccacuacgaggagugcagcugcuaccccgacgccggcgagaucaucugcgugugcagagacaacuggcacggcagcaacagacccugggugagcuucaaccagaaccuggaguaccagaucggcuacaucugcagcggcguguucggcgacaaccccagacccaacgacggcaccggcagcugcggccccgugagccccaacggcgccuacggcaucaagggcuucagcuucaaguacggcaacggcguguggaucggcagaaccaagagcaccaacagcagaagcggcuucgagaugaucugggaccccaacggcuggaccggcaccgacagcaacuucagcgugaagcaggacaucguggccaucaccgacuggagcggcuacagcggcagcuucgugcagcaccccgagcugaccggccuggacugcaucagacccugcuucuggguggagcugaucagaggcagacccaaggagagcaccaucuggaccagcggcagcagcaucagcuucugcggcgugaacagcgacaccgugagcuggagcuggcccgacggcgccgagcugcccuucaccaucgacaaguga

SEQ ID NO: 186235 - RNA, 1350 nt, Artificial Sequence
  derived and/or modified CDS sequence (opt4) from neuraminidase__InfluenzaA__BAM85819
augaaccccaaccagaagaucaucaccaucggcagcaucugcauggugaucggcaucgugagccugaugcugcagaucggcaacaugaucagcaucugggugagccacagcauccagaccggcaaccagaaccagguggagcccaucaucaacaccaacuuccugaccgagaaggccguggccagcaucacccuggccggcaacagcagccugugccccaucagaggcugggccauccacagcaaggacaacagcaucagaaucggcagcaagggcgacguguucgugaucagagagcccuucaucagcugcagccaccuggagugcagaaccuucuuccugacccagggcgcccugcugaacgacaagcacagcaacggcaccgugaaggacagaagcccccacagaacccugaugagcugccccgugggcgaggcccccagccccuacaacagcagauucgagagcguggccuggagcgccagcgccugccacgacggcaccagcuggcugaccaucggcaucagcggccccgacaacggcgccguggccgugcugaaguacaacggcaucaucaccgacaccaucaagagcuggagaaacaacauccugagaacccaggagagcgagugcgccugcgugaacggcagcugcuucaccgugaugaccgacggccccagcgacggccaggccagcuacaagaucuucaagauggagaagggcaaggugaucaagagcguggagcuggacgcccccaacuaccacuacgaggagugcagcugcuaccccgacgccggcgagaucaccugcgugugcagagacaacuggcacggcagcaacagacccugggugagcuucaaccagaaccuggaguaccagaucggcuacaucugcagcggcguguucggcgacaaccccagacccaacgacggcaccggcagcugcggccccgugagccacaacggcgccuacggcgugaagggcuucagcuucaaguacggcaacggcguguggaucggcagaaccaagagccccaacagcagaagcggcuucgagaugaucugggaccccaacggcuggagcgagaccgacagcagcuucagcgugaagcaggacaucguggccaucaccgacuggagcggcuacagcggcagcuucgugcagcaccccgagcugaccggccuggacugcaucagacccugcuucuggguggagcugaucagaggcagacccaaggagagcaccguguggaccagcggcagcagcaucagcuucugcggcgugagcagcgacaccgugagcuggagcuggcccgacggcgccgagcugcccuucaccaucgacaaguga

SEQ ID NO: 186236 - RNA, 1350 nt, Artificial Sequence
  derived and/or modified CDS sequence (opt4) from neuraminidase__InfluenzaA__BAM85820
augaaccccaaccagaagaucaucaccaucggcagcaucugcauggugaucggcaucgugagccugaugcugcagaucggcaacaugaucagcaucugggugagccacagcauccagaccggcaaccagcaccaggccgagcccaucagcaacaccaacuuccugaccgagaaggccguggccagcgugacccuggccggcaacagcagccugugccccaucagaggcugggccgugcacagcaaggacaacagcaucagaaucggcagcaagggcgacguguucgugaucagagagcccuucaucagcugcagccaccuggagugcagaaccuucuuccugacccagggcgcccugcugaacgacaagcacagcaacggcaccgugaaggacagaagcccccacagaacccugaugagcugccccgugggcgaggcccccagccccuacaacagcagauucgagagcguggccuggagcgccagcgccugccacgacggcaccagcuggcugaccaucggcaucagcggccccgacaacggcgccguggccgugcugaaguacaacggcaucaucaccgacaccaucaagagcuggagaaacaacauccugagaacccaggagagcgagugcgccugcgugaacggcagcugcuucaccgugaugaccgacggccccagcaacggccaggccagcuacaagaucuucaagauggagaagggcaagguggugaagagcguggagcuggacgcccccaacuaccacuacgaggagugcagcugcuaccccgacgccggcgagaucaccugcgugugcagagacaacuggcacggcagcaacagacccugggugagcuucaaccagaaccuggaguaccagaucggcuacaucugcagcggcguguucggcgacaaccccagacccaacgacggcaccggcagcugcggccccgugagccccaacggcgccuacggcgugaagggcuucagcuucaaguacggcaacggcguguggaucggcagaaccaagagcaccaacagcagaagcggcuucgagaugaucugggaccccaacggcuggaccggcaccgacagcagcuucagcgugaagcaggacaucguggccaucaccgacuggagcggcuacagcggcagcuucgugcagcaccccgagcugaccggccuggacugcaucagacccugcuucuggguggagcugaucagaggcagacccaaggagagcaccaucuggaccagcggcagcagcaucagcuucugcggcgugaacagcgacaccgugagcuggagcuggcccgacggcgccgagcugcccuucaccaucgacaaguga

SEQ ID NO: 186237 - RNA, 1350 nt, Artificial Sequence; identical to SEQ ID NO: 175068
  derived and/or modified CDS sequence (opt4) from neuraminidase__InfluenzaA__BAM85821

SEQ ID NO: 186238 - RNA, 1350 nt, Artificial Sequence
  derived and/or modified CDS sequence (opt4) from neuraminidase__InfluenzaA__BAM85822
augaaccccaaccagaagaucaucaccaucggcagcaucugcauggugaccggcaucgugagccugaugcugcagaucggcaacaugaucagcaucugggugagccacagcauccacaccggcaaccagcaccagagcgagcccaucagcaacaccaacuuccugaccgagaaggccguggccagcgugaagcuggccggcaacagcagccugugccccaucaacggcugggccguguacagcaaggacaacagcaucagaaucggcagcaagggcgacguguucgugaucagagagcccuucaucagcugcagccaccuggagugcagaaccuucuuccugacccagggcgcccugcugaacgacaagcacagcaacggcaccgugaaggacagaagcccccacagaacccugaugagcugccccgugggcgaggcccccagccccuacaacagcagauucgagagcguggccuggagcgccagcgccugccacgacggcaccagcuggcugaccaucggcaucagcggccccgacaacggcgccguggccguggugaaguacaacggcaucaucaccgacaccaucaagagcuggagaaacaacauccugagaacccaggagagcgagugcgccugcgugaacggcagcugcuucaccgugaugaccgacggccccagcaacagccaggccagccacaagaucuucaagauggagaagggcaagguggugaagagcguggagcuggacgcccccaacuaccacuacgaggagugcagcugcuaccccgacgccggcgagaucaccugcgugugcagagacaacuggcacggcagcaacagacccugggugagcuucaaccagaaccuggaguaccagaucggcuacaucugcagcggcguguucggcgacaaccccagacccaacgacggcaccggcagcugcggccccgugagcagcaacggcgccuacggcgugaagggcuucagcuucaaguacggcaacggcguguggaucggcagaaccaagagcaccaacagcagaagcggcuucgagaugaucugggaccccaacggcuggaccgagaccgacagcagcuucagcgugaagcaggacaucguggccaucaccgacuggagcggcuacagcggcagcuucgugcagcaccccgagcugaccggccuggacugcaucagacccugcuucuggguggagcugaucagaggcagacccaaggagagcaccaucuggaccagcggcagcagcaucagcuucugcggcgugaacagcgacaccgugggcuggagcuggcccgacggcgccgagcugcccuucaccaucgacaaguga

SEQ ID NO: 186239 - RNA, 1410 nt, Artificial Sequence
  derived and/or modified CDS sequence (opt4) from neuraminidase__InfluenzaA__BAM85823
augaaccccaaccagaagaucaccaccaucggcagcaucugcauggugaucggcaucgugagccugaugcugcagaucggcaacaucaucagcaucugggugagccacagcauccagaccggcaaccagcaccaggccggccccugcaaccagagcaucaucaccuacgagaacaacaccugggugaaccagaccuacgugaacaucagcaacaccaacuuccugaccgagaagaccguggccagcgugacccuggccggcaacagcagccugugccccaucagcggcugggccguguacagcaaggacaacggcaucagaaucggcagcaagggcgacguguucgugaucagagagcccuucaucagcugcagccaccuggagugcagaaccuucuuccugacccagggcgcccugcugaacgacaagcacagcaacggcaccgugaaggacagaagcccccacagaacccugaugagcugccccgugggcgaggcccccagccccuacaacagcagauucgagagcguggccuggagcgccagcgccugccacgacggcaucaacuggcugaccaucggcaucagcggccccgacaacggcgccguggccgugcugaaguacaacggcaucaucaccgacaccaucaagagcuggagaaacaacauccugagaacccaggagagcgagugcgccugcgugaacggcagcugcuucaccaucaugaccgacggccccagcaacggccaggccagcuacaagaucuucagaaucgagaagggcaagguggugaagagcguggagcugaacgcccccaacuaccacuacgaggagugcagcugcuaccccgacgccggcgagaucaccugcgugugcagagacaacuggcacggcagcaacagacccugggugagcuucaaccagaaccuggaguaccagaucggcuacaucugcagcggcaucuucggcgacaaccccagacccaacgacggcaccggcagcugcggccccgugagccccaacggcgccuacggcaucaagggcuucagcuucaaguacggcaacggcguguggaucggcagaaccaagagcaccaacagcagaagcggcuucgagaugaucugggaccccaacggcuggaccggcaccgacagcaacuucagcgugaagcaggacaucguggccaucaccgacuggagcggcuacagcggcagcuucgugcagcaccccgagcugaccggccuggacugcaucagacccugcuucuggguggagcugaucagaggcagacccaaggagagcaccaucuggaccagcggcagcagcaucagcuucugcggcgugaacagcgacaccgugggcuggagcuggcccgacggcgccgagcugcccuucaccaucgacaaguga

SEQ ID NO: 186240 - RNA, 1350 nt, Artificial Sequence
  derived and/or modified CDS sequence (opt4) from neuraminidase__InfluenzaA__BAM85824
augaaccccaaccagaagaucaucaccaucggcagcaucugcauggugaucggcaucgugagccugcugcugcagaucggcaacaugaucagcaucuggaucagccacagcauccagaccggcaaccagcaccaggccgagagcaucagcaacaccaacccccugaccgagaaggccguggccagcgugacccuggccggcaacagcagccugugccccaucagaggcugggccgugcacagcaaggacaacagcaucagaaucggcagcaagggcgacguguucgugaucagagagcccuucaucagcugcagccaccuggagugcagaaccuucuuccugacccagggcgcccugcugaacgacaagcacagcaacggcaccgugaaggacagaagcccccacagaacccugaugagcugccccgugggcgaggcccccagccccuacaacagcagauucgagagcguggccuggagcgccagcgccugccacgacggcaccagcuggcugaccaucggcaucagcggccccgacaacggcgccguggccgugcugaaguacaacggcaucaucaccgacaccaucaagagcuggagaaacaacauccugagaacccaggagagcgagugcgccugcgugaacggcagcugcuucaccgugaugaccgacggccccagcaacggccaggccagcuacaagaucuucaagauggagaagggcaagguggugaagagcguggagcuggacgcccccaacuaccacuacgaggagugcagcugcuaccccgacgccagcgagaucaccugcgugugcagagacaacuggcacggcagcaacagacccugggugagcuucaaccagaaccuggaguaccagaucggcuacaucugcagcggcguguucggcgacaaccccagacccaacgacggcaccggcagcugcggccccauguuccccaacggcgccuacggcaucaagggcuucagcuucaaguacggcaacggcguguggaucggcagaaccaagagcaccaacagcagaagcggcuucgagaugaucugggaccccaacggcuggaccggcaccgacagcagcuucagcgugaagcaggacaucguggccaucaccgacuggagcggcuacagcggcagcuucgugcagcaccccgagcugaccggccuggacugcaucagacccugcuucuggguggagcugaucagaggcagacccaaggagagcaccaucuggaccagcggcagcagcaucagcuucugcggcgugaacagcgacaccgugagcuggagcuggcccgacggcgccgagcugcccuucaccaucgacaaguga

SEQ ID NO: 186241 - RNA, 1350 nt, Artificial Sequence
  derived and/or modified CDS sequence (opt4) from neuraminidase__InfluenzaA__BAM85825
augaaccccaaccagaagaucaucaccaucggcagcaucugcauggugaucggcaucgugagccugaugcugcagaucggcaacaugaucagcaucugggugagccacagcauccagaccggcaaccagaaccagguggagcccaucaucaacaccaacuuccugaccgagaaggccguggccagcaucacccuggccggcaacagcagccugugccccaucagaggcugggccauccacagcaaggacaacagcaucagaaucggcagcaagggcgacguguucgugaucagagagcccuucaucagcugcagccaccuggagugcagaaccuucuuccugacccagggcgcccugcugaacgacaagcacagcaacggcaccgugaaggacagaagcccccacagaacccugaugagcugccccgugggcgaggcccccagccccuacaacagcagauucgagagcguggccuggagcgccagcgccugccacgacggcaccagcuggcugaccaucggcaucagcggccccgacaacggcgccguggccgugcugaaguacaacggcaucaucaccgacaccaucaagagcuggagaaacaacauccugagaacccaggagagcgagugcgccugcgugaacggcagcugcuucaccgugaugaccgacggccccagcaacggccaggccagcuacaagaucuucaagauggagaagggcaaggugaucaagagcguggagcuggacgcccccaacuaccacuacgaggagugcagcugcuaccccgacgccggcgagaucaccugcgugugcagagacaacuggcacggcagcaacagacccugggugagcuucaaccagaaccuggaguaccagaucggcuacaucugcagcggcguguucggcgacaaccccagacccaacgacggcaccggcagcugcggccccgugagccacaacggcgccuacggcgugaagggcuucagcuucaaguacggcaacggcguguggaucggcagaaccaagagccccaacagcagaagcggcuucgagaugaucugggaccccaacggcuggagcgagaccgacagcagcuucagcgugaagcaggacaucguggccaucaccgacuggagcggcuacagcggcagcuucgugcagcaccccgagcugaccggccuggacugcaucagacccugcuucuggguggagcugaucagaggcagacccaaggagagcaccguguggaccagcggcagcagcaucagcuucugcggcgugaacagcgacaccgugagcuggagcuggcccgacggcgccgagcugcccuucaccaucgacaaguga

SEQ ID NO: 186242 - RNA, 1350 nt, Artificial Sequence
  derived and/or modified CDS sequence (opt4) from neuraminidase__InfluenzaA__BAM85826
augaaccccaaccagaagaucaucaccaucggcagcaucugcauggugaucggcaucgugagccugaugcugcagaucggcaacaugaucagcaucugggugagccacagcauccagaccggcaaccagagacaggccgagcccaucagcaacaccaaguuccugaccgagaaggccguggccagcgugacccuggccggcaacagcagccugugccccaucagcggcugggccguguacagcaaggacaacagcaucagaaucggcagcagaggcgacguguucgugaucagagagcccuucaucagcugcagccaccuggagugcagaaccuucuuccugacccagggcgcccugcugaacgacaagcacagcaacggcaccgugaaggacagaagcccccacagaacccugaugagcugccccgugggcgaggcccccagccccuacaacagcagauucgagagcguggccuggagcgccagcgccugccacgacggcaccagcuggcugaccaucggcaucagcggccccgacaacggcgccguggccgugcugaaguacaacggcaucaucaccgacaccaucaagagcuggagaaacaacauccugagaacccaggagagcgagugcgccugcgugaacggcagcugcuucaccgugaugaccgacggccccagcaacggccaggccagcuacaagaucuucaagauggagaagggcaagguggugaagagcguggagcuggacgcccccaacuaccacuacgaggagugcagcugcuaccccgacgccggcgagaucaccugcgugugcagagacaacuggcacggcagcaacagacccugggugagcuucaaccagaaccuggaguaccagaucggcuacaucugcagcggcguguucggcgacaaccccagacccaacgacggcaccggcagcugcggccccgugagccugaacggcgccuacggcgugaagggcuucagcuucaaguacggcaacggcguguggaucggcagaaccaagagcaccaacagcagaagcggcuucgagaugaucugggaccccaacggcuggaccggcaccgacagcagcuucagcgugaagcaggacaucguggccaucaccgacuggagcggcuacagcggcagcuucgugcagcaccccgagcugaccggccuggacugcaucagacccugcuucuggguggagcugaucagaggcagacccaaggagagcaccaucuggaccagcggcagcagcaucagcuucugcggcgugaacagcgacaccgugagcuggagcuggcccgacggcgccgagcugcccuucaccaucgacaaguga

SEQ ID NO: 186243 - RNA, 1350 nt, Artificial Sequence
  derived and/or modified CDS sequence (opt4) from neuraminidase__InfluenzaA__BAM85827
augaaccccaaccagaagaucaucaccaucggcagcaucugcauggugaucggcguggugagccugaugcugcagaccggcaacaucaucagcaucugggugagccacagcauccagaagggcaaccagcaccaggccgagagcaucagcaacaccaacccccugaccgagaaggccguggccagcgugacccuggccggcaacagcagccugugccccaucagaggcugggccgugcacagcaaggacaacaacaucagaaucggcagcaagggcgacguguucgugaucagagagcccuucaucagcugcagccaccuggagugcagaaccuucuuccugacccagggcgcccugcugaacgacaagcacagcaacggcaccgugaaggacagaagcccccacagaacccugaugagcugccccgugggcgaggcccccagccccuacaacagcagauucgagagcguggccuggagcgccagcgccugccacgacggcaccagcuggcugaccaucggcaucagcggccccgacaacgaggccguggccgugcugaaguacaacggcaucaucaccgacaccaucaagagcuggagaaacaacauccugagaacccaggagagcgagugcgccugcgugaacggcagcugcuucaccgugaugaccgacggccccagcaacggccaggccagcuacaagaucuucaagauggagaagggcaagguggugaagagcguggagcuggacgcccccaacuaccacuacgaggagugcagcugcuaccccgacgccggcgagaucaccugcgugugcagagacaacuggcacggcagcaacagacccugggugagcuucaaccagaaccuggaguaccagaucggcuacaucugcagcggcguguucggcgacaaccccagacccaacgacggcaccggcagcugcggccccaugagccccaacggcgccuacggcgugaagggcuucagcuucaaguacggcaacggcguguggaucggcagaaccaagagcaccaccagcagaagcggcuucgagaugaucugggaccccaacggcuggaccggcaccgacagcagcuucagcgugaagcaggacaucguggccaucaccgacuggagcggcuacagcggcagcuucgugcagcaccccgagcugaccggccuggacugcaucagacccugcuucuggguggagcugaucagaggcagacccaaggagagcaccaucuggaccagcggcagcagcaucagcuucugcggcguggacagcgacaccgugagcuggagcuggcccgacggcgccgagcugcccuucaccaucgacaaguga

SEQ ID NO: 186244 - RNA, 1350 nt, Artificial Sequence
  derived and/or modified CDS sequence (opt4) from neuraminidase__InfluenzaA__BAM85828
augaaccccaaccagaagaucaucaccaucggcagcaucugcauggugaucggcaucgugagccugaugcugcagaucggcaacaugaucagcaucugggugagccacagcauccagaccggcaaccagagacaggccgagcccaucagcaacaccaaguuccugaccgagaaggccguggccagcgugacccuggccggcaacagcagccugugccccaucagcggcugggccguguacagcaaggacaacagcaucagaaucggcagcagaggcgacguguucgugaucagagagcccuucaucagcugcagccaccuggagugcagaaccuucuuccugacccagggcgcccugcugaacgacaagcacagcaacggcaccgugaaggacagaagcccccacagaacccugaugagcugccccgugggcgaggcccccagccccuacaacagcagauucgagagcguggccuggagcgccagcgccugccacgacggcaccagcuggcugaccaucggcaucagcggccccgacaacggcgccguggccgugcugaaguacaacggcaucaucaccgacaccaucaagagcuggagaaacaacauccugagaacccaggagagcgagugcgccugcgugaacggcagcugcuucaccgugaugaccgacggccccagcaacggccaggccagcuacaagaucuucaagauggagaagggcaagguggugaagagcguggagcuggacgcccccaacuaccacuacgaggagugcagcugcuaccccgacgccggcgagaucaccugcgugugcagagacaacuggcacggcagcaacagacccugggugagcuucaaccagaaccuggaguaccagaucggcuacaucugcagcggcguguucggcgacaaccccagacccaacgacggcaccggcagcugcggccccgugagccccaacggcgccuacggcgugaagggcuucagcuucaaguacggcaacggcguguggaucggcagaaccaagagcaccaacagcagaagcggcuucgagaugaucugggaccccaacggcuggaccggcaccgacagcagcuucagcgugaagcaggacaucguggccaucaccgacuggagcggcuacagcggcagcuucgugcagcaccccgagcugaccggccuggacugcaucagacccugcuucuggguggagcugaucagaggcagacccaaggagagcaccaucuggaccagcggcagcagcaucagcuucugcggcgugaacagcgacaccgugagcuggagcuggcccgacggcgccgagcugcccuucaccaucgacaaguga

SEQ ID NO: 186245 - RNA, 1350 nt, Artificial Sequence
  derived and/or modified CDS sequence (opt4) from neuraminidase__InfluenzaA__BAM85829
augaaccccaaccagaagaucaucaccaucggcagcaucugcaugaucaucggcaucgugagccugaugcugcagaucggcaacaucaucagcaucugggugagccacagcauccagaccggcaaccagcaccaggccgagcccaucagcgacaccaacuuccugaccgagaaggccguggccagcgugauccuggccggcaacagcagccugugccacaucagcggcugggccgugcacagcaaggacaacagcaucagaaucggcagcaagggcgacguguucgugaucagagagcccuucaucagcugcagccaccuggagugcagaaccuucuuccugacccagggcgcccugcugaacgacaagcacagcaacggcaccgugaaggacagaagcccccacagaacccugaugagcugccccgugggcgaggcccccagccccuacaacagcagauucgagagcguggccuggagcgccagcgccugccacgacggcaccagcuggcugaccaucggcaucagcggccccgacaacggcgccguggccgugcugaaguacaacggcaucaucaccgacaccaucaagagcuggagaaacuacauccugagaacccaggagagcgagugcgccugcgugaacggcagcugcuucaccgugaugaccgacggccccagcaacggccaggccagcuacaagaucuucaagaucgagaagggcaagguggugaagagcguggagcuggacgcccccaacuaccacuacgaggagugcagcugcuaccccgacgccggcgagaucaccugcgugugcagagacaacuggcacggcagcaacagacccugggugagcuucaaccagaaccuggaguaccagaucggcuacaucugcagcggcguguucggcgacacccccagacccaacgacggcaccggcagcugcggccccgugagccccaacggcgccuacggcgugaagggcuucagcuucaaguacggcaacggcguguggaucggcagaaccaagagcaccaacagcagaagcggcuucgagaugaucugggaccccaacggcuggaccggcaccgacagcagcuucagcgugaagcaggaccugguggccaucaccgacuggagcggcuacagcggcagcuucgugcagcaccccgagcugaccggccuggacugcaucagacccugcuucuggguggagcugaucagaggcagacccaaggagagcaccaucuggaccagcggcagcagcaucagcuucugcggcgugaacagcgacaccgugggcuggagcuggcccgacggcgccgagcugcccuucaccaucgacaaguga

SEQ ID NO: 186246 - RNA, 1413 nt, Artificial Sequence
  derived and/or modified CDS sequence (opt4) from neuraminidase__InfluenzaA__BAM85830
augaaccccaaccagaagaucaucaccaucggcagcaucugcauggccaucggcaccaucagccugauccugcagaucggcaacaucaucagcaucuggaucagccacagcauccagaccggcagccagaaccacaccggcaucugcaaccagagaaucaucaccuacgagaacaacaccugggugaaccagaccuacgugaacaucagcaacaccaacgugguggccggcaaggacaccaccagcaugauccuggccggcaacagcagccugugccccaucagaggcugggccaucuacagcaaggacaacagcaucagaaucggcagcaagggcgacguguucgugaucagagagcccuucaucagcugcagccaccuggagugcagaaccuucuuccugacccagggcgcccugcugaacgacaagcacagcaacggcaccgugaaggacagaagccccuacagagcccugaugagcugccccaucggcgaggcccccagccccuacaacagcagauucgagagcguggccuggagcgccagcgccugccacgacggcaugggcuggcugaccaucggcaucagcggccccgacgacggcgccguggccgugcugaaguacaacggcaucaucaccgagaucaucaagagcuggagaaagcagauccugagaacccaggagagcgagugcgugugcgugaacggcagcugcuucaccaucaugaccgacggccccagcaacggccccgccagcuacagaaucuucaagaucaagaagggcaagaucaccaagagcaucgagcuggacgcccccaacagccacuacgaggagugcagcugcuaccccgacaccggcaaggugaugugcgugugcagagacaacuggcacggcagcaacagacccugggugagcuucaaccagaaccuggacuaccagaucggcuacaucugcagcggcguguucggcgacaaccccagacccaaggacggcaagggcagcugcgaccccgugaacguggacggcgccgacggcgugaagggcuucagcuacagauacggcaacggcguguggaucggcagaaccaagagcaacagcagcagaaagggcuucgagaugaucugggaccccaacggcuggaccgacaccgacggcaacuuccuggugaagcaggacgugguggccaugaccgacuggagcggcuacagcggcagcuucgugcagcaccccgagcugaccggccuggacugcaugagacccugcuucuggguggagcugaucagaggccagcccagagagaagaccaccaucuggaccagcggcagcagcaucagcuucugcggcgugaacagcgacaccgugaacuggagcuggcccgacggcgccgagcugcccuucaccaucgacaaguga

SEQ ID NO: 186247 - RNA, 1413 nt, Artificial Sequence
  derived and/or modified CDS sequence (opt4) from neuraminidase__InfluenzaA__BAM85831
augaaccccaaccagaagaucaucaccaucggcagcaucagcaucgccaucggcaucaucagccugaugcugcagaucggcaacaucaucagcaucugggccagccacagcauccagaccggcagccagaaccacaccggcgugugcaaccagagaaucaucaccuacgagaacagcaccugggugaaccacaccuacgugaacaucaacaacaccaacgugaucgccggcaaggacaagaccagcgugacccuggccggcaacagcagccugugcagcaucagcggcugggccaucuacaccaaggacaacagcaucagaaucggcagcaagggcgacguguucgugaucagagagcccuucaucagcugcagccaccuggagugcagaaccuucuuccugacccagggcgcccugcugaacgacaagcacagcaacggcaccgugaaggacagaagccccuacagagcccugaugagcugcccccugggcgaggcccccagccccuacaacagcaaguucgagagcguggccuggagcgccagcgccugccacgacggcaucggcuggcugaccaucggcaucagcggccccgacaacggcgccguggccgugcugaaguacaacggcaucaucaccgagaccaucaagagcuggaagaagcagauccugagaacccaggagagcgagugcgugugcgugaacggcagcugcuucaccaucaugaccgacggccccagcaacggcgccgccagcuacaagaucuucaagaucgagaagggcaaggugaccaagagcaucgagcugaacgcccccaacuuccacuacgaggagugcagcugcuaccccgacaccggcaccgugaugugcgugugcagagacaacuggcacggcagcaacagacccugggugagcuucaaccagaaccuggacuaccagaucggcuacaucugcagcggcguguucggcgacaaccccagacccagagacggcgagggcagcugcaaccccgugaccgccgacggcgccaacggcgugaagggcuucagcuacaaguacggcaacggcguguggaucggcagaaccaagagcaacagacugagaaagggcuucgagaugaucugggaccccaacggcuggaccgacaccgacagcgacuucagcgugaagcaggacgugguggccaucaccgacuggagcggcuacagcggcagcuucgugcagcaccccgagcugaccggccugggcugcaucagacccugcuucuggguggagcuggugagaggccugcccagagagaacaccaccaucuggaccagcggcagcagcaucagcuucugcggcgugaacagcgacaccgccaacuggagcuggcccgacggcgccgagcugcccuucaccaucgacaaguga

SEQ ID NO: 186248 - RNA, 1413 nt, Artificial Sequence; identical to SEQ ID NO: 181568
  derived and/or modified CDS sequence (opt4) from neuraminidase__InfluenzaA__BAM85832

SEQ ID NO: 186249 - RNA, 1410 nt, Artificial Sequence
  derived and/or modified CDS sequence (opt4) from neuraminidase__InfluenzaA__BAM85833
augaaccccaaccagaagaucaucaccaucggcagcaccugcauggugaucggcaucaucagccugauccugcagaucggcaacaucaucagcaucugggugagccacagcauccagaccggcaaccagaaccagcccgagaccugcaaccagagcgugaucaccuacgagaacaagaccugggugaaccagaccuacgugaacaucagcaacaccaaccuggugaucgagagagacgugaucagcguggcccugcugggcaacagcagccugugccccaucagcggcugggccaucuacagcaaggacaacggcaucagaaucggcagcaagggcgacguguucgugaucagagagcccuucaucagcugcagccaccuggagugcagaaccuucuuccugacccagggcgcccugcugaacgacaagcacagcaacggcaccgugaaggacagaagccccuacagaacccugaugagcugccccgugggcgaggcccccagccccuacaacagcagauucgagagcguggccuggagcgccagcgccugccacgacggcaucagcuggcugaccgugggcaucagcggccccgacaacggcgccguggccgugcugaaguacaacggcaucaucaccgacaccgugaagagcuggagaaacaacauccugagaacccaggagagcgagugcgccugcaucaacggcagcugcuucaccaucaugaccgacggccccagcaacggccaggccagcuacaagaucuucaagaucgagaagggcaagguggugaagagcguggagcugaacgcccccaacuaccacuacgaggagugcagcugcuaccccgacgccagcgagaucaugugcgugugcagagacaacuggcacggcagcaacagacccugggugagcuucaacagaaaccuggaguaccagaucggcuacaucugcagcggcguguucggcgacaaccccagacccaacgacggcaccggcagcugcggccccgugagcagcaacggcgccuacggcgugaagggcuucagcuucaaguacggcaagggcguguggaucggcagaaccaagagcaccagcagcagaagcggcuucgagaugaucugggaccccaacggcuggaccgagaccgacagcagcuucagcgugaagcaggacaucguggccaucaccgacuggagcggcuacagcggcagcuucgugcagcaccccgagcugaccggccuggacugcaucagacccugcuucuggguggagcugaucagaggcagacccaaggagaacaccaucuggaccagcggcagcagcaucagcuucugcggcgugaacagcgacaccgugggcuggagcuggcccgacggcgccgagcugcccuucaccaucgacaaguga

SEQ ID NO: 186250 - RNA, 1410 nt, Artificial Sequence
  derived and/or modified CDS sequence (opt4) from neuraminidase__InfluenzaA__BAM85834
augaaccccaaccagaagaucaucaccaucggcagcgugagccugaccguggccaccgugugcuuccugaugcagaucgccauccugaccaccaccgugacccugcacuucaagcagaacgagugcagcauccccgccaacaaccaggugaugcccugcgagcccaucgugaucgagagaaacaucaccgagaucguguaccugaacaacaccaccaucgagaaggagaucugccugaaggccgccgaguacagaaacuggagcaagccccagugccagaucaccggcuucgcccccuucagcaaggacaacagcaucagacugagcgccggcggcgacaucugggugaccagagagcccuacgugagcugcgaccccagcaagugcuaccaguucgcccugggccagggcaccacccuggagaacaagcacagcaacggcaccauccacgacagaaucccccacagaacccugcugaugaacgagcugggcgugcccuuccaccugggcaccaagcaggugugcaucgccuggagcagcagcagcugccacgacggcaaggccuggcugcacgugugcgugaccggcgacgacagaaacgccaccgccagcuucaucuacgacggcaugcugguggacagcaucggcagcuggagccagaacauccugagaacccaggagagcgagugcgugugcaucaacggcaccugcgccguggugaugaccgacggcagcgccagcggcagagccgacaccagaauccuguucaucagagagggcaagaucgugcacaucagcccccugagcggcagcgcccagcacaucgaggagugcagcugcuaccccagauaccccaucaucagaugcgugugcagagacaacuggaagggcagcaacagacccgugaucgacaucaacauggccgacuacagcaucgacagcagcuacgugugcagcggccuggugggcgacacccccagaaacgacgacagcagcagcagcagcaacugcagagaccccaacaacgagagaggcaaccccggcgugaagggcugggccuucgacaacggcaacgacguguggaugggcagaaccaucagcaaggacagcagaagcggcuacgagaccuucagagugaucggcggcugggccaccgccaacagcaagagccagaccaacagacaggugaucguggacaacaacaacuggagcggcuacagcggcaucuucagcguggagagcaagagcugcaucaacagaugcuucuacguggagcugaucagaggcagaccccaggagaccagagugugguggaccagcaacagcaucgugguguucugcggcaccagcggcaccuacggcaccggcagcuggcccgacggcgccaacaucaacuucaugcccaucuga

SEQ ID NO: 186251 - RNA, 1410 nt, Artificial Sequence
  derived and/or modified CDS sequence (opt4) from neuraminidase__InfluenzaA__BAM85835
augaaccccaaccagaagaucaucaccaucggcagcgugagccugaccaucgccaccgugugcuuccugaugcagaucgccauccuggccaccaccgugacccugcacuucaagcagaacgagugcagcauccccgccaacaaccagguggugcccugcgagcccaucaucaucgagagaaacaucaccgagaucguguaccugaacaacaccaccaucgagaaggagaucugcagcaaggccguggacuacagaaacuggagcaagccccagugccagaucaccggcuucgcccccuucagcaaggacaacagcaucagacugagcgccggcggcgacaucugggugaccagagagcccuacgugagcugcgacaccagcaagugcuaccaguucgcccugggccagggcaccacccuggacaacaagcacagcaacggcaccauccacgacagaaucccccacagaacccugcugaugaacgagcugggcgugcccuuccaccugggcaccaagcaggugugcaucgccuggagcagcagcagcugccacgacggcaaggccuggcugcacgugugcgugaccggcgacgacagaaacgccaccgccagcuucaucuacaacggcaugcugguggacagcaucggcagcuggagccagaacauccugagaacccaggagagcgagugcgugugcaucaacggcagcugcaccguggugaugaccgacggcagcgccagcggcaaggccgacaccagaauccuguucgugaaggagggcaagaucauccacaucagcccccugagcggcagcgcccagcacaucgaggagugcagcugcuaccccagauaccccaacgugagaugcgugugcagagacaacuggagaggcagcaacagacccgugaucgacaucaacauggccgacuacagcaucgacagcagcuacgugugcagcggccuggugggcgacacccccagaaacgacgacaacagcagcagcagcaacugcagagaccccaacaacgagagaggcaaccccggcgugaagggcugggccuucgacagcggcgacgacguguggaugggcagaaccaucagcagagacagcagaagcggcuacgagaccuucaaggugaucggcggcugggccaccgccaacagcaagagccagaccagcagacaggugaucguggacaacaacaacuggagcggcuacagcggcguguucagcguggagcacaagagcugcaucaacagaugcuucuacguggagcugaucagaggcagaccccaggagaccagagugugguggaccagcaacagcaucgugguguucugcggcaccagcggcaccuacggcaccggcagcuggcccgacggcgccaacaucaacuucaugcccaucuga

SEQ ID NO: 186252 - RNA, 1410 nt, Artificial Sequence
  derived and/or modified CDS sequence (opt4) from neuraminidase__InfluenzaA__BAM85836
augaaccccaaccagaagaucaucaccaucggcagcgugagccugaccaucgccaccaucugcuuccugaugcagaucgccauccuggccaccaccgugacccugcacuucaagcagaacggcugcagcauccccagcaacaaccagguggugcccugcgagcccaucaucguggagagaaacaucaccgagaucguguaccugaacaacaccaccaucgagaaggagcugugccccaaggugcuggaguacagagacuggagcaagccccagugccagaucaccggcuucgcccccuucagcaaggacaacagcaucagacugagcgccggcggcgacaucugggugaccagagagcccuacgugagcugcagccccgacaagugcuaccaguucgcccugggccagggcaccacccuggacaacagacacagcaacggcaccauccacgacagaaucccccacagaacccugcugaugaacgagcugggcgugcccuuccaccugggcaccaagcaggugugcaucgccuggagcagcagcagcugccacgacggcagagccuggcugcacgugugcgugaccggcgacgacagaaacgccaccgccagcuucaucuacgacggcaugcugguggacagcaucggcagcuggagccagaacauccugagaacccaggagagcgagugcgugugcaucaacggcaccugcaccguggugaugaccgacggcagcgccagcggcagagccgacaccagaauccuguucgugaaggagggcaagaucgugcacaucagcccccugagcggcagcgcccagcacaucgaggagugcagcugcuaccccagauaccccgacgugagaugcgugugcagagacaacuggaagggcagcaacagacccaucaucgacaucaacauggccgacuacagcaucggcagcagcuacgugugcagcggccuggugggcgacacccccagaaacgacgacagcagcagcaacagcaacugcagagaccccaacaacgagagaggcaaccccggcgugaagggcugggccuucgacuacggcaacgacguguggaugggcagaaccaucagcaaggacagcagaagcggcuacgagaccuucagagugaucggcggcuggaccaccgccaacagcaagagccaggugaacagacaggugaucguggacaacagcaacuggagcggcuacagcggcaucuucagcguggagggcaagagcugcaucaacagaugcuucuacguggagcugaucagaggcagaccccaggagaccagagugugguggaccagcaacagcaucgugguguucugcggcaccagcggcaccuacggcaccggcagcuggcccgacggcgccaacaucaacuucaugcccaucuga

SEQ ID NO: 186253 - RNA, 1410 nt, Artificial Sequence
  derived and/or modified CDS sequence (opt4) from neuraminidase__InfluenzaA__BAO79717
augaaccccaaccagaagaucaucaccaucggcagcgugagccugaccaucagcaccaucugcuucuucaugcagaucgccauccugaucaccaccgugacccugcacuucaagcaguacgaguucaacagcccccccaacaaccaggugaugcugugcgagcccaccaucaucgagagaaacaucaccgagaucguguaccugaccaacaccaccaucgagaaggagaucugccccaagcccgccgaguacagaaacuggagcaagccccagugcggcaucaccggcuucgcccccuucagcaaggacaacagcaucagacugagcgccggcggcgacaucugggugaccagagagcccuacgugagcugcgaccccgacaagugcuaccaguucgcccugggccagggcaccacccugaacaacgugcacagcaacaacaccgugagagacagaacccccuacagaacccugcugaugaacgagcugggcgugcccuuccaccugggcaccaagcaggugugcaucgccuggagcagcagcagcugccacgacggcaaggccuggcugcacgugugcaucaccggcgacgacaagaacgccaccgccagcuucaucuacaacggcagacugguggacagcguggugagcuggagcaaggacauccugagaacccaggagagcgagugcgugugcaucaacggcaccugcaccguggugaugaccgacggcagcgccagcggcaaggccgacaccaagauccuguucaucgaggagggcaagaucgugcacaccagcacccugagcggcagcgcccagcacguggaggagugcagcugcuaccccagauaccccggcgugagaugcgugugcagagacaacuggaagggcagcaacagacccaucguggacaucaacaucaaggaccacagcaucgugagcagcuacgugugcagcggccuggugggcgacacccccagaaagaacgacagcagcagcagcagccacugccuggaccccaacaacgaggagggcggccacggcgugaagggcugggccuucgacgacggcaacgacguguggaugggcagaaccaucaacgagaccagcagacugggcuacgagaccuucaaggugaucgagggcuggagcaaccccaagagcaagcugcagaucaacagacaggugaucguggacagaggcgacagaagcggcuacagcggcaucuucagcguggagggcaagaacugcaucaacagaugcuucuacguggagcugaucagaggcagaaaggaggagaccgaggugcuguggaccagcaacagcaucgugguguucugcggcaccagcggcaccuacggcaccggcagcuggcccgacggcgccgaccugaaccugaugcccaucuga

SEQ ID NO: 186254 - RNA, 1413 nt, Artificial Sequence; identical to SEQ ID NO: 175119
  derived and/or modified CDS sequence (opt4) from neuraminidase__InfluenzaA__CAA33354

SEQ ID NO: 186255 - RNA, 1404 nt, Artificial Sequence
  derived and/or modified CDS sequence (opt4) from Neuraminidase__InfluenzaA__CAB95858
augaaccccaaccagaagaucaucgcccugggcagcgugagcaucaccaucgccaccaucugccugcugaugcagaucgccauccuggccaccaccaugacccugcacuucaacgagugcaccaaccccagcaacaaccaggccaugcccugcgagcccaucaucaucgagagaaacaucaccgagaucgugcaccugaacaacaccaccaucgagaaggagagcugccccaagguggccgaguacaagaacuggagcaagccccagugccagaucaccggcuucgcccccuucagcaaggacaacagcaucagacugagcgccggcggcgacaucugggugaccagagagcccuacgugagcugcggccugggcaacugcuaccaguucgcccugggccagggcaccacccugaacaacaagcacagcaacggcaccauccacgacagaagcccccacagaacccugcugaugaacgagcugggcgugcccuuccaccugggcaccaagcaggugugcaucgccuggagcagcagcagcugccacgacggcaaggccuggcugcacgugugcgugaccggcgacgacagaaacgccaccgccagcaucaucuacgacggcaugcugaccgacagcaucggcagcuggagcaagaacauccugagaacccaggagagcgagugcgugugcaucaacggcaccugcaccguggugaugaccgacggcagcgccagcggcagagccgacaccaagauccuguucaucagagagggcaagaucgugcacaucagcccccugagcggcagcgcccagcacguggaggagugcagcugcuaccccagauaccccgaggugagaugcgugugcagagacaacuggaagggcagcaacagacccgugcuguacaucaacguggccgacuacagcguggacagcagcuacgugugcagcggccuggugggcgacacccccagaaacgacgacagcagcagcagcagcaacugcagagaccccaacaacgagagaggcggccccggcgugaagggcugggccuucgacaacggcaacgacguguggaugggcagaaccaucaagaaggacagcagaagcggcuacgagaccuucagaguggugggcggcuggaccaccgccaacagcaagagccagaucaacagacaggugaucguggacagcgacaacuggagcggcuacagcggcaucuucagcguggagggcaagaccugcaucaacagaugcuucuacguggagcugaucagaggcagaccccaggagaccagagugugguggaccagcaacagcaucaucguguucugcggcaccagcggcaccuacggcaccggcagcuggcccgacggcgccaacaucaacuucaugagcaucuga

SEQ ID NO: 186256 - RNA, 1404 nt, Artificial Sequence
  derived and/or modified CDS sequence (opt4) from neuraminidase__InfluenzaA__CAB95859
augaaccccaaccagaagaucaucgcccugggcagcgugagcaucaccaucgccaccaucugccugcugaugcagaucgccauccuggccaccaccaugacccugcacuucaacgagugcaccaaccccagcaacaaccaggccgugcccugcgagcccaucaucaucgagagaaacaucaccgagaucgugcaccugaacaacaccaccaucgagaaggagagcugccccaagguggccgaguacaagaacuggagcaagccccagugccagaucaccggcuucgcccccuucagcaaggacaacagcaucagacugagcgccggcggcgacaucugggugaccagagagcccuacgugagcugcggccugggcaagugcuaccaguucgcccugggccagggcaccacccugaacaacaagcacagcaacggcaccauccacgacagaagcccccacagaacccugcugaugaacgagcugggcgugcccuuccaccugggcaccaagcaggugugcaucgccuggagcagcagcagcugccacgacggcaaggccuggcugcacgugugcgugaccggcgacgacagaaacgccaccgccagcaucaucuacgacggcaugcugaccgacagcaucggcagcuggagcaagaacauccugagaacccaggagagcgagugcgugugcaucaacggcaccugcaccguggugaugaccgacggcagcgccagcggcagagccgacaccaagauccuguucaucagagagggcaagaucgugcacaucggcccccugagcggcagcgcccagcacguggaggagugcagcugcuaccccagauaccccgaggugagaugcgugugcagagacaacuggaagggcagcaacagacccgugcuguacaucaacguggccgacuacagcguggacagcagcuacgugugcagcggccuggugggcgacacccccagaaacgacgacagcagcagcagcagcaacugcagagaccccaacaacgagagaggcggccccggcgugaagggcugggccuucgacaacggcaacgacguguggaugggcagaaccaucaagaaggacagcagaagcggcuacgagaccuucagaguggugggcggcuggaccaccgccaacagcaagagccagaucaacagacaggugaucguggacagcgacaacuggagcggcuacagcggcaucuucagcguggagggcaagaccugcaucaacagaugcuucuacguggagcugaucagaggcagaccccaggagaccagagugugguggaccagcaacagcaucaucguguucugcggcaccagcggcaccuacggcaccggcagcuggcccgacggcgccaacaucaacuucaugagcaucuga

SEQ ID NO: 186257 - RNA, 1410 nt, Artificial Sequence; identical to SEQ ID NO: 174633
  derived and/or modified CDS sequence (opt4) from Neuraminidase__InfluenzaA__CAC19707

SEQ ID NO: 186258 - RNA, 1410 nt, Artificial Sequence
  derived and/or modified CDS sequence (opt4) from neuraminidase__InfluenzaA__CAD29959
augaaccccaaccagaagaucaucaccaucggcagcgugagccugaccaucgccaccaucugcuuccugaugcagaucgccauccuggugaccaccgugacccugcacuucaagcaguacgagugcaacagcccccccaacaaccaggugaugcugugcgagcccaccaucaucgagagaaacaucaccgagaucguguaccugaccaacaccaccaucgagaaggagaucugccccaagcuggccgaguacagaaacuggagcaagccccagugcaacaucaccggcuucgcccccuucagcaaggacaacagcaucagacugagcgccggcggcgacaucugggugaccagagagcccuacgugagcugcgaccccgacaagugcuaccaguucgcccugggccagggcaccacccugaacaacggccacagcaacgacaccgugcacgacagaacccccuacagaacccugcugaugaacgagcugggcgugcccuuccaccugggcaccaagcaggugugcaucgccuggagcagcagcagcugccacgacggcaaggccuggcugcacgugugcgugaccggcgacgacgagaacgccaccgccagcuucaucuacaacggcagacugguggacagcaucggcagcuggagcaagaagauccugagaacccaggagagcgagugcgugugcaucaacggcaccugcaccguggugaugaccgacggcagcgccagcggcaaggccgacaccaagauccuguucaucgaggagggcaagaucgugcacaccagcccccugagcggcagcgcccagcacguggaggagugcagcugcuaccccagauaccccggcgugagaugcgugugcagagacaacuggaagggcagcaacagacccaucguggacaucaacgugaaggacuacagcaucgugagcagcuacgugugcagcggccuggugggcgacacccccagaaagaacgacagcagcagcagcagccacugccugaaccccaacaacgaggagggcggccacggcgugaagggcugggccuucgacgacggcaacgacguguggaugggcagaaccaucagcgagaagcugagaagcggcuacgagaccuucaaggugaucgagggcuggagcaagcccaacagcaagcugcagaucaacagacaggugaucguggacagaggcaacagaagcggcuacagcggcaucuucagcguggagggcaagagcugcaucaacagaugcuucuacguggagcugaucagaggcagaaagcaggagaccgaggugcuguggaccagcaacagcaucgugguguucugcggcaccagcggcaccuacggcaccggcagcuggcccgacggcgccgacaucaaccugaugcccaucuga

SEQ ID NO: 186259 - RNA, 1410 nt, Artificial Sequence
  derived and/or modified CDS sequence (opt4) from neuraminidase__InfluenzaA__CAD29960
augaaccccaaccagaagaucaucaccaucggcagcgugagccugaccaucgccaccaucugcuuccugaugcagaucgccauccuggugaccaccgugacccugcacuucaagcaguacgagugcaaccccccccccaacaaccaggugaugcugugcgagcccaccaucaucgagagaaacaucaccgagaucguguaccugaccaacaccaccaucgagaaggagaucugccccaagcuggccgaguacagaaacuggagcaagccccagugcaacaucaccggcuucgcccccuucagcaaggacaacagcaucagacugagcgccggcggcgacaucugggugaccagagagcccuacgugagcugcgaccccgacaagugcuaccaguucgcccugggccagggcaccacccugaacaacggccacagcaacgacaccgugcacgugagaacccccuacagaacccugcugaugaacgagcugggcgugcccuuccaccugggcaccaagcaggugugcaucgccuggagcagcagcagcugccacgacggcaaggccuggcugcacgugugcgugaccggcgacgacgagaacgccaccgccagcuucaucuacaacggcagacugguggacagcaucggcagcuggagcaagaagauccugagaacccaggagagcgagugcgugugcaucaacggcaccugcaccguggugaugaccgacggcagcgccagcggcaaggccgacaccaagauccuguucaucgaggagggcaagaucgugcacaccagcccccugagcggcagcgcccagcacguggaggagugcagcugcuaccccagauaccccggcgugagaugcgugugcagagacaacuggaagggcagcaacagacccaucguggacaucaacgugaaggacuacagcaucgugagcagcuacgugugcagcggccuggugggcgacacccccagaaagaacgacagcagcagcagcagccacugccugaaccccaacaacgaggagggcggccacggcgugaagggcugggccuucgacgacggcaacgacguguggaugggcagaaccaucagcgagaagcugagaagcggcuacgagaccuucaaggugaucgagggcuggagcaagcccaacagcaagcugcagaucaacagacaggugaucguggacagaggcaacagaagcggcuacagcggcaucuucagcguggagggcaagagcugcaucaacagaugcuucuacguggagcugaucagaggcagaaagcaggagaccgaggugcuguggaccagcaacagcaucgugguguucugcggcaccagcggcaccuacggcaccggcagcuggcccgacggcgccgacaucaaccugaugcccaucuga

SEQ ID NO: 186260 - RNA, 1410 nt, Artificial Sequence
  derived and/or modified CDS sequence (opt4) from neuraminidase__InfluenzaA__CAD29961
augaaccccaaccagaagaucaucaccaucggcagcgugagccugaccaucagcaccaucugcuucuucaugcagaucgccauccuggugaccaccgugacccugcacuucaagcaguacgagugcaacagcccccccaacaaccaggugaugcugugcgagcccaccaucaucgagagaaacaccaccgagaucguguaccugaccaacaccaccaucgagaaggagaucugccccaagcuggccgaguacagaaacuggagcaagccccagugcaacaucaccggcuucgcccccuucagcaaggacaacagcaucagacugagcgccggcggcgacaucugggugaccagagagcccuacgugagcugcgaccccgacaagugcuaccaguucgcccugggccagggcaccacccugaacaacggccacagcaacgacaccgugcacgacagaacccccuacagaacccugcugaugaacgagcugggcgugcccuuccaccugggcaccaagcaggugugcaucgccuggagcagcagcagcugccacgacggcaaggccuggcugcacgugugcgugaccggcgacgacgagaacgccaccgccagcuucaucuacaacggcagacugguggacagcaucggcagcuggagcaagaagauccugagaacccaggagagcgagugcgugugcaucaacggcaccugcaccguggugaugaccgacggcagcgccagcggcaaggccgacaccaagauccuguucaucgaggagggcaagaucgugcacaccagcacccugagcggcagcgcccagcacguggaggagugcagcugcuaccccagauaccccggcgugagaugcgugugcagagacaacuggaagggcagcaacagacccaucguggacaucaacaucaaggacuacagcaucgugagcagcuacgugugcagcggccuggugggcgacacccccagaaagaacgacagcagcagcagcagccacugccuggaccccaacaacgaggagggcggccacggcgugaagggcugggccuucgacgacggcaacgacguguggaugggcagaaccaucagcgagaagcugagaagcggcuacgagaccuucaaggugaucgagggcuggagcaagcccaacagcaagcugcagaucaacagacaggugaucguggacagaggcaacagaagcggcuacagcggcaucuucagcguggagggcaagagcugcaucaacagaugcuucuacguggagcugaucagaggcagaaagcaggagaccgaggugcuguggaccagcaacagcaucgugguguucugcggcaccagcggcaccuacggcaccggcagcggccccgacggcgccgacaucaaccugaugcccaucuga

SEQ ID NO: 186261 - RNA, 1410 nt, Artificial Sequence; identical to SEQ ID NO: 181605
  derived and/or modified CDS sequence (opt4) from neuraminidase__InfluenzaA__CAD29962

SEQ ID NO: 186262 - RNA, 1410 nt, Artificial Sequence; identical to SEQ ID NO: 174344
  derived and/or modified CDS sequence (opt4) from neuraminidase__InfluenzaA__CAD29963

SEQ ID NO: 186263 - RNA, 1410 nt, Artificial Sequence; identical to SEQ ID NO: 174344
  derived and/or modified CDS sequence (opt4) from neuraminidase__InfluenzaA__CAD29964

SEQ ID NO: 186264 - RNA, 1410 nt, Artificial Sequence; identical to SEQ ID NO: 174344
  derived and/or modified CDS sequence (opt4) from neuraminidase__InfluenzaA__CAD29965

SEQ ID NO: 186265 - RNA, 1410 nt, Artificial Sequence; identical to SEQ ID NO: 174344
  derived and/or modified CDS sequence (opt4) from neuraminidase__InfluenzaA__CAD29966

SEQ ID NO: 186266 - RNA, 1410 nt, Artificial Sequence; identical to SEQ ID NO: 174100
  derived and/or modified CDS sequence (opt4) from neuraminidase__InfluenzaA__CAD29967

SEQ ID NO: 186267 - RNA, 1410 nt, Artificial Sequence; identical to SEQ ID NO: 174100
  derived and/or modified CDS sequence (opt4) from neuraminidase__InfluenzaA__CAD29968

SEQ ID NO: 186268 - RNA, 1410 nt, Artificial Sequence; identical to SEQ ID NO: 174633
  derived and/or modified CDS sequence (opt4) from neuraminidase__InfluenzaA__CAD29969

SEQ ID NO: 186269 - RNA, 1410 nt, Artificial Sequence
  derived and/or modified CDS sequence (opt4) from neuraminidase__InfluenzaA__CAD29970
augaaccccaaccagaagaucaucaccaucggcagcgugagccugaccaucgccaccaucugcuuccugaugcagaucgccauccuggugaccaccgugacccugcacuucaagcaguacgagugcaacagcccccccaacaaccaggugaugcugugcgagcccaccaucaucgagagaaacaucaccgagaucguguaccugaccaacaccaccaucgagaaggagaucugccccaagcuggccgaguacagaaacuggagcaagccccagugcaagaucaccggcuucgcccccuucagcaaggacaacagcaucagacugagcgccggcggcgacaucugggugaccagagagcccuacgugagcugcgaccccgacaagugcuaccaguucgcccugggccagggcaccacccugaacaacagacacagcaacgacaccgugcacgacagaacccccuacagaacccugcugaugaacgagcugggcgugcccuuccaccugggcaccaagcaggugugcaucgccuggagcagcagcagcugccacgacggcaaggccuggcugcacgugugcgugaccggccacgacgagaacgccaccgccagcuucaucuacgacggcagacugguggacagcaucggcagcuggagcaagaagauccugagaacccaggagagcgagugcgugugcaucaacggcaccugcaccguggugaugaccgacggcagcgccagcggcagagccgacaccaagauccuguucaucgaggagggcaagaucgugcacaucagcccccugagcggcagcgcccagcacguggaggagugcagcugcuaccccagauaccccggcaucagaugcgugugcagagacaacuggaagggcagcaacagacccaucguggacaucaacgugaaggacuacagcaucgugagcagcuacgugugcagcggccuggugggcgacacccccagaaagaacgacagcagcagcagcagccacugccugaaccccaacaacgaggagggcggccacggcgugaagggcugggccuucgacgacggcaacgacguguggaugggcagaaccaucagcgagaagcugagaagcggcuacgagaccuucaaggugaucgagggcuggagcaagcccaacagcaagcugcagaucaacagacaggugaucguggacagaggcaacagaagcggcuacagcggcaucuucagcguggagggcaagagcugcaucaacagaugcuucuacguggagcugaucagaggcagaaagcaggagaccgaggugugguggaccagcaacagcaucgugguguucugcggcaccagcggcaccuacggcaccggcagcuggcccgacggcgccgacaucaaccugaugcccaucuga

SEQ ID NO: 186270 - RNA, 1410 nt, Artificial Sequence; identical to SEQ ID NO: 176615
  derived and/or modified CDS sequence (opt4) from neuraminidase__InfluenzaA__CAD29971

SEQ ID NO: 186271 - RNA, 1410 nt, Artificial Sequence
  derived and/or modified CDS sequence (opt4) from neuraminidase__InfluenzaA__CAD29972
augaaccccaaccagaagaucaucaccaucggcagcgugagccugaccaucgccaccaucugcuuccugaugcagaucgugauccuggugaccaccgugacccugcacuucaagcaguacgagugcaacagcccccccaacaaccaggugaugcugugcgagcccaccaucaucgagagaaacaucaccgagaucguguaccugaccaacaccaccaucgagaaggagaucugccccaagcuggccgaguacagaaacuggagcaagccccagugcaacaucaccggcuucgcccccuucagcaaggacaacagcaucagacugagcgccggcggcgacaucugggugaccagagagcccuacgugagcugcgaccccgacaagugcuaccaguucgcccugggccagggcaccacccugaacaacggccacagcaacgacaccgugcacgacagaacccccuacagaacccugcugaugaacgagcugggcgugcccuuccaccugggcaccaagcaggugugcaucgccuggagcagcagcagcugccacgacggcaaggccuggcugcacgugugcgugaccggcgacgacaagaacgccaccgccagcuucaucuacaacggcagacugguggacagcaucggcagcuggagcaagaagauccugagaacccaggagagcgagugcgugugcaucaacggcaccugcgccguggugaugaccgacggcagcgccagcggcaaggccgacaccaagauccuguucaucgaggagggcaagaucggccacaccagccugcugagcggcagcgcccagcacguggaggagugcagcugcuaccccagauaccccggcgugagaugcgugugcagagacaacuggaagggcagcaacagacccaucguggacaucaacgugaaggacuacagcaucgugagcagcuacgugugcagcggccuggugggcgacacccccagaaagaacgacagcagcagcagcagccacugccuggaccccaacaacgaggagggcggccacggcgugaagggcugggccuucgacgacggcaacgacguguggaugggcagaaccaucagcgagaagcugagaagcggcuacgagaccuucaaggugaucgagggcuggagcaagcccaacagcaagcugcagaucaacagacaggugaucguggacagaggcaacagaagcggcuacagcggcaucuucagcguggagggcaagagcugcaucaacagaugcuucuacguggagcugaucagaggcagaaaccaggagaccgagauccuguggaccagcaacagcaucgugguguucugcggcaccagcggcaccuacggcaccggcagcuggcccgacggcgccgacaucaaccugaugcccaucuga

SEQ ID NO: 186272 - RNA, 1410 nt, Artificial Sequence
  derived and/or modified CDS sequence (opt4) from neuraminidase__InfluenzaA__CAD29973
augaaccccaaccagaagaucaucaccaucggcagcgugagccugaccaucgccaccaucugcuuccugaugcagaucgccauccuggugaccaccgugacccugcacuucaagcaguacgagugcaacagcccccccaacaaccaggugaugcugugcgagcccaccaucaucgagagaaacaucaccgagaucguguaccugaccaacaccaccaucgagaaggagaucugccccaagcuggccgaguacagaaacuggagcaagccccagugcaagaucaccggcuucgcccccuucagcaaggacaacagcaucagacugagcgccggcggcgacaucugggugaccagagagcccuacgugagcugcgaccccggcaagugcuaccaguucgcccugggccagggcaccacccugaacaacagacacagcaacgacaccgugcacgacagaacccccuacagaacccugcugaugaacgagcugggcgugcccuuccaccugggcaccaagcaggugugcaucgccuggagcagcagcagcugccacgacggcaaggccuggcugcacgugugcgugaccggccacgacgagaacgccaccgccagcuucaucuacgacggcagacugguggacagcaucggcagcuggagcaagaagauccugagaacccaggagagcgagugcgugugcaucaacggcaccugcaccguggugaugaccgacggcagcgccagcggcagagccgacaccaagauccuguucaucgaggagggcaagaucgugcacaucagcccccugagcggcagcgcccagcacguggaggagugcagcugcuaccccagauacagcggcgugagaugcgugugcagagacaacuggaagggcagcaacagacccaucguggacaucaacgugaaggacuacagcaucgugagcagcuacgugugcagcggccuggugggcgacacccccagaaagaacgacagcagcagcagcagccacugccugaaccccaacaacgaggagggcggccacggcgugaagggcugggccuucgacgacggcaacgacguguggaugggcagaaccaucagcgagaagcugagaagcggcuacgagaccuucaaggugaucggcggcuggagcaagcccaacagcaagcugcagaucaacagacaggugaucguggacagaggcaacagaagcggcuacagcggcaucuucagcguggagggcaagagcugcaucaacagaugcuucuacguggagcugaucagaggcagaaagcaggagaccgaggugugguggaccagcaacagcaucgugguguucugcggcaccagcggcaccuacggcaccggcagcuggcccgacggcgccgacaucaaccugaugcccaucuga

SEQ ID NO: 186273 - RNA, 1410 nt, Artificial Sequence; identical to SEQ ID NO: 182644
  derived and/or modified CDS sequence (opt4) from neuraminidase__InfluenzaA__CAD29974

SEQ ID NO: 186274 - RNA, 1410 nt, Artificial Sequence
  derived and/or modified CDS sequence (opt4) from neuraminidase__InfluenzaA__CAD29984
augaaccccaaccagaagaucaucaccaucggcagcgugagccugaccaucgccaccaucugcuuccugaugcagaucgccauccuggugaccaccgugacccugcacuucaagcaguacgagugcaacagcccccccaacaaccaggugaugcugugcgagcccaccaucaucgagagaaacaucaccgagaucguguaccugaccaacaccaccaucgagaaggagaucugccccaagcuggccgaguacagaaacuggagcaagccccagugcaacaucaccggcuucgcccccuucagcaaggacaacagcaucagacugagcgccggcggcgacaucugggugaccagagagcacuacgugagcugcgacagagacaagugcuaccaguucgcccugggccagggcaccacccugaacaacggccacagcaacgacaccgugcacgacagaacccccuacagaacccugcugaugaacgagcugggcgugcccuuccaccugggcaccaagcaggugugcaucgccuggagcagcagcagcugccaccacggcaaggccuggcugcacgugugcgugaccggcgacgacgagaacgccaccgccagcuucaucuacaacggcagacugguggacagcaucggcagcuggagcaagaagauccugagaacccaggagagcgagugcgugugcaucaacggcaccugcaccguggugaugaccgacggcagcgccagcggcaaggccgacaccaagauccuguucaucaaggagggcaagaucgugcacaccagcagccugagcggcagcgcccagcacguggaggagugcagcugcuaccccagauaccccggcgugagaugcgugugcagagacaacuggaagggcagcaacagacccaucguggacaucaacgugaaggacuacagcaucgugagcagcuacgugugcagcggccuggugggcgacacccccagaaagaacgacagcagcagcagcagccacugccuggaccccaacaacgaggagggcggccacggcgugaagggcugggccuucgacgacggcaacgacguguggaugggcagaaccaucagcgagaagcugagaagcggcuacgagaccuucaaggugaucgagggcuggagcaaggccaacagcaagcugcagaucaacagacaggugaucguggacagaggcaacagaagcggcuacagcggcaucuucagcguggagagcaagagcugcaucaacagaugcuucuacguggagcugaucagaggcagaaagcaggagaccgaggugcuguggaccagcaacagcaucgugguguucugcggcaccagcggcaccuacggcaccggcagcuggcccgacggcgccgacaucaaccugaugcccaucuga

SEQ ID NO: 186275 - RNA, 1410 nt, Artificial Sequence
  derived and/or modified CDS sequence (opt4) from neuraminidase__InfluenzaA__CAD29985
augaaccccaaccagaagaucaucaccaucggcagcgugagccugaccaucgccaccaucugcuuccugaugcagaucgccauccuggugaccaccgugacccugcacuucaagcaguacgagugcaacagcccccccaacaaccaggugaugcugugcgagcccaccaucaucgagagaaacaucaccgagaucguguaccugaccaacaccaccaucgagaaggagaucugccccaagcuggccgaguacagaaacuggagcaagccccagugcaacaucaccggcuucgcccccuucagcaaggacaacagcaucagacugagcgccggcggcgacaucugggugaccagagagcccuacgugagcugcgaccccgacaagugcuaccaguucgcccugggccagggcaccacccugaacaacggccacagcaacgacaccgugcacgacagaacccccuacagaacccugcugaugaacgagcugggcgugcccuuccaccugggcaccaagcaggugugcaucgccuggagcagcagcagcugccacgacggcaaggccuggcugcacgugugcgugaccggcgacgacgagaacgccaccgccagcuucaucuacaacggcagacugguggacagcaucggcagcuggagcaagaagauccugagaacccaggagagcgagugcgugugcaucaacggcaccugcaccguggugaugaccgacggcagcgccagcggcaaggccgacaccaagauccuguucaucgaggagggcaagaucgugcacaucagcacccugagcggcagcgcccagcacguggaggagugcagcugcuaccccagauaccccggcgugagaugcgugugcagagacaacuggaagggcagcaacagacccaucguggacaucaacgugaaggacuacagcaucgugagcagcuacgugugcagcggccuggugggcgacacccccagaaagaacgacagcuucagcagcagccacugccuggaccccaacaacgaggagggcggccacggcgugaagggcugggccuucgacgacggcaacgacguguggaugggcagaaccaucagcgagaagcugagaagcggcuacgagaccuucaaggugaucgagggcuggagcaagcccaacagcaagcugcagaucaacagacaggugaucguggagagaggcaacagaagcggcuacagcggcaucuucagcguggagggcaagagcugcaucaacagaugcuucuacguggagcugaucagaggcagaaaggaggagaccgaggugugguggaccagcaacagcaucgugguguucugcggcaccagcagaaccuacggcaccggcagcuggcccgacggcgccgacaucaaccugaugcccaucuga

SEQ ID NO: 186276 - RNA, 1410 nt, Artificial Sequence
  derived and/or modified CDS sequence (opt4) from neuraminidase__InfluenzaA__CAD29988
augaaccccaaccagaagaucaucaccaucggcagcgugagccugaccaucgccaccaucugcuuccugaugcagaucgccauccuggugaccaccgugacccugcacuucaagcaguacgagugcaacagcccccccaacaaccaggugaugcugugcgagcccaccaucaucgagagaaacaucaccgagaucguguaccugaccaacaccaccaucgagaaggagaucugccccaagcuggccgaguacagaaacuggagcaagccccagugcaacaucaccggcuucgcccccuucagcaaggacaacagcaucagacugagcgccggcggcgacaucugggugaccagagagcccuacgugagcugcgaccccgacaagugcuaccaguucgcccugggccagggcaccacccugaacaacggccacagcaacgacaccgugcacgacagaacccccuacagaacccugcugaugaacgagcugggcgugcccuuccaccugggcaccagacaggugugcaucgccuggagcagcagcagcugccacgacggcaaggccuggcugcacgugugcgugaccggcgacgacgagaacgccaccgccagcuucaucuacaacggcagacugguggacagcaucggcagcuggagcaagaagauccugagaacccaggagagcgagugcgugugcaucaacggcaccugcaccguggugaugaccgacggcagcgccagcgagaaggccgacaccaagauccuguucaucgaggagggcaagaucgugcacaucagcacccugagcggcagcgcccagcacguggaggagugcagcugcuaccccagauaccccggcgugagaugcgugugcagagacaacuggaagggcagcaacagacccaucguggacaucaacgugaaggacuacagcaucgugagcagcuacgugugcagcggccuggugggcgacacccccagaaagaacgacagcuucagcagcagccacugccuggaccccaacaacgaggagggcggccacggcgugaagggcugggccuucgacgacggcaacgacguguggaugggcagaaccaucagcgagaagcugagaagcggcuacgagaccuucaaggugaucgagggcuggagcaagcccaacagcaagcugcagaucaacagacaggugaucguggagagaggcaacagaagcggcuacagcggcaucuucagcguggagggcaagagcugcaucaacagaugcuucuacguggagcugaucagaggcagaaaggaggagaccgaggugugguggaccagcaacagcaucgugguguucugcggcaccagcggcaccuacggcaccggcagcuggcccgacggcgccgacaucaaccugaugcccaucuga

SEQ ID NO: 186277 - RNA, 1410 nt, Artificial Sequence
  derived and/or modified CDS sequence (opt4) from neuraminidase__InfluenzaA__CAD29990
augaaccccaaccagaagaucaucaccaucggcagcgugagccugaccaucgccaccaucugcuuccugaugcagaucgccauccuggugaccaccgugacccugcacuucaagcaguacgagugcaacagcccccccaacaaccaggugaugcugugcgagcccaccaucaucgagagaaacaucaccgagaucguguaccugaccaacaccaccaucgagaaggagaucugccccaagcuggccgaguacagaaacuggagcaagccccagugcaacaucaccggcuucgcccccuucagcaaggacaacagcaucagacugagcgccggcggcgacaucugggugaccagagagcccuacgugagcugcgaccccgacaagugcuaccaguucgcccugggccagggcaccacccugaacaacggccacagcaacgacaccgugcacggcagaacccccuacagaacccugcugaugaacgagcugggcgugcccuuccaccugggcaccaagcaggugugcaucgccuggagcagcagcagcugccacgacggcaaggccuggcugcacgugugcgugaccggcgacgacgagaacgccaccgccagcuucaucuacaacggcagacugguggacagcaucggcagcuggagcaagaagauccugagaacccaggagagcgagugcgugugcaucaacggcaccugcaccguggugaugaccgacggcagcgccagcggcaaggccgacaccaagauccuguucaucgaggagggcaagaucgugcacaccagccugcugagcggcagcgcccagcacguggaggagugcagcugcuaccccagauaccccggcgugagaugcgugugcagagacaacuggaagggcagcaacagacccaucguggacaucaacgugaaggacuacagcaucgugagcagcuacgugugcagcggccuggugggcgacacccccagaaagaacgacaacagcagcagcagccacugccuggaccccaacaacgaggagggcggccacggcgugaagggcugggccuucgacgacggcaacgacguguggaugggcagaaccaucagcgagaagcugagaagcggcuacgagaccuucaaggugaucgagggcuggagcaagcccaacagcaagcugcagaucaacagacaggugaucguggacagaggcaacagaagcggcuacagcggcaucuucagcguggagggcaagagcugcaucaacagaugcuucuacguggagcugaucagaggcagaaagcaggagaccgaggugcuguggaccagcaacagcaucgugguguucugcggcaccagcggcaccuacggcaccggcagcuggcccgacggcgccgacaucaaccugaugcccaucuga

SEQ ID NO: 186278 - RNA, 1410 nt, Artificial Sequence; identical to SEQ ID NO: 174121
  derived and/or modified CDS sequence (opt4) from neuraminidase__InfluenzaA__CAD29991

SEQ ID NO: 186279 - RNA, 1410 nt, Artificial Sequence
  derived and/or modified CDS sequence (opt4) from neuraminidase__InfluenzaA__CAD29992
augaaccccaaccagaagaucaucaccaucggcagcgugagccugaccaucgccaccaucugcuuccugaugcagaucgccauccuggugaccaccgugacccugcacuucaagcaguacgagugcaacagcccccccaacaaccaggugaugcugugcgagcccaccaucaucgagagaaacaucaccgagaucguguaccugaccaacaccaccaucgagaaggagaucugccccaagcuggccgaguacagaaacuggagcaagccccagugcaacaucaccggcuucgcccccuucagcaaggacaacagcaucagacugagcgccggcggcgacaucugggugaccagagagcccuacgugagcugcgaccccgacaagugcuaccaguucgcccugggccagggcaccacccugaacaacggccacagcaacgacaccgugcacgacagaacccccuacagaacccugcugaugaacgagcugggcgugcccuuccaccugggcaccaagcaggugugcaucgccuggagcagcagcagcugccacgacggcaaggccuggcugcacgugugcgugaccggcgacgacgagaacgccaccgccagcuucaucuacaacggcagacugguggacagcaucggcagcuggagcaagaagauccugagaacccaggagagcgagugcgugugcaucaacggcaccugcaccguggugaugaccgacggcagcgccagcggcaaggccgacaccaagauccuguucaucgaggagggcaagaucgugcacaccagccugcugagcggcagcgcccagcacguggaggagugcagcugcuaccccagauaccccggcgugagaugcgugugcagagacaacuggaagggcagcaacagacccaucguggacaucaacgugaaggacagaagcaucgugagcagcuacgugugcagcggccuggugggcgacacccccagaaagaacgacagcagcagcagcagccacugccuggaccccaacaacgaggagggcggccacggcgugaagggcugggccuucgacgacggcaacgacguguggaugggcagaaccaucagcgagaagcugagaagcggcuacgagaccuucaaggugaucgagggcuggagcaagcccaacagcaagcugcagaucaacagacaggugaucguggacagaggcaacagaagcggcuacagcggcaucuucagcguggagggcaagagcugcaucaacagaugcuucuacguggagcugaucagaggcagaaagcaggagaccgaggugcuguggaccagcaacagcaucgugguguucugcggcaccagcggcaccuacggcaccggcagcuggcccgacggcgccgacaucaaccugaugcccaucuga

SEQ ID NO: 186280 - RNA, 1410 nt, Artificial Sequence
  derived and/or modified CDS sequence (opt4) from neuraminidase__InfluenzaA__CAD29993
augaaccccaaccagaagaucaucaccaucggcagcgugagccugaccaucgccaccaccugcuuccugaugcagaucgccauccuggugaccaccgugacccugcacuucaagcaguacgagugcaacagcccccccaacaaccaggugaugcugugcgagcccaccaucaucgagagaaacaucaccgagaucguguaccugaccaacaccaccaucgagaaggagaucugccccaagcuggccgaguacagaaacuggagcaagccccagugcaacaucaccggcuucgcccccuucagcaaggacaacagcaucagacugagcgccggcggcgacaucugggugaccagagagcccuacgugagcugcgaccccgacaagugcuaccaguucgcccugggccagggcaccacccugaacaacggccacagcaacgacaccgugcacgacagaacccccuacagaacccugcugaugaacgagcugggcgugcccuuccaccugggcaccaagcaggugugcaucgccuggagcagcagcagcugccacgacggcaaggccuggcugcacgugugcgugaccggcgacgacgagaacgccaccgccagcuucaucuacaacggcagacugguggacagcaucggcagcuggagcaagaagauccugagaacccaggagagcgagugcgugugcaucaacggcaccugcaccguggugaugaccgacggcagcgccagcggcaaggccgacaccaagauccuguucaucgaggagggcaagaucgugcacaccagcccccugagcggcagcgcccagcacguggaggagugcagcugcuaccccagauaccccggcgugagaugcgugugcagagacaacuggaagggcagcaacagacccaucguggacaucaacgugaaggacuacagcaucgugagcagcuacgugugcagcggccuggugggcgacacccccagaaagaacgacagcagcagcagcagccacugccuggaccccaacaacgaggagggcggccacggcgugaagggcugggccuucgacgacggcaacgacguguggaugggcagaaccaucagcgagaagcugagaagcggcuacgagaccuucaaggugaucgagggcuggagcaagcccaacagcaagcugcagaucaacagacaggugaucguggacagaggcaacagaagcggcuacagcggcaucuucagcguggagggcaagagcugcaucaacagaugcuucuacguggagcugaucagaggcagaaagcaggagaccgaggugcuguggaccagcaacagcaucgugguguucugcggcaccagcggcaccuacggcaccggcagcuggcccgacggcgccgacaucaaccugaugcccaucuga

SEQ ID NO: 186281 - RNA, 1410 nt, Artificial Sequence; identical to SEQ ID NO: 175809
  derived and/or modified CDS sequence (opt4) from neuraminidase__InfluenzaA__CAD29994

SEQ ID NO: 186282 - RNA, 1413 nt, Artificial Sequence; identical to SEQ ID NO: 176513
  derived and/or modified CDS sequence (opt4) from neuraminidase__InfluenzaA__CAD57252

SEQ ID NO: 186283 - RNA, 1413 nt, Artificial Sequence
  derived and/or modified CDS sequence (opt4) from neuraminidase__InfluenzaA__CAD57253
augaaccccaaccagaagaucaucaccaucggcagcaucagaaucgccaucggcaucaucagccugaugcugcagaucggcaacaucaucagcaucugggccagccacagcauccagaccggcagccagaaccacaccggcgugugcaaccagagaaucaucaccuacgagaacagcaccugggugaaccacaccuacgugaacaucaacaacaccaacgugaucgccggcaaggacaagaccagcgugacccuggccggcaacagcagccugugcagcaucagcggcugggccaucuacaccaaggacaacagcaucagaaucggcagcaagggcgacguguucgugaucagagagcccuucaucagcugcagccaccuggagugcagaaccuucuuccugacccagggcgcccugcugaacgacaagcacagcaacggcaccgugaaggacagaagccccuacagagcccugaugagcugcccccugggcgaggcccccagccccuacaacagcaaguucgagagcguggccuggagcgccagcgccugccacgacggcaugggcuggcugaccaucggcaucagcggccccgacaacggcgccguggccgugcugaaguacaacggcaucaucaccgagaccaucaagagcuggaagaagcagauccugagaacccaggagagcgagugcgugugcgugaacggcagcugcuucaccaucaugaccgacggccccagcaacggcgccgccagcuacaagaucuucaagaucgagaagggcaagaucaccaagagcaucgagcugaacgcccccaacuuccacuacgaggagugcagcugcuaccccgacaccggcaccgugaugugcgugugcagagacaacuggcacggcagcaacagacccugggugagcuucaaccagaaccuggacuaccagaucggcuacaucugcagcggcguguucggcgacaaccccagacccaaggacggcgagggcagcugcaaccccgugaccguggacggcgccaacggcgugaagggcuucagcuacaaguacggcaacggcguguggaucggcagaaccaagagcaacagacugagaaagggcuucgagaugaucugggaccccaacggcuggaccgacaccgacagcgacuucagcgugaagcaggacgugguggccaucaccgacuggagcggcuacagcggcagcuucgugcagcaccccgagcugaccggccuggacugcaucagacccugcuucuggguggagcuggugagaggccugcccaaggagaacaccaccaucuggaccagcggcagcagcaucagcuucugcggcgugaacagcgacaccgccaacuggagcuggcccgacggcgccgagcugcccuucaccaucgacaaguga

SEQ ID NO: 186284 - RNA, 1413 nt, Artificial Sequence; identical to SEQ ID NO: 174456
  derived and/or modified CDS sequence (opt4) from neuraminidase__InfluenzaA__CAD57255

SEQ ID NO: 186285 - RNA, 1413 nt, Artificial Sequence
  derived and/or modified CDS sequence (opt4) from neuraminidase__InfluenzaA__CAD57256
augaaccccaaccagaagaucaucaccaucggcagcaucagcguggccaucggcaucaucagccugaugcugcagaucggcaacaucaucagcaucugggccagccacagcauccagaccggcagccagaaccacaccggcaucugcaaccagagaaucaucaccuacgagaacagcaccugggugaaccacaccuacgugaacaucaacaacaccaacgugguggccggcaaggacaagaccagcgugacccuggccggcaacagcagccugugcagcaucagcggcugggccaucuacaccaaggacaacagcaucagaaucggcagcaagggcgacguguucgugaucagagagcccuucaucagcugcagccaccuggagugcagaaccuucuuccugacccagggcgcccugcugaacgacaagcacagcaacggcaccgugaaggacagaagccccuacagagcccugaugagcugcccccugggcgaggcccccagccccuacaacagcaaguucgagagcguggccuggagcgccagcgccugccacgacggcaugggcuggcugaccaucggcaucagcggccccgacaacggcgccguggccgugcugaaguacaacggcaucaucaccgagaccaucaagagcuggaagaagagaauccugagaacccaggagagcgagugcgugugcgugaacggcagcugcuucaccaucaugaccgacggccccagcaacggcgccgccagcuacagaaucuucaagaucgagaagggcagagugaccaagagcaucgagcuggacgcccccaacuaccacuacgaggagugcagcugcuaccccgacaccggcaccgugaugugcgugugcagagacaacuggcacggcagcaacagacccugggugagcuucaaccagaaccuggacuaccagaucggcuacaucugcagcggcguguucggcgacaaccccagacccaaggacggcgagggcagcugcaaccccgugaccguggacggcgccgacggcgugaagggcuucagcuacaaguacggcaacggcguguggaucggcagaaccaagagcaacagacugagaaagggcuucgagaugaucugggaccccaacggcuggaccgacaccgacagcgacuucagcgugaagcaggacgugguggccaucaccgacuggagcggcuacagcggcagcuucgugcagcaccccgagcugaccggccuggacugcaucagacccugcuucuggguggagcuggugagaggcagacccagagagaacaccaccaucuggaccagcggcagcagcaucagcuucugcggcgugaacagcgacaccgccaacuggagcuggcccgacggcgccgagcugcccuucaccaucgacaaguga

SEQ ID NO: 186286 - RNA, 1413 nt, Artificial Sequence
  derived and/or modified CDS sequence (opt4) from neuraminidase__InfluenzaA__CAD57257
augaaccccaaccagaagaucaucaccaucggcagcaucagcaucgccaucggcaucaucagccugaugcugcagaucggcaacaucaucagcaucugggccagccacagcauccagaccggcagccagaaccacaccggcaucugcaaccagagaaucaucaccuacgagaacagcaccugggugaaccacaccuacgugaacaucaacaacaccaacgugguggccggcaaggacaagaccagcgugacccuggccggcaacagcagccugugcagcaucagcggcugggccaucuacaccaaggacaacagcaucagaaucggcagcaagggcgacguguucgugaucagagagcccuucaucagcugcagccaccuggagugcagaaccuucuuccugacccagggcgcccugcugaacgacaagcacagcaacggcaccgugaaggacagaagccccuacagagcccugaugagcugcccccugggcgaggcccccagccccuacaacagcaaguucgagagcguggccuggagcgccagcgccugccacgacggcaugggcuggcugaccaucggcaucagcggccccgacaacggcgccguggccgugcugaaguacaacggcaucaucaccgagaccaucaagagcuggaagaagagaauccugagaacccaggagagcgagugcgugugcgugaacggcagcugcuucaccaucaugaccgacggccccagcaacggcgccgccagcuacaagaucuucaagaucgagaagggcaaggugaccaagagcaucgagcugaacgcccccaacagccacuacgaggagugcagcugcuaccccgacaccggcaccgugaugugcgugugcagagacaacuggcacggcagcaacagacccugggugagcuucaaccagaaccuggacuaccagaucggcuacaucugcagcggcguguucggcgacaaccccagacccaaggacggcgagggcagcugcaaccccgugaccguggacggcgccgacggcgugaagggcuucagcuacagauacggcaacggcguguggaucggcagaaccaagagcaacagacugagaaagggcuucgagaugaucugggaccccaacggcuggaccgacaccgacagcgacuucagcaugaagcaggacgugguggccaugaccgacuggagcggcuacagcggcagcuucgugcagcaccccgagcugaccggccuggacugcaucagacccugcuucuggguggagcuggugagaggcagacccagagagaacaccaccaucuggaccagcggcagcagcaucagcuucugcggcgugaacagcgacaccgccaacuggagcuggcccgacggcgccgagcugcccuucaccaucgacaaguga

SEQ ID NO: 186287 - RNA, 1413 nt, Artificial Sequence
  derived and/or modified CDS sequence (opt4) from neuraminidase__InfluenzaA__CAD57258
augaaccccaaccagaagaucaucaccaucggcagcaucagcguggccaucggcaucaucagccugauccugcagaucggcaacaucaucagcaucugggccagccacagcauccagaccggcagccagaacuacaccggcaucugcaaccagagaaucaucaccuacgagaacagcaccugggugaaccagaccuacgugaacaucaacaacaccaacgugguggccggcaaggacaagaccagcauggugcuggccggcaacagcagccugugccccaucagaggcugggccaucuacaccaaggacaacagcaucagaaucggcagcaagggcgacaucuucgugaucagagagcccuucaucagcugcagccaccuggagugcagaaccuucuuccugacccagggcgcccugcugaacgacaagcacagcaacggcaccgugaaggacagaagccccuacagagcccugaugagcugcccccugggcgaggcccccagccccuacaacagcagauucgagagcguggccuggagcgccagcgccugccacgacggccugggcuggcugaccaucggcaucagcggccccgacaacggcgccguggccgugcugaaguacaacggcaucaucaccgagaccaucaagagcuggaagaagcagauccugagaacccaggagagcgagugcgugugcgugaacggcagcugcuucaccaucaugaccgacggccccagcaacagagccgccagcuacagaaucuucaagaucgagaagggcagagugaccaagagcaucgagcuggacgcccccaacuaccacuacgaggagugcagcugcuaccccgacaccggcaccgugaugugcgugugcagagacaacuggcacggcagcaacagacccugggugagcuucaaccagaaccuggacuaccagaucggcuacaucugcagcggcguguucggcgacaaccccagacccaaggacggcgagggcagcugcaaccccgugaccguggacggcgccgacggcgugaagggcuucagcuacagauacggcaacggcguguggaucggcagaaccaagagcaacagacugagaaagggcuucgagaugaucugggaccccaacggcuggaccgacaccgacagcgacuucagcaugaagcaggacgugguggccaugaccgacuggagcggcuacagcggcagcuucgugcagcaccccgagcugaccggccuggacugcaugagacccugcuucuggguggagcuggugagaggccugcccagagagaacaccaccaucuggaccagcggcagcagcaucagcuucugcggcgugaacagcgagaccgccaacuggagcuggcccgacggcgccgagcugcccuucaccaucgacaaguga

SEQ ID NO: 186288 - RNA, 1413 nt, Artificial Sequence
  derived and/or modified CDS sequence (opt4) from neuraminidase__InfluenzaA__CAD57259
augaaccccaaccagaagaucaucaccaucggcagcaucagcaucgccaucggcaucaucagccugauccugcagaucggcaacaucaucagcaucugggccagccacagcauccagaccgagagccagaaccacaccggcaucugcaaccagagaaucaucaccuacgagaacagcaccugggugaaccagaccuacgugaacaucaacaacaccaacguggccgccggcaaggacaagaccagcaugacccuggccggcaacagcagccugugccccaucagaggcugggccaucuacaccaaggacaacagcaucagaaucggcagcaagggcgacaucuucgugaucagagagcccuucaucagcugcagccaccuggagugcagaaccuucuuccugacccagggcgcccugcugaacgacaagcacagcaacggcaccgugaaggacagaagccccuacagagcccugaugagcugcccccugggcgaggcccccagccccuacaacagcagauucgagagcguggccuggagcgccagcgccugccacgacggccugggcuggcugaccaucggcaucagcggccccgacaacggcgccguggccgugcugaaguacaacggcaucaucaccgagaccaucaagagcuggaagaagagaauccugagaacccaggagagcgagugcgugugcaugaacggcagcugcuucaccaucaugaccgacggccccagcaacggcgccgccagcuacagaaucuucaagaucgagaagggcagagugaccaagagcaucgagcuggacgcccccaacuaccacuacgaggagugcagcugcuaccccgagaccggcaccgugaugugcgugugcagagacaacuggcacggcagcaacagacccugggugagcuucaaccagaaccuggacuaccagaucggcuacaucugcagcggcguguucggcgacaaccccagacccaaggacggcgagggcagcugcaaccccgugaccguggacggcgccgacggcgugaagggcuucagcuacagauacggcaacggcguguggaucggcagaaccaagagcaacagacugagaaagggcuucgagaugaucugggaccccaacggcuggaccgacaccgacagcgacuucagcaugaagcaggacaucguggccaugaccgacuggagcggcuacagcggcagcuucgugcagcaccccgagcugaccggccuggacugcaugagacccugcuucuggguggagcuggugagaggccugcccagagagaacaccaccaucuggaccagcggcagcagcaucagcuucugcggcgugaacagcgacaccgccaacuggagcuggcccgacggcgccgagcugcccuucaccaucgacaaguga

SEQ ID NO: 186289 - RNA, 1413 nt, Artificial Sequence
  derived and/or modified CDS sequence (opt4) from neuraminidase__InfluenzaA__CAD57264
augaaccccaaccagaagaucaucaccaucggcagcaucagcguggccaucggcaucaucagccugauccugcagaucggcaacaucaucagcaucugggccagccacagcauccagaccggcagccagaacuacaccggcaucugcaaccagagaaucaucaccuacgagaacagcaccugggugaaccagaccuacgugaacaucaacaacaccaacgugguggccggcaaggacaagaccagcaugacccuggccggcaacagcagccugugccccaucagaggcugggccaucuacaccaaggacaacagcaucagaaucggcagcaagggcgacguguucgugaucagagagcccuucaucagcugcagccaccuggagugcagaaccuucuuccugacccagggcgcccugcugaacgacaagcacagcaacggcaccgugaaggacagaagccccuacagagcccugaugagcugcccccugggcgaggcccccagccccuacaacagcagauucgagagcguggccuggagcgccagcgccugccacgacggccugggcuggcugaccaucggcaucagcggccccgacaacggcgccguggccgugcugaaguacaacggcaucaucaccgagaccaucaagagcuggaagaagcagauccugagaacccaggagagcgagugcgugugcgugaacggcagcugcuucaccaucaugaccgacggccccagcaacggcgccgccagcuacagaaucuucaagaucgagaagggcagagugaccaagagcaucgagcuggacgcccccaacuaccacuacgaggagugcagcugcuaccccgacaccggcaccgugaugugcgugugcagagacaacuggcacggcagcaacagacccugggugagcuucaaccagaaccuggacuaccagaucggcuacaucugcagcggcguguucggcgacaaccccagacccaaggacggcgagggcagcugcaaccccgugaccguggacggcgccaacggcgugaagggcuucagcuacagauacggcaacggcguguggaucggcagaaccaagagcaacagacugagaaagggcuucgagaugaucugggaccccaacggcuggaccgacaccgacagcgacuucagcaugaagcaggacgugguggccaugaccgacuggagcggcuacagcggcagcuucgugcagcaccccgagcugaccggccuggacugcaugagacccugcuucuggguggagcuggugagaggccugcccagagagaacaccaccaucuggaccagcggcagcagcaucagcuucugcggcgugaacagcgagaccgccaacuggagcuggcccgacggcgccgagcugcccuucaccaucgacaaguga

SEQ ID NO: 186290 - RNA, 1350 nt, Artificial Sequence
  derived and/or modified CDS sequence (opt4) from neuraminidase__InfluenzaA__CBW54819
augaaccccaaccagaagaucaucaccaucggcagcaucugcauggugaucggcaucgugagccugaugcugcagaucggcaacaugaucagcaucugggugagccacagcauccagaccggcaaccagugccaggccgagcccaucagcaacaccaaguuccugaccgagaaggccguggccagcgugacccuggccggcaacagcagccugugccccaucagcggcugggccguguacagcaaggacaacagcaucagaaucggcagcagaggcgacguguucgugaucagagagcccuucaucagcugcagccaccuggagugcagaaccuucuuccugacccagggcgcccugcugaacgacaagcacagcaacggcaccgugaaggacagaagcccccacagaacccugaugagcugccccgugggcgaggcccccagccccuacaacagcagauucgagagcguggccuggagcgccagcgccugccacgacggcaucagcuggcugaccaucggcaucagcggccccgacaacggcgccguggccgugcugaaguacaacggcaucaucaccgacaccaucaagagcuggagaaacaacauccugagaacccaggagagcgagugcgccugcgugaacggcagcugcuucaccgugaugaccgacggccccagcagcggccaggccagcuacaagaucuucaagauggagaagggcaagguggugaagagcguggagcuggacgcccccaacuaccacuacgaggagugcagcugcuaccccgacgccggcgagaucaccugcgugugcagagacaacuggcacggcagcaacagacccugggugagcuucaaccagaaccuggaguacagaaucggcuacaucugcagcggcguguucggcgacaaccccagacccaacgacggcaccggcagcugcggccccgugagccccaacggcgccuacggcgugaagggcuucagcuucaaguacggcgacggcguguggaucggcagaaccaagagcaccaacagcagaagcggcuucgagauggugugggaccccaacggcuggaccggcaccgacagcagcuucagcgugaagcaggacaucguggccaucaccgacuggagcggcuacagcggcagcuucgugcagcaccccgagcugaccggccuggacugcaucagacccugcuucuggguggagcugaucagaggcagacccaaggagagcaccaucuggaccagcggcagcagcaucagcuucugcggcgugaacagcgacaccgugagcuggagcuggcccgacggcgccgagcugcccuucaccaucgacaaguga

SEQ ID NO: 186291 - RNA, 1350 nt, Artificial Sequence
  derived and/or modified CDS sequence (opt4) from neuraminidase__InfluenzaA__CBW54821
augaaccccaaccagaagaucaucaccaucggcagcaucugcaucgugaucggcaucgugagccugaugcugcagaucggcaacaugaucagcaucugggugagccacagcauccagaccggcaaccagugccaggccgagcccaucagcaacaccaaguuccugaccgagaaggccguggccagcgugacccuggccggcaacagcagccugugccccaucagcggcugggccguguacagcaaggacaacagcaucagaaucggcagcagaggcgacguguucgugaucagagagcccuucaucagcugcagccaccuggagugcagaaccuucuuccugacccagggcgcccugcugaacgacaagcacagcaacggcaccgugaaggacagaagcccccacagaacccugaugagcugccccgugggcgaggcccccagccccuacaacagcagauucgagagcguggccuggagcgccagcgccugccacgacggcaucagcuggcugaccaucggcaucagcggccccgacaacggcgccguggccgugcugaaguacaacggcaucaucaccgacaccaucaagagcuggagaaacaacauccugagaacccaggagagcgagugcgccugcaucaacggcagcugcuucaccgugaugaccgacggccccagcagcggccaggccagcuacaagaucuucaagauggagaagggcaagguggugaagagcguggagcuggacgcccccaacuaccacuacgaggagugcagcugcuaccccgacgccggcgagaucaccugcgugugcagagacaacuggcacggcagcaacagacccugggugagcuucaaccagaaccuggaguaccagaucggcuacaucugcagcggcguguucggcgacaaccccagacccaacgacggcaccggcagcugcggccccgugagccccaacggcgccuacggcgugaagggcuucagcuucaaguacggcaacggcguguggaucggcagaaccaagagcaccaacagcagaagcggcuucgagaugaucugggaccccaacggcuggaccggcaccgacagcagcuucagcgugaagcaggacaucguggccaucaccgacuggagcggcuacagcggcagcuucgugcagcaccccgagcugaccggccuggacugcaucagacccugcuucuggguggagcugaucagaggccagcccaaggagagcaccaucuggaccagcggcagcagcaucagcuucugcggcgugaacagcgacaccgugagcuggagcuggcccgacggcgccgagcugcccuucaccaucgacaaguga

SEQ ID NO: 186292 - RNA, 1410 nt, Artificial Sequence
  derived and/or modified CDS sequence (opt4) from neuraminidase__InfluenzaA__CCG47912
augaaccccaaccagaagaucaucaccaucggcagcgugagccugaccaucgccaccaugugccuguucaugcagaucgccauccugaucaccaccgugacccugcacuucaagcaguacgagugcgacagccccgccaacaaccaggugaugcccugcgagcccaucaucaucgagaagaacaucaccaagaucguguaccugaccaacaccaccaucgagaaggaggugugccccaagcugggcgaguacagaaacuggagcaagccccagugcagaaucaccggcuucgcccccuucagcaaggacaacagcaucagacugagcgccggcggcgccaucugggugaccagagagcccuacgugagcugcgaccccaacaagugcuaccaguucgcccugggccagggcaccacccuggacaacagacacagcaacgacaccauccacgacagaacccccuacagaacccugcugaugaacgagcugggcgugcccuuccaccugggcaccagacaggugugcaucgccuggagcagcagcagcugccacgacggcaaggccuggcugcacgugugcgugaccggccacgacaagaacgccaccgccagcuucaucuacgacggcaagcugguggacagcaucagcagcuggagccagaacauccugagaacccaggagagcgagugcgugugcaucaacggcaucugcaccguggugaugaccgacggcagcgccagcggcaaggccgacaccaagauccuguucaucgaggagggcaaggugauccacaucagcccccugcugggcagcgcccagcacguggaggagugcagcugcuaccccagauaccccgacgugagaugcaucugcagagacaacuggaagggcagcaacagacccaucguggacaucagaaugaaggacuacagcaucggcagcagcuacaugugcagcggccuggugggcgacacccccagaaacaacgacggcagcagcaacagcaacugcagaaaccccaacaacgagagaggcaaccacggcgugaagggcugggccuucgacgacggcaacgacaucuggaugggcagaaccaucagcaaggacagcagacugggcuacgagaccuucaagguggugggcggcuggagccagcccaacagcaaguuccagaucaacagacaggugaucguggacagcgacaacagaagcggcuacagcggcaucuucagcguggagggcaagagcugcaucaacagaugcuucuacguggagcugaucagaggcagaagacaggagaccagagugugguggaccagcaacagcaucgugguguucugcggcaccagcggcaccuacggcagcggcagcuggcccgacggcgccgacaucaacuucaugcccaucuga

SEQ ID NO: 186293 - RNA, 1353 nt, Artificial Sequence
  derived and/or modified CDS sequence (opt4) from neuraminidase__InfluenzaA__AAF74321
augaaccccaaccagaagaucaucaccaucggcagcaucugcaugguggugggcaucaucagccugaugcugcagaucggcaacaucaucagcgugugggugagccacaccauccagaccuggcaccccaaccagcccgagcccugcaaccagagcaucaacuucuacaccgagcaggccgccgccagcgugacccuggccggcaacagcagccugugccccaucagcggcugggccaucuacagcaaggacaacagcaucagaaucggcagcaagggcgacguguucgugaucagagagcccuucaucagcugcagccaccuggagugcagaaccuucuuccugacccagggcgcccugcugaacgacaagcacagcaacggcaccgugaaggacagaagccccuacagaacccugaugagcugccccgugggcgaggcccccagccccuacaacagcagauucgagagcguggccuggagcgccagcgccugccacgacggcaucagcuggcugaccaucggcaucagcggccccgacaacggcgccguggccgugcugaaguacaacggcaucaucaccgacaccaucaagagcuggagaaacaacauccugagaacccaggagagcgagugcgccugcgugaacggcagcugcuucaccgugaugaccgacggccccagcaacgagcaggccagcuacaagaucuucaagaucgagaagggcagaguggugaagagcguggagcugaacgcccccaacuaccacuaccaggagugcagcugcuaccccgacgccggcgagaucaccugcgugugcagagacaacuggcacggcagcaacagacccugggugagcuucaaccagaaccuggaguaccagaucggcuacaucugcagcggcguguucggcgacagccccagacccaacgacggcaccggcagcugcggccccgugagccugaacggcgccuacggcgugaagggcuucagcuucaaguacggcaacggcguguggaucggcagaaccaagagcaccagcagcagaagcggcuucgagaugaucugggaccccaacggcuggaccgagaccgacagcagcuucagccugaagcaggacaucaucgccaucaccgacuggagcggcuacagcggcagcuucauccagcaccccgagcugaccggccugaacugcaugagacccugcuucuggguggagcugaucagaggcagacccaaggagaagaccaucuggaccagcggcagcagcaucagcuucugcggcgugaacagcgacaccgugggcuggagcuggcccgacggcgccgagcugcccuucaccaucgacaaguga

SEQ ID NO: 186294 - RNA, 1353 nt, Artificial Sequence
  derived and/or modified CDS sequence (opt4) from neuraminidase__InfluenzaA__AAF74322
augaaccccaaccagaagaucaucaccaucggcagcaucugcaugguggugggcaucaucagccugaugcugcagaucggcaacaccaucagcgugugggugagccacaucaucaagaccuggcaccccaaccagcccgagcccugcaaccagagcaucaacuucuacaccgagcaggccgccgccagcgugacccuggccggcaacagcagccugugccccaucagcggcugggccaucuacagcaaggacaacagcaucagaaucggcagcaagggcgacguguucgugaucagagagcccuucaucagcugcagccaccuggagugcagaaccuucuuccugacccagggcgcccugcugaacgacaagcacagcaacggcaccgugaaggacagaagccccuacagaacccugaugagcugccccgugggcgaggcccccagccccuacaacagcagauucgagagcguggccuggagcgccagcgccugccacgacggcaucagcuggcugaccaucggcaucagcggccccgacaacggcgccguggccgugcugaaguacaacggcaucaucaccgacaccaucaagagcuggagaaacaacacccugagaacccaggagagcgagugcgccugcgugaacggcagcugcuucaccgugaugaccgacggccccagcaacgagcaggccagcuacaagaucuucaagaucgagaagggcagaguggugaagagcguggagcugaacgcccccaacuaccacuacgaggagugcagcugcuaccccgacgccggcgagaucaccugcgugugcagagacaacuggcacggcagcaacagacccugggugagcuucaaccagaaccuggaguaccagaucggcuacaucugcagcggcguguucggcgacagccccagacccaacgacggcaccggcagcugcggccccgugagccugaacggcgccuacggcgugaagggcuucagcuucaaguacggcaacggcguguggaucggcagaaccaagagcaccagcagcagaagcggcuucgagaugaucugggaccccaacggcuggaccgagaccgacagcagcuucagccugaagcaggacaucaucgccaucaccgacuggagcggcuacagcggcagcuucauccagcaccccgagcugaccggccugaacugcaugagacccugcuucuggguggagcugaucagaggcagacccaaggagaagaccaucuggaccagcggcagcagcaucagcuucugcggcgugaacagcgacaccgugggcuggagcuggcccgacggcgccgagcugcccuucaccaucgacaaguga

SEQ ID NO: 186295 - RNA, 1353 nt, Artificial Sequence
  derived and/or modified CDS sequence (opt4) from neuraminidase__InfluenzaA__AAF74323
augaaccccaaccagaagaucaucaccaucggcagcaucugcaugguggugggcaucaucagccugaugcugcagaucggcaacaucaucagcguguggaucagccacaucauccagaccuggcaccccaaccagcccgagcccugcaaccagagcaucaacuucuacaccgagcaggccgccgccagcgugacccuggccggcaacagcagccugugccccaucagcggcugggccaucuacagcaaggacaacagcaucagaaucggcagcaagggcgacguguucgugaucagagagcccuucaucagcugcagccaccuggagugcagaaccuucuuccugacccagggcgcccugcugaacgacaagcacagcaacggcaccgugaaggacagaagccccuacagaacccugaugagcugccccgugggcgaggcccccagccccuacaacagcagauucgagagcguggccuggagcgccagcgccugccacgacggcaucagcuggcugaccaucggcaucagcggccccgacaacgaggccguggccgugcugaaguacaacggcaucaucaccgacaccaucagaagcuggagaaacaacauccugagaacccaggagagcgagugcgccugcgugaacggcagcugcuucaccgugaugaccgacggccccagcaacgagcaggccagcuacaagaucuucaagaucgagaagggcagaguggugaagagcguggagcugaacgcccccaacuaccacuacgaggagugcagcugcuaccccgacgccggcgagaucaccugcgugugcagagacaacuggcacggcagcaacagacccugggugagcuucaaccagaaccuggaguaccagaucggcuacaucugcagcggcguguucggcgacagccccagacccaacgacggcaccggcagcugcggccccgugagccugaacggcgccuacggcgugaagggcuucagcuucaaguacggcaacggcguguggaucggcagaaccaagagcaccagcagcagaagcggcuucgagaugaucugggaccccaacggcuggaccgagaccgacagcagcuucagccugaagcaggacaucaucgccgugaccgacuggagcggcuacagcggcagcuucauccagcaccccgagcugaccggccugaacugcaugagacccugcuucuggguggagcugaucagaggcagacccaaggagaagaccaucuggaccagcggcagcagcaucagcuucugcggcgugaacagcgacaccgugggcuggagcuggcccgacggcgccgagcugcccuucaccaucgacaaguga

SEQ ID NO: 186296 - RNA, 1353 nt, Artificial Sequence
  derived and/or modified CDS sequence (opt4) from neuraminidase__InfluenzaA__AAF74324
augaaccccaaccagaagaucaucaccaucggcagcaucugcaugguggugggcaucaucagccugaugcugcagaucggcaacaucaucagcgugugggugagccacaucauccagaccuggcaccccaaccagcccgagcccugcaaccagagcaucaacuucuacaccgagcaggccgccgccagcgugacccuggccggcaacagcagccugugccccaucagcggcugggccaucuacagcaaggacaacagcaucagaaucggcagcaagggcgacguguucgugaucagagagcccuucaucagcugcagccaccuggagugcagaaccuucuuccugacccagggcgcccugcugaacgacaagcacagcaacggcaccgugaaggacagaagccccuacagaacccugaugagcugccccgugggcgaggcccccagccccuacaacagcagauucgagagcguggccuggagcgccagcgccugccacgacggcaucagcuggcugaccaucggcaucagcggccccgacaacggcgccguggccgugcugaaguacaacggcaucaucaccgacaccaucaagagcuggagaaacaacauccugagaacccaggagagcgagugcgccugcgugaacggcagcugcuucaccgugaugaccgacggccccagcaacgagcaggccagcuacaagaucuucaagaucgagaagggcagaguggugaagagcguggagcugaacgcccccaacuaccacuacgaggagugcagcugcuaccccgacgccggcgagaucaccugcgugugcagagacaacuggcacggcagcaacagacccugggugagcuucaaccagaaccuggaguaccagaucggcuacaucugcagcggcguguucggcgacagccccagacccaacgacggcaccggcagcugcggccccgugagccugaacggcgccuacggcgugaagggcuucagcuucaaguacggcaacggcguguggaucggcagaaccaagagcaccagcagcagaagcggcuucgagaugaucugggaccccaacggcuggaccgagaccgacagcagcuucagccugaagcaggacaucaucgccaucaccgacuggagcggcuacagcggcagcuucauccagcaccccgagcugaccggccugaacugcaugagacccugcuucuggguggagcugaucagaggcagacccaaggagaagaccaucuggaccagcggcagcagcgugagcuucugcggcgugaacagcgacaccaugggcuggagcuggcccgacggcgccgagcugcccuucaccaucgacaaguga

SEQ ID NO: 186297 - RNA, 1353 nt, Artificial Sequence
  derived and/or modified CDS sequence (opt4) from neuraminidase__InfluenzaA__AAF74325
augaaccccaaccagaagaucaucaccaucggcagcaucugcaugguggugggcaucaucagccugaugcugcagaucggcaacaccaucagcgugugggugagccacaucaucaagaccuggcaccccaaccagcccgagcccugcaaccagagcaucaacuucuacaccgagcaggccgccgccagcgugacccuggccggcaacagcagccugugccccaucagcggcugggccaucuacagcaaggacaacagcaucagaaucggcagcaagggcgacguguucgugaucagagagcccuucaucagcugcagccaccuggagugcagaaccuucuuccugacccagggcgcccugcugaacgacaagcacagcaacggcaccgugaaggacagaagccccuacagaacccugaugagcugccccgugggcgaggcccccagccccuacaacagcagauucgagagcguggccuggagcgccagcgccugccacgacggcaucagcuggcugaccaucggcaucagcggccccgacaacggcgccguggccgugcugaaguacaacggcaucaucaccgacaccaucaagagcuggagaaacaacacccugagaacccaggagagcgagugcgccugcgugaacggcagcugcuucaccgugaugaccgacggccccagcaacgagcaggccagcuacaagaucuucaagaucgagaagggcagaguggugaagagcguggagcugaacgcccccaacuaccacuacgaggagugcagcugcuaccccgacgccggcgagaucaccugcgugugcagagacaacuggcacggcagcaacagacccugggugagcuucaaccagaaccuggaguaccagaucggcuacaucugcagcggcguguucggcgacagccccagacccaacgacggcaccggcagcugcggccccgugagccugaacggcgccuacggcgugaagggcuucagcuucaaguacggcaacggcguguggaucggcagaaccaagagcaccagcagcagaagcggcuucgagaugaucugggaccccaacggcuggaccgagaccgacagcagcuucagccugaagcaggacaucaucgccaucaccgacuggagcggcuacagcggcagcuucauccagcaccccgagcugaccggccugaacugcaugagacccugcuucuggguggagcugaucagaggcagacccaaggagaagaccaucuggaccagcggcagcagcaucagcuucugcggcgugaacagcgacaccgugggcuggagcuggcccgacggcgccgagcugcccuacaccaucgacaaguga

SEQ ID NO: 186298 - RNA, 1410 nt, Artificial Sequence; identical to SEQ ID NO: 176788
  derived and/or modified CDS sequence (opt4) from neuraminidase__InfluenzaA__EPI239900

SEQ ID NO: 186299 - RNA, 1410 nt, Artificial Sequence; identical to SEQ ID NO: 177137
  derived and/or modified CDS sequence (opt4) from neuraminidase__InfluenzaA__EPI221062

SEQ ID NO: 186300 - RNA, 1410 nt, Artificial Sequence; identical to SEQ ID NO: 176788
  derived and/or modified CDS sequence (opt4) from neuraminidase__InfluenzaA__EPI534079

SEQ ID NO: 186301 - RNA, 1410 nt, Artificial Sequence; identical to SEQ ID NO: 176788
  derived and/or modified CDS sequence (opt4) from neuraminidase__InfluenzaA__AGM53851

SEQ ID NO: 186302 - RNA, 1410 nt, Artificial Sequence
  derived and/or modified CDS sequence (opt4) from neuraminidase__InfluenzaA__EPI731464
augaaccccaaccagaagaucaucaccaucggcagcgugugcaugaccaucggcauggccaaccugauccugcagaucggcaacaucaucagcaucuggaucagccacagcauccagcugggcaaccagaaccagaucgagaccugcaaccagagcgugaucaccuacgagaacaacaccugggugaaccagaccuacgugaacaucagcaacaccaacuucgccgccggccagagcguggugagcgugaagcuggccggcggcagcagccugugccccgugagcggcugggccaucuacagcaaggacaacagcgugagaaucggcagcaagggcgacguguucgugaucagagagcccuucaucagcugcagcccccuggagugcagaaccuucuuccugacccagggcgcccugcugaacgacaagcacagcaacggcaccaucaaggacagaagccccuacagaacccugaugagcugccccaucggcgaggugcccagccccuacaacagcagauucgagagcguggccuggagcgccagcgccugccacgacggcaucaacuggcugaccaucggcaucagcggccccgacaacggcgccguggccgugcugaaguacaacggcaucaucaccgacaccaucaagagcuggagaaacaacauccugagaacccaggagagcgagugcgccugcgugaacggcagcugcuucaccgugaugaccgacggccccagcaacggccaggccagcuacaagaucuucagaaucgagaagggcaagaucgugaagagcguggagaugaacgcccccaacuaccacuacgaggagugcagcugcuaccccgacagcagcgagaucaccugcgugugcagagacaacuggcacggcagcaacagacccugggugagcuucaaccagaaccuggaguaccagaucggcuacaucugcagcggcaucuucggcgacaaccccagacccaacgacaagaccggcagcugcggccccgugagcagcaacggcgccaacggcgugaagggcuucagcuucaaguacggcaacggcguguggaucggcagaaccaagagcaucagcagcagaaacggcuucgagaugaucugggaccccaacggcuggaccggcaccgacaacaacuucagcaucaagcaggacaucgugggcaucaacgaguggagcggcuacagcggcagcuucgugcagcaccccgagcugaccggccuggacugcaucagacccugcuucuggguggagcugaucagaggcagacccaaggagaacaccaucuggaccagcggcagcagcaucagcuucugcggcgugaacagcgacaccgugggcuggagcuggcccgacggcgccgagcugcccuucaccaucgacaaguga

SEQ ID NO: 186303 - RNA, 1410 nt, Artificial Sequence; identical to SEQ ID NO: 176788
  derived and/or modified CDS sequence (opt4) from neuraminidase__InfluenzaA__EPI696973

SEQ ID NO: 186304 - RNA, 1410 nt, Artificial Sequence
  derived and/or modified CDS sequence (opt4) from neuraminidase__InfluenzaA__EPI662593
augaaccccaaccagaagaucaucaccaucggcagcaucugcaugaccaucggcauggccaaccugauccugcagaucggcaacaucaucagcaucugggugagccacagcauccagaucggcaaccagagccagaucgagaccugcaaccagagcgugaucaccuacgagaacaacaccugggugaaccagaccuacgugaacaucagcaacaccaacuucgccgccggccagagcguggugagcgugaagcuggccggcaacagcagccugugccccgugagcggcugggccaucuacagcaaggacaacagcgugagaaucggcagcaagggcgacguguucgugaucagagagcccuucaucagcugcagcccccuggagugcagaaccuucuuccugacccagggcgcccugcugaacgacaagcacagcaacggcaccaucaaggacagaagccccuacagaacccugaugagcugccccaucggcgaggugcccagccccuacaacagcagauucgagagcguggccuggagcgccagcgccugccacgacggcaucaacuggcugaccaucggcaucagcggccccgacagcggcgccguggccgugcugaaguacaacggcaucaucaccgacaccaucaagagcuggagaaacaacauccugagaacccaggagagcgagugcgccugcgugaacggcagcugcuucaccaucaugaccgacggccccagcgacggccaggccagcuacaagaucuucagaaucgagaagggcaagaucaucaagagcguggagaugaaggcccccaacuaccacuacgaggagugcagcugcuaccccgacagcagcgagaucaccugcgugugcagagacaacuggcacggcagcaacagacccugggugagcuucaaccagaaccuggaguaccagaugggcuacaucugcagcggcguguucggcgacaaccccagacccaacgacaagaccggcagcugcggccccgugagcagcaacggcgccaacggcgugaagggcuucagcuucaaguacggcaacggcguguggaucggcagaaccaagagcaucagcagcagaaagggcuucgagaugaucugggaccccaacggcuggaccggcaccgacaacaaguucagcaucaagcaggacaucgugggcaucaacgaguggagcggcuacagcggcagcuucgugcagcaccccgagcugaccggccuggacugcaucagacccugcuucuggguggagcugaucagaggcagacccgaggagaacaccaucuggaccagcggcagcagcaucagcuucugcggcgugaacagcgacaccgugggcuggagcuggcccgacggcgccgagcugcccuucaccaucgacaaguga

SEQ ID NO: 186305 - RNA, 1410 nt, Artificial Sequence; identical to SEQ ID NO: 186304
  derived and/or modified CDS sequence (opt4) from neuraminidase__InfluenzaA__EPI830229

SEQ ID NO: 186306 - RNA, 1410 nt, Artificial Sequence; identical to SEQ ID NO: 183897
  derived and/or modified CDS sequence (opt4) from neuraminidase__InfluenzaA__AGU92879

SEQ ID NO: 186307 - RNA, 1410 nt, Artificial Sequence; identical to SEQ ID NO: 183896
  derived and/or modified CDS sequence (opt4) from neuraminidase__InfluenzaA__AGU92857

SEQ ID NO: 186308 - RNA, 1410 nt, Artificial Sequence; identical to SEQ ID NO: 183895
  derived and/or modified CDS sequence (opt4) from neuraminidase__InfluenzaA__AGU92846

SEQ ID NO: 186309 - RNA, 1410 nt, Artificial Sequence; identical to SEQ ID NO: 183906
  derived and/or modified CDS sequence (opt4) from neuraminidase__InfluenzaA__AGU92835

SEQ ID NO: 186310 - RNA, 1410 nt, Artificial Sequence; identical to SEQ ID NO: 183882
  derived and/or modified CDS sequence (opt4) from neuraminidase__InfluenzaA__AGU92703

SEQ ID NO: 186311 - RNA, 1410 nt, Artificial Sequence
  derived and/or modified CDS sequence (opt4) from neuraminidase__InfluenzaA__EPI643117
augaaccccaaccagaagaucaucaccaucggcagcgugagccugaccaucagcaccaucugcuucuucaugcagaucgccauccugaucaccaccgugacccugcacuucaagcaguacgaguucaacagcccccccaacaaccaggugaugcugugcgagcccaccaucaucgagagaaacaucaccgagaucguguaccugaccaacaccaccaucgagaaggagaucugccccaagcccgccgaguacagaaacuggagcaagccccagugcggcaucaccggcuucgcccccuucagcaaggacaacagcaucagacugagcgccggcggcgacaucugggugaccagagagcccuacgugagcugcgaccccgacaagugcuaccaguucgcccugggccagggcaccacccugaacaacgugcacagcaacaacaccgugagagacagaacccccuacagaacccugcugaugaacgagcugggcgugcccuuccaccugggcaccaagcaggugugcaucgccuggagcagcagcagcugccacgacggcaaggccuggcugcacgugugcaucaccggcgacgacaagaacgccaccgccagcuucaucuacaacggcagacugguggacagcguggugagcuggagcaaggacauccugagaacccaggagagcgagugcaucugcaucaacggcaccugcaccguggugaugaccgacggcagcgccagcggcaaggccgacaccaagauccuguucaucgaggagggcaagaucgugcacaccagcacccugagcggcagcgcccagcacguggaggagugcagcugcuaccccagauaccccggcgugagaugcgugugcagagacaacuggaagggcagcaacagacccaucguggacaucaacaucaaggaccacagcaucgugagcagcuacgugugcagcggccuggugggcgacacccccagaaagaacgacagcagcagcagcagccacugccuggaccccaacaacgaggagggcggccacggcgugaagggcugggccuucgacgacggcaacgacguguggaugggcagaaccaucaacgagaccagcagacugggcuacgagaccuucaaggugaucgagggcuggagcaaccccaagagcaagcugcagaccaacagacaggugaucguggacagaggcgacagaagcggcuacagcggcaucuucagcguggagggcaagagcugcaucaacagaugcuucuacguggagcugaucagaggcagaaaggaggagaccgaggugcuguggaccagcaacagcaucgugguguucugcggcaccagcggcaccuacggcaccggcagcuggcccgacggcgccgaccugaaccugaugcccaucuga

SEQ ID NO: 186312 - RNA, 1410 nt, Artificial Sequence
  derived and/or modified CDS sequence (opt4) from neuraminidase__InfluenzaA__EPI675797
augaaccccaaccagaagaucaucaccaucggcagcgugagccugaccaucagcaccaucugcuucuucaugcagaucgccauccugaucaccaccgugacccugcacuucaagcaguacgaguucaacagcccccccaacaaccaggugaugcugugcgagcccaccaucaucgagagaaacaucaccgagaucguguaccugaccaacaccaccaucgagaaggagaucugccccaagcccgccgaguacagaaacuggagcaagccccagugcggcaucaccggcuucgcccccuucagcaaggacaacagcaucagacugagcgccggcggcgacaucugggugaccagagagcccuacgugagcugcgaccccgacaagugcuaccaguucgcccugggccagggcaccacccugaacaacgugcacagcaacaacaaggugagagacagaacccccuacagaacccugcugaugaacgagcugggcgugcccuuccaccugggcaccaagcaggugugcaucgccuggagcagcagcagcugccacgacggcaaggccuggcugcacgugugcaucaccggcgacgacaagaacgccaccgccagcuucaucuacaacggcagacugguggacagcguggugagcuggagcaaggacauccugagaacccaggagagcgagugcaucugcaucaacggcaccugcaccguggugaugaccgacggcagcgccagcggcaaggccgacaccaagauccuguucaucgaggagggcaagaucgugcacaccagcacccugagcggcagcgcccagcacguggaggagugcagcugcuaccccagauaccccggcgugagaugcgugugcagagacaacuggaagggcagcaacagacccaucguggacaucaacaucaaggaccacagcaucgugagcagcuacgugugcagcggccuggugggcgacacccccagaaagaacgacagcagcagcagcagccacugccuggaccccaacaacgaggagggcggccacggcgugaagggcugggccuucgacgacggcaacgacguguggaugggcagaaccaucaacgagaccagcagacugggcuacgagaccuucaaggugaucgagggcuggagcaaccccaagagcaagcugcagaccaacagacaggugaucguggacagaggcgacagaagcggcuacagcggcaucuucagcguggagggcaagagcugcaucaacagaugcuucuacguggagcugaucagaggcagaaaggaggagaccgaggugcuguggaccagcaacagcaucgugguguucugcggcaccagcggcaccuacggcaccggcagcuggcccgacggcgccgaccugaaccugaugcccaucuga

SEQ ID NO: 186313 - RNA, 1410 nt, Artificial Sequence; identical to SEQ ID NO: 186311
  derived and/or modified CDS sequence (opt4) from neuraminidase__InfluenzaA__EPI578429

SEQ ID NO: 186314 - RNA, 1410 nt, Artificial Sequence; identical to SEQ ID NO: 186311
  derived and/or modified CDS sequence (opt4) from neuraminidase__InfluenzaA__EPI614405

SEQ ID NO: 186315 - RNA, 1350 nt, Artificial Sequence; identical to SEQ ID NO: 186233
  derived and/or modified CDS sequence (opt4) from neuraminidase__InfluenzaA__AAT73329

SEQ ID NO: 186316 - RNA, 1350 nt, Artificial Sequence; identical to SEQ ID NO: 186233
  derived and/or modified CDS sequence (opt4) from neuraminidase__InfluenzaA__AAW80723

SEQ ID NO: 186317 - RNA, 1350 nt, Artificial Sequence; identical to SEQ ID NO: 186233
  derived and/or modified CDS sequence (opt4) from neuraminidase__InfluenzaA__EF541467

SEQ ID NO: 186318 - RNA, 1398 nt, Artificial Sequence; identical to SEQ ID NO: 183514
  derived and/or modified CDS sequence (opt4) from neuraminidase__InfluenzaA__EPI439509

SEQ ID NO: 186319 - RNA, 1410 nt, Artificial Sequence
  derived and/or modified CDS sequence (opt4) from neuraminidase__InfluenzaA__EPI482776
augaacaccaaccagagaaucaucaccaucggcaccgugugcaugaucgugggcaucaucagccugcugcugcagaucggcaacaucgugagccuguggaucagccacagcauccagaccggcugggagaaccacaccgugaugugcaaccagagcgugaucaccuacgugaacaacaccugggugaacagaaccuacgugaacaucagcaacaucaagaucgccaccauccaggacgugaccagcaucauccuggccggcaacagcagccugugccccgugagcggcugggccguguacagcaaggacaacagcaucagaaucggcagcaagggcgacaucuucgugaucagagagcccuucaucagcugcagccagcuggagugcagaaccuucuuccugacccagggcgcccugcugaacgacaagcacagcaacggcaccgugaaggacagaagccccuacagaacccugaugagcugccccaucggcgaggcccccagccccuacaacagcagauucgagagcguggccuggagcgccagcgccugccacgacggcaugggcuggcugaccaucggcaucagcggccccgacaacggcgccguggccgugcugaaguacaacggcaucaucaccgacaccaucaagagcuggagaaacaagauccugagaacccaggagagcgagugcgugugcaugaacggcagcugcuucaccgugcugaccgacggccccagcaacggccaggccagcuacaagaucuucaagguggagaagggcaagaucaucaagagcaucgagcuggacgcccccaacuaccacuacgaggagugcagcugcuaccccgacaccggcaaggugaugugcgugugcagagacaacuggcacgccagcaacagacccugggugagcuucaaccagaaccuggacuaccagaucggcuacaucugcagcggcguguucggcgacaaccccagaagcaacgacggcaagggcaacugcggccccgugcugagcaacggcgccaacggcgugaagggcuucagcuacagauacggcaacggcguguggaucggcagaaccaagagcaucaacagcagaagcggcuucgagaugaucugggaccccaacggcuggaccgagaccgacagcagcuucagcaugaagcaggacaucaucgcccugaacgacuggagcggcuacagcggcagcuucgugcagcaccccgagcugaccggcaugaacugcaucagacccugcuucuggguggagcugaucagaggccagcccaaggagagcaccaucugggccagcggcagcagcaucagcuucugcggcgugaacagcgagaccgccagcuggagcuggcccgacggcgccgaccugcccuucaccaucgacaaguga

SEQ ID NO: 186320 - RNA, 1410 nt, Artificial Sequence
  derived and/or modified CDS sequence (opt4) from neuraminidase__InfluenzaA__EPI745533
augaaccccaaccagaagaucaucaccaucggcagcgugugcaucaccaucggcauggccaaccugauccugcagaucggcaacaucaucagcaucuggaucagccacagcauccagcugggcaaccagaaccagaucgagaccugcaaccagagcgugaucaccuacgagaacaacaccugggugaaccagaccuacgugaacaucagcaacaccaacuucgccgccggccagagcguggugagcgugaagcuggccggcaacagcagccugugccccgugagcggcugggccaucuacagcaaggacaacagcaucagaaucggcagcaagggcgacguguucgugaucagagagcccuucaucagcugcagcccccuggagugcagaaccuucuuccugacccagggcgcccugcugaacgacaagcacagcaacggcaccaucaaggacagaagccccuacagaacccugaugagcugccccaucggcgaggugcccagccccuacaacagcagauucgagagcguggccuggagcgccagcgccugccacgacggcaucagcuggcugaccaucggcaucagcggccccgacaacggcgccguggccgugcugaaguacaacggcaucaucaccgacaccaucaagagcuggagaaacaacauccugagaacccaggagagcgagugcgccugcgugaacggcagcugcuucaccgugaugaccgacggccccagcgacggccaggccagcuacaagaucuucagaaucgagaagggcaagaucgugaagagcguggagaugaacgcccccaacuaccacuacgaggagugcagcugcuaccccgacagcagcgagaucaccugcgugugcagagacaacuggcacggcagcaacagacccugggugagcuucaaccagaaccuggaguaccagaucggcuacaucugcagcggcaucuucggcgacaaccccagacccaacgacaagaccggcagcugcggccccgugagcagcaacggcgccaacggcgugaagggcuucagcuucaaguacggcaacggcguguggaucggcagaaccaagagcaucagcagcagaaacggcuucgagaugaucugggaccccaacggcuggaccggcaccgacaacaacuucagcaucaagcaggacaucgugggcaucaacgaguggagcggcuacagcggcagcuucgugcagcaccccgagcugaccggccuggacugcaucaagcccugcuucuggguggagcugaucagaggcagacccaaggagaacaccaucuggaccagcggcagcagcaucagcuucugcggcgugaacagcgacaccgugggcuggagcuggcccgacggcgccgagcugcccuucaccaucgacaaguga

SEQ ID NO: 186321 - RNA, 1410 nt, Artificial Sequence; identical to SEQ ID NO: 176788
  derived and/or modified CDS sequence (opt4) from neuraminidase__InfluenzaA__AEE69012

SEQ ID NO: 186322 - RNA, 1410 nt, Artificial Sequence; identical to SEQ ID NO: 176788
  derived and/or modified CDS sequence (opt4) from neuraminidase__InfluenzaA__EPI176609

SEQ ID NO: 186323 - RNA, 1410 nt, Artificial Sequence; identical to SEQ ID NO: 176788
  derived and/or modified CDS sequence (opt4) from neuraminidase__InfluenzaA__EPI176472

SEQ ID NO: 186324 - RNA, 1410 nt, Artificial Sequence
  derived and/or modified CDS sequence (opt4) from neuraminidase__InfluenzaA__EPI280340
augaaccccaaccagaagaucaucaccaucggcagcgugugcaucaccaucggcauggccaaccugauccugcagaucggcaacaucaucagcaucuggaucagccacagcauccagcugggcaaccagaaccagaucgagaccugcaaccagagcgugaucaccuacgagaacaacaccugggugaaccagaccuacgugaacaucagcaacaccaacuucgccgccggccagagcguggugagcgugaagcuggccggcaacagcagccugugccccgugagcggcugggccaucuacagcaaggacaacagcaucagaaucggcagcaagggcgacguguucgugaucagagagcccuucaucagcugcagcccccuggagugcagaaccuucuuccugacccagggcgcccugcugaacgacaagcacagcaacggcaccaucaaggacagaagccccuacagaacccugaugagcugccccaucggcgaggugcccagccccuacaacagcagauucgagagcguggccuggagcgccagcgccugccacgacggcaucagcuggcugaccaucggcaucagcggccccgacaacggcgccguggccgugcugaaguacaacggcaucaucaccgacaccaucaagagcuggagaaacaacauccugagaacccaggagagcgagugcgccugcgugaacggcagcugcuucaccgugaugaccgacggccccagcgacggccaggccagcuacaagaucuucagaaucgagaagggcaagaucgugaagagcguggagaugaacgcccccaacuaccacuacgaggagugcagcugcuaccccgacagcagcgagaucaccugcgugugcagagacaacuggcacggcagcaacagacccugggugagcuucaaccagaaccuggaguaccagaucggcuacaucugcagcggcaucuucggcgacaaccccagacccaacgacaagaccggcagcugcggccccgugagcagcaacggcgccaacggcgugaagggcuucagcuucaaguacggcaacggcguguggaucggcagaaccaagagcaucagcagcagaaacggcuucgagaucaucugggaccccaacggcuggaccggcaccgacaacaacuucagcaucaagcaggacaucgugggcaucaacgaguggagcggcuacagcggcagcuucgugcagcaccccgagcugaccggccuggacugcaucagacccugcuucuggguggagcugaucagaggcagacccaaggagaacaccaucuggaccagcggcagcagcaucagcuucugcggcgugaacagcgacaccgugggcuggagcuggcccgacggcgccgagcugcccuucaccaucgacaaguga

SEQ ID NO: 186325 - RNA, 1410 nt, Artificial Sequence; identical to SEQ ID NO: 176788
  derived and/or modified CDS sequence (opt4) from neuraminidase__InfluenzaA__EPI240318

SEQ ID NO: 186326 - RNA, 1410 nt, Artificial Sequence; identical to SEQ ID NO: 176788
  derived and/or modified CDS sequence (opt4) from neuraminidase__InfluenzaA__EPI183133

SEQ ID NO: 186327 - RNA, 1410 nt, Artificial Sequence; identical to SEQ ID NO: 176788
  derived and/or modified CDS sequence (opt4) from neuraminidase__InfluenzaA__EPI369141

SEQ ID NO: 186328 - RNA, 1410 nt, Artificial Sequence
  derived and/or modified CDS sequence (opt4) from neuraminidase__InfluenzaA__EPI482787
augaacaccaaccagagaaucaucaccaucggcaccgugugccugaucgugggcaucgugagccugcugcugcagaucggcaacaucgugagccuguggaucagccacagcauccagaccggcaagagaagccaccccgagaccugcagccagaacgugaucaccuacgagaacaacaccugggugaaccagaccuacgugaacaucagcaacaccaacaucguggacggccagggcgugaccagcaucauccuggccggcaacagcccccugugccccaucagcggcugggccaucuacagcaaggacaacagcaucagaaucggcagcaagggcgacaucuucgugaucagagagcccuucaucagcugcagccaccuggagugcagaaccuucuuccugacccagggcgcccugcugaacgacagacacagcaacggcaccgugaaggacagaagccccuacagaacccugaugagcugccccaucggcgaggcccccagccccuacaacagcagauucgagagcguggccuggagcgccagcgccugccacgacggcaugggcuggcugaccaucggcaucagcggccccgacaacggcgccguggccgugcugaaguacaacggcaucaucaccgacaccaucaagagcuggagaaacaagauccugagaacccaggagagcgagugcgugugcaucaacggcagcugcuucaccaucaugaccgacggccccagcaacggccaggccagcuacaagaucuucaagauggagaagggcaagaucaucaagagcguggagcuggacgcccccaacuaccacuacgaggagugcagcugcuaccccgacaccggcaagguggugugcgugugcagagacaacuggcacgccagcaacagacccugggugaccuucgaccagaaccugaacuaccagaucggcuacaucugcagcggcguguucggcgacaaccccagaagcaacgacggcaagggcaacugcggccccgugcccagcaacggcgccaacggcgugaagggcuucagcuucagauacggcaacggcguguggaucggcagaaccaagagcaucagcagcagaagcggcuucgagaugaucugggaccccaacggcuggaccgagaccgacagcagcuucagcaucaagcaggacaucaucgcccugaccgacuggagcggcuacagcggcagcuucgugcagcaccccgagcugaccggcaugaacugcaucaagcccugcuucuggguggagcugaucagaggccagcccaaggagagcaccaucuggaccagcggcagcagcaucagcuucugcggcguggacagcgagaccgugagcuggagcuggcccgacggcgccgaccugcccuucaccaucgacaaguga

SEQ ID NO: 186329 - RNA, 1410 nt, Artificial Sequence
  derived and/or modified CDS sequence (opt4) from neuraminidase__InfluenzaA__EPI482790
augaacaccaaccagagaaucaucaccaucggcaccgugugccugaucgugggcaucaucagccugcugcugcagaucggcaacauggugagccuguggaucagccacagcauccagaccggcggcaagaaccacaccgagaugugcaaccagaacgugaucaccuacgugaacaacaccugggugaacagaaccuacgugaacaucagcaacaccaagaucgugaacgugcaggacguggugagcgugauccugaccggcaacagcagccugugccccaucagcggcugggccaucuacagcaaggacaacagcaucagaaucggcagcaagggcgacaucuucgugaucagagagcccuucaucagcugcagccaccuggagugcagaaccuucuuccugacccagggcgcccugcugaacgacaagcacagcaacggcaccgugaaggacagaagccccuacagaacccugaugagcugccccgugggcgaggcccccagccccuacaacagcagauucgagagcguggccuggagcgccagcgccugccacgacggcaugggcuggcugaccaucggcaucagcggccccgacaacggcgccguggccgugcugaaguacaacggcaucaucaccgacaccaucaagagcuggagaaacaagauccugagaacccaggagagcgagugcgugugcaugaacggcagcugcuucaccgugcugaccgacggccccagcaacggccaggccagcuacaagaucuucaagauggagaagggcaagaucaucaagagcaucgagcuggacgcccccaacuaccacuacgaggagugcagcugcuaccccgacgccggcaaggugaugugcgugugcagagacaacuggcacgccagcaacagacccugggugagcuucgaccagaaccuggacuaccagaucggcuacaucugcagcggcguguucggcgacaaccccagaagcaacgacggcaagggcaacugcggccccgugcacagcaacggcgccaacggcgugaagggcuucagcuacagauacggcaacggcguguggaucggcagaaccaagagcaucaacagcagaagcggcuucgagaugaucugggaccccaacggcuggaccggcaccgacagcagcuucagcaugaagcaggacaucaucgcccugaccgacuggagcggcuacagcggcagcuucgugcagcaccccgagcugaccggcaugaacugcaucagacccugcuucuggguggagcugaucagaggccagcccaaggagaacaccaucugggccagcggcagcagcaucagcuucugcggcgugaacggcgagaccgccagcuggagcuggcccgacggcgccgaccugcccuucaccaucgacaaguga

SEQ ID NO: 186330 - RNA, 1410 nt, Artificial Sequence
  derived and/or modified CDS sequence (opt4) from neuraminidase__InfluenzaA__EPI291797
augaacaccaaccagagaaucaucaccaucggcaccgugugcaugaucgugggcaucaucagccugcugcugcagaucggcaacaucgugagccuguggaucagccacagcauccagaccggcugggagaaccacaccgagaugugcaaccagagcgugaucaccuacgugaacaacaccugggugaacagaaccuacgugaacaucagcaacaccaacaucgccaccauccaggacgugaccagcaucauccuggccggcaacagcagccugugccccgugagcggcugggccaucuacagcaaggacaacagcaucagaaucggcagcaagggcgacaucuucgugaucagagagcccuucaucagcugcagccagcuggagugcagaaccuucuuccugacccagggcgcccugcugaacgacaagcacagcaacggcaccgugaaggacagaagccccuacagaacccugaugagcugccccaucggcgaggcccccagccccuacaacagcagauucgagagcguggccuggagcgccagcgccugccacgacggcaugggcuggcugaccaucggcaucagcggccccgacaacggcgccguggccgugcugaaguacaacggcaucaucaccgacaccaucaagagcuggagaaacaagauccugagaacccaggagagcgagugcgugugcaugaacggcagcugcuucaccgugcugaccgacggccccagcaacggccaggccagcuacaagaucuucaagguggagaagggcaagaucaucaagagcaucgagcuggacgcccccaacuaccacuacgaggagugcagcugcuaccccgacaccggcaaggugaugugcgugugcagagacaacuggcacgccagcaacagacccugggugagcuucaaccagaaccuggacuaccagaucggcuacaucugcagcggcguguucggcgacaaccccagaagcaacgacggcaagggcaacugcggccccgugcugagcaacggcgccaacggcgugaagggcuucagcuacagauacggcaacggcguguggaucggcagaaccaagagcaucaacagcagaagcggcuucgagaugaucugggaccccaacggcuggaccgagaccgacagcagcuucagcaugaagcaggacaucaucgcccugaccgacuggagcggcuacagcggcagcuucgugcagcaccccgagcugaccggcaugaacugcaucagacccugcuucuggguggagcugaucagaggccagcccaaggagagcaccaucugggccagcggcagcagcaucagcuucugcggcgugaacagcgagaccgccagcuggagcuggcccgacggcgccgaccugcccuucaccaucgacaaguga

SEQ ID NO: 186331 - RNA, 1410 nt, Artificial Sequence; identical to SEQ ID NO: 186330
  derived and/or modified CDS sequence (opt4) from neuraminidase__InfluenzaA__EPI482798

SEQ ID NO: 186332 - RNA, 1410 nt, Artificial Sequence
  derived and/or modified CDS sequence (opt4) from neuraminidase__InfluenzaA__EPI638969
augaacaccaaccagagaaucaucaccaucggcaccgugugcaugaucgugggcaugaucagccugcugcugcagaucggcagcaucgugagccuguggaucagccacagcauccagaccggcugggagaaccacaccggcgugugcaaccagagcgugaucaccuacgugaacaacaccugggugaacagaaccuacgugaacaucagcaacaucaagaucgccaccauccaggacgugacccccaucauccuggccggcaacagcagccugugccccgugaacggcugggccguguacagcaaggacaacagcaucagaaucggcagcaagggcgacaucuucgugaucagagagcccuucaucagcugcagccagcuggagugcagaaccuucuuccugacccagggcgcccugcugaacgacaagcacagcaacggcaccgugaaggacagaagccccuacagaacccugaugagcugccccaucggcgaggcccccagccccuacaacagcagauucgagagcguggccuggagcgccagcgccugccacgacggcaugggcuggcugaccaucggcaucagcggccccgacaacggcgccguggccgugcugaaguacaacggcaucaucaccgacaccaucaagagcuggagaaacaagauccugagaacccaggagagcgagugcgugugcaugaacggcagcugcuucaccgugcugaccgacggccccagcaacggccaggccagcuacaagaucuucaagguggagaagggcaagaucaucaagagcaucgagcuggacgcccccaacuaccacuacgaggagugcagcugcuaccccgacaccggcaaggugaugugcgugugcagagacaacuggcacgccagcaacagacccugggugagcuucaaccagaaccuggacuaccagaucggcuacaucugcagcggcguguucggcgacaaccccagaagcaccgacggcaagggcaacugcggccccgugcugagcaacggcgccaacggcgugaagggcuucagcuacagauacggcaacggcguguggaucggcagaaccaagagcaucaacagcagaagcggcuucgagaugaucugggaccccaacggcuggaccgagaccgacagcagcuucagcaugaagcaggacaucaucgcccugaacgacuacagcggcuacagcggcagcuucgugcagcaccccgagcugaccggcaugaacugcaucagacccugcuucuggguggagcugaucagaggccagcccaaggagagcaccaucugggccagcggcagcagcaucagcuucugcggcgugaacagcgagaccgccagcuggagcuggcccgacggcgccgaccugcccuucgccaucgacaaguga

SEQ ID NO: 186333 - RNA, 1410 nt, Artificial Sequence
  derived and/or modified CDS sequence (opt4) from neuraminidase__InfluenzaA__ABI19012
augaacaccaaccagagaaucaucaccaucggcaccgugugccugaucgugggcaucaucagccugcugcugcagaucggcaacauggugagccuguggaucagccacagcauccagaccggcggcaagaaccacaccgagaugugcaaccagaacgugaucaccuacgugaacaacaccugggugaacagaaccuacgugaacaucagcaacaccaagaucgugaacgugcaggacguggugagcgugauccugaccggcaacagcagccugugccccaucagcggcugggccaucuacagcaaggacaacagcaucagaaucggcagcaagggcgacaucuucgugaucagagagcccuucaucagcugcagccaccuggagugcagaaccuucuuccugacccagggcgcccugcugaacgacaagcacagcaacggcaccgugaaggacagaagccccuacagaacccugaugagcugccccaucggcgaggcccccagccccuacaacagcagauucgagagcguggccuggagcgccagcgccugccacgacggcaugggcuggcugaccaucggcaucagcggccccgacaacggcgccguggccgugcugaaguacaacggcaucaucaccgacaccaucaagagcuggagaaacaagauccugagaacccaggagagcgagugcgugugcaugaacggcagcugcuucaccgugcugaccgacggccccagcaacggccaggccagcuacaagaucuucaagauggagaagggcaagaucaucaagagcaucgagcuggacgcccccaacuaccacuacgaggagugcagcugcuaccccgacgccggcaaggugaugugcgugugcagagacaacuggcacgccagcaacagacccugggugagcuucgaccagaaccuggacuaccagaucggcuacaucugcagcggcguguucggcgacaaccccagaagcaacgacggcaagggcaacugcggccccgugcacagcaacggcgccaacggcgugaagggcuucagcuacagauacggcaacggcguguggaucggcagaaccaagagcaucaacagcagaagcggcuucgagaugaucugggaccccaacggcuggaccggcaccgacagcagcuucagcaugaagcaggacaucaucgcccugaccgacuggagcggcuacagcggcagcuucgugagacaccccgagcugaccggcaugaacugcaucagacccugcuucuggguggagcugaucagaggccagcccaaggagaacaccaucugggccagcggcagcagcaucagcuucugcggcgugaacggcgagaccgccagcuggagcuggcccgacggcgccgaccugcccuucaccaucgacaaguga

SEQ ID NO: 186334 - RNA, 1410 nt, Artificial Sequence
  derived and/or modified CDS sequence (opt4) from neuraminidase__InfluenzaA__EPI687791
augaaccccaaccagaagaucaucaccaucggcagcaucugcaugaccaucggcauggccaaccugauccugcagaucggcaacaucaucagcaucugggugagccacagcauccagaucggcaaccagagccagaucgagaccugcaaccagagcgugaucaccuacgagaacaacaccugggugaaccagaccuacgugaacaucagcaacaccaacuucgccgccagacagagcguggugagcgugaagcuggccggcaacagcagccugugccccgugagcggcugggccaucuacagcaaggacaacagcgugagaaucggcagcaagggcgacguguucgugaucagagagcccuucaucagcugcagcccccuggagugcagaaccuucuuccugacccagggcgcccugcugaacgacaagcacagcaacggcaccaucaaggacagaagccccuacagaacccugaugagcugccccaucggcgaggugcccagccccuacaacagcagauucgagagcguggccuggagcgccagcgccugccacgacggcaucaacuggcugaccaucggcaucagcggccccgacagcggcgccguggccgugcugaaguacaacggcaucaucaccgacaccaucaagagcuggagaaacaacauccugagaacccaggagagcgagugcgccugcgugaacggcagcugcuucaccaucaugaccgacggccccagcgacggccaggccagcuacaagaucuucagaaucgagaagggcaagaucaucaagagcguggagaugaaggcccccaacuaccacuacgaggagugcagcugcuaccccgacagcagcgagaucaccugcgugugcagagacaacuggcacggcagcaacagacccugggugagcuucaaccagaaccuggaguaccagaugggcuacaucugcagcggcguguucggcgacaaccccagacccaacgacaagaccggcagcugcggccccgugagcagcaacggcgccaacggcgugaagggcuucagcuucaaguacggcaacggcguguggaucggcagaaccaagagcaucagcagcagaaagggcuucgagaugaucugggaccccaacggcuggaccggcaccgacaacaaguucagcaucaagcaggacaucgugggcaucaacgaguggagcggcuacagcggcagcuucgugcagcaccccgagcugaccggccuggacugcaucagacccugcuucuggguggagcugaucagaggcagacccgaggagaacaccaucuggaccagcggcagcagcaucagcuucugcggcgugaacagcgacaccgugggcuggagcuggcccgacggcgccgagcugcccuucaccaucgacaaguga

SEQ ID NO: 186335 - RNA, 1410 nt, Artificial Sequence
  derived and/or modified CDS sequence (opt4) from neuraminidase__InfluenzaA__EPI841266
augaaccccaaccagaagaucaucaccaucggcagcaucugcaugaccaucggcauggccaaccugauccugcagaucggcaacaucaucagcaucugggugagccacagcauccagaucggcaaccagagccagaucgagaccugcaaccagagcgugaucaccuacgagaacaacaccugggugaaccagaccuacgugaacaucagcaacaccaacuucgccgccagacagagcguggugagcgugaagcuggccggcaacagcagccugugccccgugagcggcugggccaucuacagcaaggacaacagcgugagaaucggcagcaagggcgacguguucgugaucagagagcccuucaucagcugcagcccccuggagugcagaaccuucuuccugacccagggcgcccugcugaacgacaagcacagcaacggcaccaucaaggacagaagccccuacagaacccugaugagcugccccaucggcgaggugcccagccccuacaacagcagauucgagagcguggccuggagcgccagcgccugccacgacggcaucaacuggcugaccaucggcaucagcggccccgacagcggcgccguggccgugcugaaguacaacggcaucaucaccgacaccaucaagagcuggagaaacaacauccugagaacccaggagagcgagugcgccugcgugaacggcagcugcuucaccaucaugaccgacggccccagcgacggccaggccagcuacaagaucuucagaaucgaggagggcaagaucaucaagagcguggagaugaaggcccccaacuaccacuacgaggagugcagcugcuaccccgacagcagcgagaucaccugcgugugcagagacaacuggcacggcagcaacagacccugggugagcuucaaccagaaccuggaguaccagaugggcuacaucugcagcggcguguucggcgacaaccccagacccaacgacaagaccggcagcugcggccccgugagcagcaacggcgccaacggcgugaagggcuucagcuucaaguacggcaacggcguguggaucggcagaaccaagagcaucagcagcagaaagggcuucgagaugaucugggaccccaacggcuggaccggcaccgacaacaaguucagcaucaagcaggacaucgugggcaucaacgaguggagcggcuacagcggcagcuucgugcagcaccccgagcugaccggccuggacugcaucagacccugcuucuggguggagcugaucagaggcagacccgaggagaacaccaucuggaccagcggcagcagcaucagcuucugcggcgugaacagcgacaccgugggcuggagcuggcccgacggcgccgagcugcccuucaccaucgacaaguga

SEQ ID NO: 186336 - RNA, 1410 nt, Artificial Sequence
  derived and/or modified CDS sequence (opt4) from neuraminidase__InfluenzaA__EPI291844
augaacaccaaccagagaaucaucaccaucggcaccgugugccugaucgugggcaucaucagccugcugcugcagaucggcaccauggugagccuguggaucagccacagcauccagaccggcggcaagaaccacaccgagaugugcaaccagaacgugaucaccuacgugaacaacaccugggugaacagaaccuacgugaacaucagcaacaccaagaucgugaacgugcaggacguggugagcgugauccugaccggcaacagcagccugugccccaucagcggcugggccaucuacagcaaggacaacagcaucagaaucggcagcaagggcgacaucuucgugaucagagagcccuucaucagcugcagccaccuggagugcagaaccuucuuccugacccagggcgcccugcugaacgacaagcacagcaacggcaccgugaaggacagaagccccuacagaacccugaugagcugccccaucggcgaggcccccagccccuacaacagcagauucgagagcguggccuggagcgccagcgccugccacgacggcaugggcuggcugaccaucggcaucagcggccccgacaacggcgccguggccgugcugaaguacaacggcaucaucaccgacaccaucaagagcuggagaaacaagauccugagaacccaggagagcgagugcgugugcaugaacggcagcugcuucaccgugcugaccgacggccccagcaacggccaggccagcuacaagaucuucaagauggagaagggcaagaucaucaagagcaucgagcuggacgcccccaacuaccacuacgaggagugcagcugcuaccccgacgccggcaaggugaugugcgugugcagagacaacuggcacgccagcaacagacccugggugagcuucgaccagaaccuggacuaccagaucggcuacaucugcagcggcguguucggcgacaaccccagaagcaacgacggcaagggcaacugcggccccgugcacagcaacggcgccaacggcgugaagggcuucagcuacaaguacggcaacggcguguggaucggcagaaccaagagcaucaacagcagaagcggcuucgagaugaucugggaccccaacggcuggaccggcaccgacagcagcuucagcaugaagcaggacaucaucgcccugaccgacuggagcggcuacagcggcagcuucgugcagcaccccgagcugaccggcaugaacugcaucagacccugcuucuggguggagcugaucagaggccagcccaaggagaacaccaucugggccagcggcagcagcaucagcuucugcggcgugaacggcgagaccgccagcuggagcuggcccgacggcgccgaccugcccuucaccaucgacaaguga

SEQ ID NO: 186337 - RNA, 1410 nt, Artificial Sequence
  derived and/or modified CDS sequence (opt4) from neuraminidase__InfluenzaA__EPI558120
augaacaccaaccagagaaucaucaccaucggcaccgugugcaugaucgugggcaucaucagccugcugcugcagaucggcaacaucgugagccuguggaucagccacagcauccagaccggcugggagaaccacaccgagaugugcaaccagagcgugaucaccuacgugaacaacaccuggaugaacagaaccuacgugaacaucagcaacaucaagaucgccaccauccaggacgugaccagcaucgugcuggccggcaacagcagccugugccccgugagcggcugggccguguacagcaaggacaacagcaucagaaucggcagcaagggcgacaucuucgugaucagagagcccuucaucagcugcagccagcuggagugcagaaccuucuuccugacccagggcgcccugcugaacgacaagcacagcaacggcaccgugaaggacagaagccccuacagaacccugaugagcugccccaucggcgaggcccccagccccuacaacagcagauucgagagcguggccuggagcgccagcgccugccacgacggcaugggcuggcugaccaucggcaucagcggccccgacaacggcgccguggccgugcugaaguacaacggcaucaucaccgacaccaucaagagcuggagaaacaagauccugagaacccaggagagcgagugcgugugcaucaacggcagcugcuucaccgugcugaccgacggccccagcaacggccaggccagcuacaagaucuucaagguggagaagggcaagaucaucaagagcaucgagcuggacgcccccaacuaccacuacgaggagugcagcugcuaccccgacaccggcaaggugaugugcaucugcagagacaacuggcacgccagcaacagacccugggugagcuucgaccagaaccuggacuaccagaucggcuacaucugcagcggcguguucggcgacaaccccagaagcaacgacggcaagggcaacugcggccccgugcugagcaacggcgccaacggcgugaagggcuucagcuacagauacggcaacggcguguggaucggcagaaccaagagcaucaacagcagaagcggcuucgagaugaucugggaccccaacggcuggaccgagaccgacagcagcuucagcaugaagcaggacaucaucgcccugaacgacuggagcggcuacagcggcagcuucgugcagcaccccgagcugaccggcaugaacugcaucagacccugcuucuggguggagcugaucagaggccagcccaaggagagcaccaucugggccagcggcagcagcaucagcuucugcggcgugaacagcgagaccgccagcuggagcuggcccgacggcgccgaccugcccuucaccaucgacaaguga

SEQ ID NO: 186338 - RNA, 1410 nt, Artificial Sequence
  derived and/or modified CDS sequence (opt4) from neuraminidase__InfluenzaA__EPI564138
augaaccccaaccagaagaucaucaccaucggcagcgugagccugaccaucagcaccaucugcuucuucaugcagaucgccauccugaucaccaccgugacccugcacuucaagcaguacgaguucaacagcccccccaacaaccaggugaugcugugcgagcccaccaucaucgagagaaacaucaccgagaucguguaccugaccaacaccaccaucgagaaggagaucugccccaagcccgccgaguacagaaacuggagcaagccccagugcggcaucaccggcuucgcccccuucagcaaggacaacagcaucagacugagcgccggcggcgacaucugggugaccagagagcccuacgugagcugcgaccccgacaagugcuaccaguucgcccugggccagggcaccacccugaacaacgugcacagcaacaacaccgugagagacagaacccccuacagaacccugcugaugaacgagcugggcgugcccuuccaccugggcaccaagcaggugugcaucgccuggagcagcagcagcugccacgacggcaaggccuggcugcacgugugcaucaccggcgacgacaagaacgccaccgccagcuucaucuacaacggcagacugguggacagcguggugagcuggagcaaggacauccugagaacccaggagagcgagugcgugugcaucaacggcaccugcaccguggugaugaccgacggcagcgccagcggcaaggccgacaccaagauccuguucaucgaggagggcaagaucgugcacaccagcaagcugagcggcagcgcccagcacguggaggagugcagcugcuaccccagauaccccggcgugagaugcgugugcagagacaacuggaagggcagcaacagacccaucguggacaucaacaucaaggaccacagcaucgugagcagcuacgugugcagcggccuggugggcgacacccccagaaagaacgacagcagcagcagcagccacugccuggaccccaacaacgaggagggcggccacggcgugaagggcugggccuucgacgacggcaacgacguguggaugggcagaaccaucaacgagaccagcagacugggcuacgagaccuucaaggugguggagggcuggagcaaccccaagagcaagcugcagaucaacagacaggugaucguggacagaggcgacagaagcggcuacagcggcaucuucagcguggagggcaagagcugcaucaacagaugcuucuacguggagcugaucagaggcagaaaggaggagaccgaggugcuguggaccagcaacagcaucgugguguucugcggcaccagcggcaccuacggcaccggcagcuggcccgacggcgccgaccugaaccugaugcccaucuga

SEQ ID NO: 186339 - RNA, 1410 nt, Artificial Sequence
  derived and/or modified CDS sequence (opt4) from neuraminidase__InfluenzaA__ANM92825
augaaccccaaccagaagaucaucaccaucggcagcaucugcaugaccaucggcauggccaaccugauccugcagaucggcaacaucaucagcaucugggugagccacagcauccagaucggcaaccagagccagaucgagaccugcaaccagagcgugaucaccuacgagaacaacaccugggugaaccagaccuacgugaacaucagcaacaccaacuucgccgccggccagagcguggugagcgugaagcuggccggcaacagcagccugugccccgugagcggcugggccaucuacagcaaggacaacagcgugagaaucggcagcaagggcgacguguucgugaucagagagcccuucaucagcugcagcccccuggagugcagaaccuucuuccugacccagggcgcccugcugaacgacaagcacagcaacggcaccaucaaggacagaagccccuacagaacccugaugagcugccccaucggcgaggugcccagccccuacaacagcagauucgagagcguggccuggagcgccagcgccugccacgacggcaucaacuggcugaccaucggcaucagcggccccgacagcggcgccguggccgugcugaaguacaacggcaucaucaccgacaccaucaagagcuggagaaacaacauccugagaacccaggagagcgagugcgccugcgugaacggcagcugcuucaccaucaugaccgacggccccagcgacggccaggccagcuacaagaucuucagaaucgagaagggcaagaucaucaagagcguggagaugaaggcccccaacuaccacuacgaggagugcagcugcuaccccgacagcagcgagaucaccugcgugugcagagacaacuggcacggcagcaacagacccugggugagcuucaaccagaaccuggaguaccagaugggcuacaucugcagcggcguguucggcgacaaccccagacccaacgacaagaccggcaacugcggccccgugagcagcaacggcgccaacggcgugaagggcuucagcuucaaguacggcaacggcguguggaucggcagaaccaagagcaucagcagcagaaagggcuucgagaugaucugggaccccaacggcuggaccggcaccgacaacaaguucagcaucaagcaggacaucgugggcaucaacgaguggagcggcuacagcggcagcuucgugcagcaccccgagcugaccggccuggacugcaucagacccugcuucuggguggagcugaucagaggcagacccgaggagaacaccaucuggaccagcggcagcagcaucagcuucugcggcgugaacagcgacaccgugggcuggagcuggcccgacggcgccgagcugcccuucaccaucgacaaguga

SEQ ID NO: 186340 - RNA, 1410 nt, Artificial Sequence
  derived and/or modified CDS sequence (opt4) from neuraminidase__InfluenzaA__EPI291694
augaacaccaaccagagaaucaucaccaucggcaccgugugccugaucgugggcaucgugagccugcugcugcagaucggcaacaucgugagccuguggaucagccacagcauccagaccggcgagaagaaccacagcgaggugugcaaccagaacaucaucaccuacgagaacaagaccugggugaaccagaccuacgugaacaucagcaacaccaacaucgccgagggccagggcgugaccagcaucauccuggccggcaacagcagccugugccccgugagcggcugggccaucuacagcaaggacaacagcaucagaaucggcagcaagggcgacaucuucgugaucagagagcccuucaucagcugcagccaccuggagugcagaaccuucuuccugacccagggcgcccugcugaacgacagacacagcaacggcaccgugaaggacagaagccccuacagaacccugaugagcugccugaccggcgaggcccccagccccuacaacagcagauucgagagcguggccuggagcgccagcgccugccacgacggcaugggcuggcugaccaucggcaucagcggccccgacaacggcgccguggccgugcugaaguacaacggcaucaucaccgacaccaucaagagcuggagaaacaagauccugagaacccaggagagcgagugcgugugcaucaacggcagcugcuucaccaucaugaccgacggccccagcaacggccaggccagcuacaagaucuucaagauggagaagggcaagaucaucaagagcguggagcuggacgcccccaacuaccacuacgaggagugcagcugcuaccccgacaccggcaagguggugugcgugugcagagacaacuggcacgccagcaacagacccugggugagcuucgaccagaaccuggacuaccagaucggcuacaucugcagcggcguguucggcgacaaccccagaagcaacgacggcaagggcaacugcggccccgugcccagcaacggcgccaacggcgugaagggcuucagcuucagauacggcaacggcguguggaucggcagaaccaagagcaucaucagcagaagcggcuucgagaugaucugggaccccaacggcuggaccgagaccgacagcagcuucagcaucaagcaggacaucaucgcccugaccgacuggagcggcuacagcggcagcuucgugcagcaccccgagcugaccggcaugaacugcaucagacccugcuucuggguggagcugaucagaggccagcccaaggagagcaccaucuggaccagcggcagcagcaucagcuucugcggcguggacagcgagaccgccagcuggagcuggcccgacggcgccgaccugcccuucaccaucgacaaguga

SEQ ID NO: 186341 - RNA, 1410 nt, Artificial Sequence; identical to SEQ ID NO: 177274
  derived and/or modified CDS sequence (opt4) from neuraminidase__InfluenzaA__EPI241027

SEQ ID NO: 186342 - RNA, 1410 nt, Artificial Sequence; identical to SEQ ID NO: 176798
  derived and/or modified CDS sequence (opt4) from neuraminidase__InfluenzaA__EPI177405

SEQ ID NO: 186343 - RNA, 1410 nt, Artificial Sequence; identical to SEQ ID NO: 176798
  derived and/or modified CDS sequence (opt4) from neuraminidase__InfluenzaA__EPI242475

SEQ ID NO: 186344 - RNA, 1410 nt, Artificial Sequence
  derived and/or modified CDS sequence (opt4) from neuraminidase__InfluenzaA__EPI590131
augaacgccaaccagagaaucaucaccaucggcaccgugugccugaucaucggcaucaucagccugcugcugcagaucggcaacauggugagccuguggaucagccacagcauccagaccggcggcaagaaccacaccgagaugugcaaccagaacgugaucaccuacgugaacaacaccugggugaacagaaccuacgugaacaucagcaacaccaagaucgugaacgugcaggacguggugagcgugauccugaccggcaacagcagccugugcagcaucagcggcugggccaucuacagcaaggacaacagcaucagaaucggcagcaagggcgacaucuucgugaucagagagcccuucaucagcugcagccaccuggagugcagaaccuucuuccugacccagggcgcccugcugaacgacaagcacagcaacggcaccgugaaggacagaagccccuacagaacccugaugagcugccccaucggcgaggcccccagccccuacaacagcagauucgagagcguggccuggagcgccagcgccugccacgacggcaucggcuggcugaccaucggcaucagcggccccgacaacggcgccguggccgugcugaaguacaacggcaucaucaccgacaccaucaagagcuggagaaacaagauccugagaacccaggagagcgagugcgugugcaugaacggcagcugcuucgccgugcugaccgacggccccagcaacggccaggccagcuacaagaucuucaaggugaagcagggcaagaucaucaagagcaucgagcuggacgcccccaacuaccacuacgaggagugcagcugcuaccccgacgccggcaaggugaugugcgugugcagagacaacuggcacgccagcaacagacccugggugagcuucgaccaggaccugaacuaccagaucggcuacaucugcagcggcguguucggcgacaaccccagaagcaacgacggcaagggcaacugcggccccgugcacagcaacggcgccaacggcgugaagggcuucagcuacagauacggcaacggcguguggaucggcagaaccaagagcauccacagcagaagcggcuucgagaugaucugggaccccaacggcuggaccggcaccgacagcagcuucagcaugaagcaggacaucaucgcccugaccgacuggagcggcuacagcggcagcuucgugcagcaccccgagcugaccggcaugaacugcaucagacccugcuucuggguggagcugaucagaggccagcccaaggagaacaccaucugggccagcggcagcagcaucagcuucugcggcgugaacggcgagaccgccagcuggagcuggcccgacggcgccgaccugcccuucaccaucgacaaguga

SEQ ID NO: 186345 - RNA, 1410 nt, Artificial Sequence
  derived and/or modified CDS sequence (opt4) from neuraminidase__InfluenzaA__EPI68596
augaacaccaaccagagaaucaucaccaucggcaccgugugccugaucgugggcaucgugagccugcugcugcagaucggcaacaucgugagccuguggaucagccacagcauccagaccggcgagaagaaccacagcgagaucugcagccagaacgugaucaccuacgagaacaacaccugggugaaccagaccuacgugaacaucagcaacaccaacaucgccgacggccagggcgugaccagcaucauccuggccggcaacagcagccugugccccaucagcggcugggccaucuacagcaaggacaacagcaucagaaucggcagcaagggcgacaucuucgugaucagagagcccuucaucagcugcagccaccuggagugcagaaccuucuuccugacccagggcgcccugcugaacgacagacacagcaacggcaccgugaaggacagaagccccuacagaacccugaugagcugccccaucggcgaggcccccagccccuacaacagcagauucgagagcguggccuggagcgccagcgccugccacgacggcaugggcuggcugaccaucggcaucagcggccccgacaacggcgccguggccgugcugaaguacaacggcaucaucaccgacaccaucaagagcuggagaaacaagauccugagaacccaggagagcgagugcgugugcaucaacggcagcugcuucaccaucaugaccgacggccccagcaacggccaggccagcuacaagaucuucaagauggagaagggcaagaucaucaagagcguggagcuggacgcccccaacuaccacuacgaggagugcagcugcuaccccgacaccggcaagguggugugcgugugcagagacaacuggcacgccagcaacagacccugggugagcuucgaccagaaccuggacuaccagaucggcuacaucugcagcggcguguucggcgacaaccccagaagcaacgacggcaagggcaacugcggccccgugcugagcaacggcgccaacggcgugaagggcuucagcuucagauacggcaacggcguguggaucggcagaaccaagagcaucagcagcagaagcggcuucgagaugaucugggaccccaacggcuggaccgagaccgacagcagcuucagcaucaagcaggacaucaucgcccugaccgacuggagcggcuacagcggcagcuucgugcagcaccccgagcugaccggcaugaacugcaucagacccugcuucuggguggagcugaucagaggccagcccaaggagagcaccaucuggaccagcggcagcagcaucagcuucugcggcguggacagcgagaccgccagcuggagcuggcccgacggcgccgaccugcccuucaccaucgacaaguga

SEQ ID NO: 186346 - RNA, 1365 nt, Artificial Sequence; identical to SEQ ID NO: 175779
  derived and/or modified CDS sequence (opt4) from neuraminidase__InfluenzaA__EPI115409

SEQ ID NO: 186347 - RNA, 1365 nt, Artificial Sequence; identical to SEQ ID NO: 175779
  derived and/or modified CDS sequence (opt4) from neuraminidase__InfluenzaA__ABD77678/m1

SEQ ID NO: 186348 - RNA, 1410 nt, Artificial Sequence; identical to SEQ ID NO: 176788
  derived and/or modified CDS sequence (opt4) from neuraminidase__InfluenzaA__EPI185224

SEQ ID NO: 186349 - RNA, 1410 nt, Artificial Sequence; identical to SEQ ID NO: 186304
  derived and/or modified CDS sequence (opt4) from neuraminidase__InfluenzaA__EPI697745

SEQ ID NO: 186350 - RNA, 1410 nt, Artificial Sequence; identical to SEQ ID NO: 186304
  derived and/or modified CDS sequence (opt4) from neuraminidase__InfluenzaA__EPI768524

SEQ ID NO: 186351 - RNA, 1410 nt, Artificial Sequence
  derived and/or modified CDS sequence (opt4) from neuraminidase__InfluenzaA__EPI726929
augaaccccaaccagaagaucaucaccaucggcagcaucagcaugaccaucggcauggccaaccugauccugcagaucggcaacaucaucagcaucugggugagccacagcauccagaucggcaaccagagccagaucgagaccugcaaccagagcgugaucaccuacgagaacaacaccugggugaaccagaccuacgugaacaucagcaacaccaacuucgccgccggccagagcguggugagcgugaagcuggccggcaacagcagccugugccccgugagcggcugggccaucuacagcaaggacaacagcgugagaaucggcagcaagggcgacguguucgugaucagagagcccuucaucagcugcagcccccuggagugcagaaccuucuuccugacccagggcgcccugcugaacgacaagcacagcaacggcaccaucaaggacagaagccccuacagaacccugaugagcugccccaucggcgaggugcccagccccuacaacagcagauucgagagcguggccuggagcgccagcgccugccacgacggcaucaacuggcugaccaucggcaucagcggccccgacagcggcgccguggccgugcugaaguacaacggcaucaucaccgacaccaucaagagcuggagaaacaacauccugagaacccaggagagcgagugcgccugcgugaacggcagcugcuucaccaucaugaccgacggccccagcgacggccaggccagcuacaagaucuucagaaucgagaagggcaagaucaucaagagcguggagaugaaggcccccaacuaccacuacgaggagugcagcugcuaccccgacagcagcgagaucaccugcgugugcagagacaacuggcacggcagcaacagacccugggugagcuucaaccagaaccuggaguaccagaugggcuacaucugcagcggcguguucggcgacaaccccagacccaacgacaagaccggcagcugcggccccgugagcagcaacggcgccaacggcgugaagggcuucagcuucaaguacggcaacggcguguggaucggcagaaccaagagcaucagcagcagaaagggcuucgagaugaucugggaccccaacggcuggaccggcaccgacaacaaguucagcaucaagcaggacaucgugggcaucaacgaguggagcggcuacagcggcagcuucgugcagcaccccgagcugaccggccuggacugcaucagacccugcuucuggguggagcugaucagaggcagacccgaggagaacaccaucuggaccagcggcagcagcaucagcuucugcggcgugaacagcgacaccgugggcuggagcuggcccgacggcgccgagcugcccuucaccaucgacaaguga

SEQ ID NO: 186352 - RNA, 1410 nt, Artificial Sequence; identical to SEQ ID NO: 186351
  derived and/or modified CDS sequence (opt4) from neuraminidase__InfluenzaA__EPI813816

SEQ ID NO: 186353 - RNA, 1410 nt, Artificial Sequence
  derived and/or modified CDS sequence (opt4) from neuraminidase__InfluenzaA__EPI466627
augaaccccaaccagaagaucaucaccaucggcagcgugugcaugaccaucggcauggccaaccugauccugcagaucggcaacaucaucagcaucugggugagccacagcauccagcugggcaaccagagccagaucgagaccugcaaccagagcgugaucaccuacgagaacaacaccugggugaaccagaccuacgugaacaucagcaacaccaacuucgccgccggccagagcguggugagcgugaagcuggccggcaacagcagccugugccccgugagcggcugggccaucuacagcaaggacaacagcgugagaaucggcagcaagggcgacguguucgugaucagagagcccuucaucagcugcagcccccuggagugcagaaccuucuuccugacccagggcgcccugcugaacgacaagcacagcaacggcaccaucaaggacagaagccccuacagaacccugaugagcugccccaucggcgaggugcccagccccuacaacagcagauucgagagcguggccuggagcgccagcgccugccacgacggcaucaacuggcugaccaucggcaucagcggccccgacagcggcgccguggccgugcugaaguacaacggcaucaucaccgacaccaucaagagcuggagaaacaacauccugagaacccaggagagcgagugcgccugcgugaacggcagcugcuucaccaucaugaccgacggccccagcgacggccaggccagcuacaagaucuucagaaucgagaagggcaagaucgugaagagcguggagaugaacgcccccaacuaccacuacgaggagugcagcugcuaccccgacagcagcgagaucaccugcgugugcagagacaacuggcacggcagcaacagacccugggugagcuucaaccagaaccuggaguaccagaucggcuacaucugcagcggcguguucggcgacaaccccagacccaacgacaagaccggcagcugcggccccgugagcagcaacggcgccaacggcgugaagggcuucagcuucaaguacggcaacggcguguggaucggcagaaccaagagcaucagcagcagaaagggcuucgagaugaucugggaccccaacggcuggaccggcaccgacaacaacuucagcaucaagcaggacaucgugggcaucaacgaguggagcggcuacagcggcagcuucgugcagcaccccgagcugaccggccuggacugcaucagacccugcuucuggguggagcugaucagaggcagacccgaggagaacaccaucuggaccagcggcagcagcaucagcuucugcggcgugaacagcgacaccgugggcuggagcuggcccgacggcgccgagcugcccuucaccaucgacaaguga

SEQ ID NO: 186354 - RNA, 1410 nt, Artificial Sequence
  derived and/or modified CDS sequence (opt4) from neuraminidase__InfluenzaA__EPI541965
augaaccccaaccagaagaucaucaccaucggcagcgugugcaugaccaucggcauggccaaccugauccugcagaucggcaacaucaucagcaucugggugagccacagcauccagcugggcaaccagagccagaucgagaccugcaaccagagcgugaucaccuacgagaacaacaccugggugaaccagaccuacgugaacaucagcaacaccaacuucgccgccggccagcccguggugagcgugaagcuggccggcaacagcagccugugccccgugagcggcugggccaucuacagcaaggacaacagcgugagaaucggcagcaagggcgacguguucgugaucagagagcccuucaucagcugcagcccccuggagugcagaaccuucuuccuggcccagggcgcccugcugaacgacaagcacagcaacggcaccaucaaggacagaagccccuacagaacccugaugagcugccccaucggcgaggugcccagccccuacaacagcagauucgagagcguggccuggagcgccagcgccugccacgacggcaucaacuggcugaccaucggcaucagcggccccgacagcggcgccguggccgugcugaaguacaacggcaucaucaccgacaccaucaagagcuggagaaacaacauccugagaacccaggagagcgagugcgccugcgugaacggcagcugcuucaccaucaugaccgacggccccagcgacggccaggccagcuacaagaucuucagaaucgagaagggcaagaucgugaagagcguggagaugaacgcccccaacuaccacuacgaggagugcagcugcuaccccgacagcagcgagaucaccugcgugugcagagacaacuggcacggcagcaacagacccugggugagcuucaaccagaaccuggaguaccagaucggcuacaucugcagcggcguguucggcgacaaccccagacccaacgacaagaccggcagcugcggccccgugagcagcaacggcgccaacggcgugaagggcuucagcuucaaguacggcaacggcguguggaucggcagaaccaagagcaucagcagcagaaagggcuucgagaugaucugggaccccaacggcuggaccggcaccgacaacaacuucagcaucaagcaggacaucgugggcaucaacgaguggagcggcuacagcggcagcuucgugcagcaccccgagcugaccggccuggacugcaucagacccugcuucuggguggagcugaucagaggcagacccgaggagaacaccaucuggaccagcggcagcagcaucagcuucugcggcgugaacagcgacaccgugggcuggagcuggcccgacggcgccgagcugcccuucaccaucgacaaguga

SEQ ID NO: 186355 - RNA, 1410 nt, Artificial Sequence
  derived and/or modified CDS sequence (opt4) from neuraminidase__InfluenzaA__EPI652004
augaaccccaaccagaagaucaucaccaucggcagcgugugcaugaccaucggcauggccaaccugauccugcagaucggcaacaucaucagcaucugggugagccacagcauccagaucggcaaccagagccagaucgagaccugcaaccagagcgugaucaccuacgagaacaacaccugggugaaccagaccuacgugaacaucagcaacaccaacuucgccgccggccagagcguggugagcgugaagcuggccggcaacagcagccugugccccgugagcggcugggccaucuacagcaaggacaacagcgugagaaucggcagcaagggcgacguguucgugaucagagagcccuucaucagcugcagcccccuggagugcagaaccuucuuccuggcccagggcgcccugcugaacgacaagcacagcaacggcaccaucaaggacagaagccccuacagaacccugaugagcugccccaucggcgaggugcccagccccuacaacagcagauucgagagcguggccuggagcgccagcgccugccacgacggcaucaacuggcugaccaucggcaucagcggccccgacagcggcgccguggccgugcugaaguacaacggcaucaucaccgacaccaucaagagcuggagaaacaacauccugagaacccaggagagcgagugcgccugcgugaacggcagcugcuucaccaucaugaccgacggccccagcgacggccaggccagcuacaagaucuucagaaucgagaagggcaagaucgugaagagcguggagaugaacgcccccaacuaccacuacgaggagugcagcugcuaccccgacagcagcgagaucaccugcgugugcagagacaacuggcacggcagcaacagacccugggugagcuucaaccagaaccuggaguaccagaucggcuacaucugcagcggcguguucggcgacaaccccagacccaacgacaagaccggcagcugcggccccgugagcagcaacggcgccaacggcgugaagggcuucagcuucaaguacggcaacggcguguggaucggcagaaccaagagcaucagcagcagaaagggcuucgagaugaucugggaccccaacggcuggaccggcaccgacaacaacuucagcaucaagcaggacaucgugggcaucaacgaguggagcggcuacagcggcagcuucgugcagcaccccgagcugaccggccuggacugcaucagacccugcuucuggguggagcugaucagaggcagacccgaggagaacaccaucuggaccagcggcagcagcaucagcuucugcggcgugaacagcgacaccgugggcuggagcuggcccgacggcgccgagcugcccuucaccaucgacaaguga

SEQ ID NO: 186356 - RNA, 1410 nt, Artificial Sequence
  derived and/or modified CDS sequence (opt4) from neuraminidase__InfluenzaA__EPI62526
augaacaccaaccagagaaucaucaccaucggcaccgugugccugaucgugggcaucgugagccugcugcugcagaucggcaacaucgugagccuguggaucagccacagcauccagaccggcgagaagaaccaccccgagaucugcagccagaacgugaucaccuacgagaacaacaccugggugaaccagaccuacgugaacaucagcaacaccaacaucguggacggccagggcgugaccagcaucauccuggccggcaacagcagccugugccccaucagcggcugggccaucuacagcaaggacaacagcaucagaaucggcagcaagggcgacaucuucgugaucagagagcccuucaucagcugcagccaccuggagugcagaaccuucuuccugacccagggcgcccugcugaacgacagacacagcaacggcaccgugaaggacagaagccccuacagaacccugaugagcugccccaucggcgaggcccccagccccuacaacagcagauucgagagcguggccuggagcgccagcgccugccacgacggcaugggcuggcugaccaucggcaucagcggccccgacaacggcgccguggccgugcugaaguacaacggcaucaucaccgacaccaucaagagcuggagaaacaagauccugagaacccaggagagcgagugcgugugcaucaacggcagcugcuucaccaucaugaccgacggccccagcaacggccaggccagcuacaagaucuucaagauggagaagggcaagaucaucaagagcguggagcuggacgcccccaacuaccacuacgaggagugcagcugcuaccccgacaccggcaagguggugugcgugugcagagacaacuggcacgccagcaacagacccugggugagcuucgaccagaaccuggacuaccagaucggcuacaucugcagcggcguguucggcgacaaccccagaagcaacgacggcaagggcaacugcggccccgugcugagcaacggcgccaacggcgugaagggcuucagcuucagauacggcaacggcguguggaucggcagaaccaagagcaucagcagcagaagcggcuucgagaugaucugggaccccaacggcuggaccgagaccgacagcagcuucagcaucaagcaggacaucaucgcccugaccgacuggagcggcuacagcggcagcuucgugcagcaccccgagcugaccggcaugaacugcaucagacccugcuucuggguggagcugaucagaggccagcccaaggagagcaccaucuggaccagcggcagcagcaucagcuucugcggcguggacagcgagaccgccagcuggagcuggcccgacggcgccgaccugcccuucaccaucgacaaguga

SEQ ID NO: 186357 - RNA, 1410 nt, Artificial Sequence; identical to SEQ ID NO: 176788
  derived and/or modified CDS sequence (opt4) from neuraminidase__InfluenzaA__EPI189183

SEQ ID NO: 186358 - RNA, 1410 nt, Artificial Sequence; identical to SEQ ID NO: 176788
  derived and/or modified CDS sequence (opt4) from neuraminidase__InfluenzaA__EPI180576

SEQ ID NO: 186359 - RNA, 1410 nt, Artificial Sequence
  derived and/or modified CDS sequence (opt4) from neuraminidase__InfluenzaA__EPI346918
augaacaccaaccagagaaucaucaccaucggcaccgugugcaugaucgugggcaucaucagccugcugcugcagaucggcaacaucgugagccuguggaucagccacagcauccagaccggcugggagaaccacaccgagaugugcaaccagaacgugaucaccuacgugaacaacaccugggugaacagaaccuacgugaacgugagcaacaccaacaucgccaccauccaggacgugaccagcaucgugcuggccggcaacagcagccugugccccgugagcggcugggccaucuacagcaaggacaacagcaucagaaucggcagcaagggcgacaucuucgugaucagagagcccuucaucagcugcagccagcuggagugcagaaccuucuuccugacccagggcgcccugcugaacgacaagcacagcaacggcaccgugaaggacagaagccccuacagaacccugaugagcugccccaucggcgaggcccccagccccuacaacagcagauucgagagcguggccuggagcgccagcgccugccacgacggcaugggcuggcugaccaucggcaucagcggccccgacaacggcgccguggccgugcugaaguacaacggcaucaucaccgacaccaucaagagcuggagaaacaagauccugagaacccaggagagcgagugcgugugcaugaacggcagcugcuucaccgugcugaccgacggccccagcaacggccaggccagcuacaagaucuucaagguggagaagggcagaaucaucaagagcaucgagcuggacgcccccaacuaccacuacgaggagugcagcugcuaccccgacaccggcaaggugaugugcgugugcagagacaacuggcacgccagcaacagacccugggugagcuucaaccagaaccuggacuaccagaucggcuacaucugcagcggcguguucggcgacaaccccagaagcaacgacggcaagggcaacugcggccccgugcugagcaacggcgccaacggcgugaagggcuucagcuacagauacggcaacggcguguggaucggcagaaccaagagcaucaacagcagaagaggcuucgagaucaucugggaccccaacggcuggaccgagaccgacagcagcuucagcaugaagcaggacaucaucgcccugaccgacuggagcggcuacagcggcagcuucgugcagcaccccgagcugaccggcaugaacugcaucagacccugcuucuggguggagcugaucagaggccagcccaaggagagcaccaucugggccagcggcagcagcaucagcuucugcggcgugaacagcgagaccgccagcuggagcuggcccgacggcgccgaccugcccuucaccaucgacaaguga

SEQ ID NO: 186360 - RNA, 1410 nt, Artificial Sequence; identical to SEQ ID NO: 177376
  derived and/or modified CDS sequence (opt4) from neuraminidase__InfluenzaA__EPI240976

SEQ ID NO: 186361 - RNA, 1410 nt, Artificial Sequence; identical to SEQ ID NO: 174155
  derived and/or modified CDS sequence (opt4) from neuraminidase__InfluenzaA__EPI3165

SEQ ID NO: 186362 - RNA, 1410 nt, Artificial Sequence; identical to SEQ ID NO: 186081
  derived and/or modified CDS sequence (opt4) from neuraminidase__InfluenzaA__EPI957

SEQ ID NO: 186363 - RNA, 1410 nt, Artificial Sequence; identical to SEQ ID NO: 182206
  derived and/or modified CDS sequence (opt4) from neuraminidase__InfluenzaA__EPI507593

SEQ ID NO: 186364 - RNA, 1410 nt, Artificial Sequence; identical to SEQ ID NO: 182206
  derived and/or modified CDS sequence (opt4) from neuraminidase__InfluenzaA__EPI461954

SEQ ID NO: 186365 - RNA, 1410 nt, Artificial Sequence; identical to SEQ ID NO: 182206
  derived and/or modified CDS sequence (opt4) from neuraminidase__InfluenzaA__EPI461954

SEQ ID NO: 186366 - RNA, 1410 nt, Artificial Sequence
  derived and/or modified CDS sequence (opt4) from neuraminidase__InfluenzaA__EPI668104
augaaccccaaccagaagaucaucaccaucggcagcgugagccugaccaucagcaccaucugcuucuucaugcagaucgccauccugaucaccaccgugacccugcacuucaagcaguacgaguucaacagcccccccaacaaccaggugaugcugugcgagcccaccaucaucgagagaaacaucaccgagaucguguaccugaccaacaccaccaucgagaaggagaucugccccaagcccgccgaguacagaaacuggagcaagccccagugcggcaucaccggcuucgcccccuucagcaaggacaacagcaucagacugagcgccggcggcgacaucugggugaccagagagcccuacgugagcugcgaccccgacaagugcuaccaguucgcccugggccagggcaccacccugaacaacgugcacagcaacaacaccgugagagacagaacccccuacagaacccugcugaugaacgagcugggcgugcccuucuaccugggcaccaagcaggugugcaucgccuggagcagcagcagcugccacgacggcaaggccuggcugcacgugugcaucaccggcgacgacaagaacgccaccgccagcuucaucuacaacggcagacugguggacagcguggugagcuggagcaaggacauccugagaacccaggagagcgagugcgugugcaucaacggcaccugcaccguggugaugaccgacggcaacgccagcggcaaggccgacaccaagauccuguucaucgaggagggcaagaucgugcacaccagcaagcugagcggcagcgcccagcacguggaggagugcagcugcuaccccagauaccccggcgugagaugcgugugcagagacaacuggaagggcagcaacagacccaucguggacaucaacaucaaggaccacagcaucgugagcagcuacgugugcagcggccuggugggcgacacccccagaaagaacgacagcagcagcagcagccacugccuggaccccaacaacgaggagggcggccacggcgugaagggcugggccuucgacgacggcaacgacguguggaugggcagaaccaucaacgagaccagcagacugggcuacgagaccuucaaggugguggagggcuggagcaaccccaagagcaagcugcagaucaacagacaggugaucguggacagaggcgacagaagcggcuacagcggcaucuucagcguggagggcaagagcugcaucaacagaugcuucuacguggagcugaucagaggcagaaaggaggagaccgaggugcuguggaccagcaacagcaucgugguguucugcggcaccagcggcaccuacggcaccggcagcuggcccgacggcgccgaccugaaccugaugcccaucuga

SEQ ID NO: 186367 - RNA, 1410 nt, Artificial Sequence
  derived and/or modified CDS sequence (opt4) from neuraminidase__InfluenzaA__EPI578445
augaaccccaaccagaagaucaucaccaucggcagcgugagccugaccaucagcaccaucugcuucuucaugcagaucgccauccugaucaccaccgugacccugcacuucaagcaguacgaguucaacagcccccccaacaaccaggugaugcugugcgagcccaccaucaucgagagaaacaucaccgagaucguguaccugaccaacaccaccaucgagaaggagaucugccccaagcccgccgaguacagaaacuggagcaagccccagugcggcaucaccggcuucgcccccuucagcaaggacaacagcaucagacugagcgccggcggcgacaucugggugaccagagagcccuacgugagcugcgaccccgacaagugcuaccaguucgcccugggccagggcaccacccugaacaacgugcacagcaacaacaccgugagagacagaacccccuacagaacccugcugaugaacgagcugggcgugcccuuccaccugggcaccaagcaggugugcaucgccuggagcagcagcagcugccacgacggcaaggccuggcugcacgugugcaucaccggcgacgacaagaacgccaccgccagcuucaucuacaacggcagacugguggacagcguggugagcuggagcaaggacauccugagaacccaggagagcgagugcgugugcaucaacggcaccugcaccguggugaugaccgacggcaacgccagcggcaaggccgacaccaagauccuguucaucgaggagggcaagaucgugcacaccagcaagcugagcggcagcgcccagcacguggaggagugcagcugcuaccccagauaccccggcgugagaugcgugugcagagacaacuggaagggcagcaacagacccaucguggacaucaacaucaaggaccacagcaucgugagcagcuacgugugcagcggccuggugggcgacacccccagaaagaacgacagcagcagcagcagccacugccuggaccccaacaacgaggagggcggccacggcgugaagggcugggccuucgacgacggcaacgacguguggaugggcagaaccaucaacgagaccagcagacugggcuacgagaccuucaaggugguggagggcuggagcaaccccaagagcaagcugcagaucaacagacaggugaucguggacagaggcgacagaagcggcuacagcggcaucuucagcguggagggcaagagcugcaucaacagaugcuucuacguggagcugaucagaggcagaaaggaggagaccgaggugcuguggaccagcaacagcaucgugguguucugcggcaccagcggcaccuacggcaccggcagcuggcccgacggcgccgaccugaaccugaugcccaucuga

SEQ ID NO: 186368 - RNA, 1410 nt, Artificial Sequence; identical to SEQ ID NO: 186367
  derived and/or modified CDS sequence (opt4) from neuraminidase__InfluenzaA__EPI551883

SEQ ID NO: 186369 - RNA, 1410 nt, Artificial Sequence
  derived and/or modified CDS sequence (opt4) from neuraminidase__InfluenzaA__EPI344388
augaaccccaaccagaagaucaucaccaucggcagcgugagccugaucaucgccaccaucugcuuccugaugcagaucgccauccuggugaccaccgugacccugcacuucaagcagcacgacuacaacagcccccccaacaaccaggccaugcugugcgagcccaccaucaucgagagaaacaccaccgagaucguguaccugaccaacaccaccaucgagaaggagaucugccccaagcuggccgaguacagaaacuggagcaagccccagugcaacaucaccggcuucgcccccuucagcaaggacaacagcaucagacugagcgccggcggcgacaucugggugaccagagagcccuacgugagcugcgaccccgacaagugcuaccaguucgcccugggccagggcaccacccugaacaacggccacagcaacaacaccgugcacgacagaacccccuacagaacccugcugaugaacgagcugggcgugcccuuccaccugggcaccagacaggugugcauggccuggagcagcagcagcugccacgacggcaaggccuggcugcacgugugcaucaccggcaacgacaacaacgccaccgccagcuucaucuacaacggcagacugguggacagcaucggcagcuggagcaagaacauccugagaacccaggagagcgagugcgugugcaucaacggcaccugcaccguggugaugaccgacggcagcgccagcggcaaggccgacaccaagauccuguucguggaggagggcaagaucgugcacaucagcacccugagcggcagcgcccagcacguggaggagugcagcugcuaccccagauuccccggcgugagaugcgugugcagagacaacuggaagggcagcaacagacccaucguggacaucaacgugaagaacuacagcaucgugagcagcuacgugugcagcggccuggugggcgacacccccagaaagagcgacagcgugagcagcagcuacugccuggaccccaacaacgagaagggcggccacggcgugaagggcugggccuucgacgacggcaacgacguguggaugggcagaaccaucaacgagacccugagacugggcuacgagaccuucaaggugaucgagggcuggagcaaggccaacagcaagcugcagaccaacagacaggugaucguggagaagggcgacagaagcggcuacagcggcaucuucagcguggagggcaagagcugcaucaacagaugcuucuacguggagcugaucagaggcagaaaggaggagaccaaggugugguggaccagcaacagcaucgugguguucugcggcaccagcggcaccuacggcaccggcagcuggcccgacggcgccgacaucaaccugaugcccaucuga

SEQ ID NO: 186370 - RNA, 1410 nt, Artificial Sequence; identical to SEQ ID NO: 186369
  derived and/or modified CDS sequence (opt4) from neuraminidase__InfluenzaA__EPI347601

SEQ ID NO: 186371 - RNA, 1410 nt, Artificial Sequence
  derived and/or modified CDS sequence (opt4) from neuraminidase__InfluenzaA__EPI642512
augaaccccaaccagaagaucaucaccaucggcagcaucagccugaucaucgccaccaucugcuuccugaugcagaucgccauccuggugaucaccgugacccugcacuucaagcagcacaacugcgacagcagccccaacaaccaggugauguucugcgagcccaccaucaucgagagaaacaagaccgagaucguguaccugaucaacaccaccguggagaaggagaucugccccaagcccaccgaguacagaaacuggagcaagccccagugcaacaucaccggcuucgcccccuucagcaaggacaacagcaucagacugagcgccggcggcgacaucugggugaccagagagcccuacgugagcugcgaccccgacaagugcuaccaguucgcccugggccagggcaccacccugaacaacggccacagcaacgacaccgugcacgacagaacccccuacagaacccugcugaugaacgagcugggcgugcccuuccaccugggcaccagacaggugugcaucgccuggagcagcagcagcugccacgacggcaaggccuggcugcacgugugcaucaccggcgacgacggcaacgccaccgccagcuucaucuacaacggcagacugguggacagcaucggcagcuggagcaagaacauccugagaacccaggagagcgagugcgugugcaucaacggcaccugcaccguggugaugaccgacggcagcgccagcggcaaggccgacaccaagauccuguucaucgaggagggcaagaucauccacaucagcacccugagcggcagcgcccagcacguggaggagugcagcugcuaccccagauaccccggcgugagaugcgugugcagagacaacuggaagggcagcaacagacccaucguggacaucaacgugaaggacuacagcaucgugagcagcuacgugugcagcggccuggugggcgacacccccagaaagaacgacagcuucagcagcagccacugccuggaccccaacaacgaggagggcggccacggcgugaagggcugggccuucgacgacggcaacgacguguggaugggcagaaccaucagcgagaagagcagacugggcuacgagaccuucaagguggugaagggcuggagcgagcccaacagcaagcugcagaccaacagacaggugaucgugggcagaggcaacagaagcggcuacagcggcaucuucagcaucgagggcaagaacugcaucaacagaugcuucuacguggagcugaucagaggcagaaaggaggagaccaaggugugguggaccagcaacagcaucgugguguucugcggcaccagcggcaccuacggcaccggcagcuggcccgacggcgccgacaucaaccugaugcccaucuga

SEQ ID NO: 186372 - RNA, 1410 nt, Artificial Sequence
  derived and/or modified CDS sequence (opt4) from neuraminidase__InfluenzaA__AIE52540
augaaccccaaccagaagaucaucaccaucggcagcgugagccugaucaucgccaccaucugcuuccugaugcagaucgccauccuggugaccaccgugacccugcacuucaagcagcacgacuacaacagcccccccaacaaccaggugaugcugugcgagcccaccaucaucgagagaaacaccaccgagaucguguaccugaccaacaucaccaucgagaaggagaucugccccaagcuggccgaguacagaaacuggagcaagccccagugcaacaucaccggcuucgcccccuucagcaaggacaacagcaucagacugagcgccggcggcgacaucugggugaccagagagcccuacgugagcugcgaccccgacaagugcuaccaguucgcccugggccagggcaccacccugaacaacagacacagcaacaacaccgugcacgacagaagccccuacagaacccugcugaugaacgagcugggcgugcccuuccaccugggcaccagacaggugugcaucgccuggagcagcagcagcugccacgacggcaaggccuggcugcacgugugcaucaccggcgacgacaacaacgccaccgccagcuucaucuacaacggcagacugguggacagcaucggcagcuggagcaagaacauccugagaacccaggagagcgagugcgugugcaucaacggcaccugcaccguggugaugaccgacggcagcgccagcggcaaggccgacaccaagauccuguucaucgaggagggcaagaucgugcacaucagcacccugagcggcagcgcccagcacguggaggagugcagcugcuaccccagauaccccggcgugagaugcgugugcagagacaacuggaagggcagcaacagacccaucguggacaucaacaugaaggacuacagcaucgccagcagcuacgugugcagcggccuggugggcgacacccccagaaagaacgacagcuucagcagcagccacugccuggaccccaacaacgagaagggcggccacggcgugaagggcugggccuucgacgacggcaacgacguguggaugggcagaaccaucagcgaggaguucagacugggcuacgagaccuucaaggugaucaagggcuggagcaaccccaacagcaagcugcagaccaacagacaggugaucguggagaagggcaacagaagcggcuacagcggcguguucagcaucgaggacaagagcugcaucaacagaugcuucuacguggagcugaucagaggcagaaaggaggagaccaaggugugguggaccagcaacagcaucgugguguucugcggcaccagcggcaccuacggcaccggcagcuggcccgacggcgccgacaucaaccugaugcccaucuga

SEQ ID NO: 186373 - RNA, 1410 nt, Artificial Sequence; identical to SEQ ID NO: 186372
  derived and/or modified CDS sequence (opt4) from neuraminidase__InfluenzaA__EPI465399

SEQ ID NO: 186374 - RNA, 1410 nt, Artificial Sequence; identical to SEQ ID NO: 186372
  derived and/or modified CDS sequence (opt4) from neuraminidase__InfluenzaA__EPI328899

SEQ ID NO: 186375 - RNA, 1410 nt, Artificial Sequence; identical to SEQ ID NO: 186372
  derived and/or modified CDS sequence (opt4) from neuraminidase__InfluenzaA__EPI328901

SEQ ID NO: 186376 - RNA, 1410 nt, Artificial Sequence
  derived and/or modified CDS sequence (opt4) from neuraminidase__InfluenzaA__EPI574645
augaaccccaaccagaagaucaucaccaucggcagcgugagccugaccaucagcaccaucugcuucuucaugcagaucgccauccugaucaccaccgugacccugcacuucaagcaguacgaguucaacagcccccccaacaaccagguggugcugugcgagcccaccaucaucgagagaaacaucaccgagaucguguaccugaccaacaccaccaucgagaaggagaucugccccaagcccgccgaguacagaaacuggagcaagccccagugcggcaucaccggcuucgcccccuucagcaaggacaacagcaucagacugagcgccggcggcgacaucugggugaccagagagcccuacgugagcugcgaccccgacaagugcuaccaguucgcccugggccagggcaccacccugaacaacggccacagcaacaacaccgugagagacagaacccccuacagaacccugcugaugaacgagcugggcgugcccuuccaccugggcaccaagcaggugugcaucgccuggagcagcagcagcugccacgacggcaaggccuggcugcacgugugcaucaccggcgacgacaagaacgccaccgccagcuucaucuacaacggcagacugguggacagcguggugagcuggagcaaggacauccugagaacccaggagagcgagugcgugugcaucaacggcaccugcaccguggugaugaccgacggcagcgccagcggcaaggccgacaccaagauccuguucaucgaggagggcaagaucauccacaccagcacccugagcggcagcgcccagcacguggaggagugcagcugcuaccccagauaccccggcgugagaugcgugugcagagacaacuggaagggcagcaacagacccaucguggacaucaacaucaaggaccacagcaucgugagcagcuacgugugcagcggccuggugggcgacacccccagaaagaacgacagcagcagcagcagccacugccuggaccccaacaacgaggagggcggccacggcgugaagggcugggccuucgacgacggcaacgacguguggaugggcagaaccaucaacgagaccagcagacugggcuacgagaccuucaaggugaucgagggcuggagcaaccccaagagcaagcugcagaucaacagacaggugaucguggacagaggcgacagaagcggcuacagcggcaucuucagcguggagggcaagagcugcaucaacagaugcuucuacguggagcugaucagaggcagaaaggaggagaacgaggugcuguggaccagcaacagcaucgugguguucugcggcaccagcggcaccuacggcaccggcagcuggcccgacggcgccgaccugaaccugaugcccaucuga

SEQ ID NO: 186377 - RNA, 1410 nt, Artificial Sequence
  derived and/or modified CDS sequence (opt4) from neuraminidase__InfluenzaA__EPI563214
augaaccccaaccagaagaucaucaccaucggcagcgugagccugaccaucagcaccaucugcuucuucaugcagaucgccauccugaucaccaccgugacccugcacuucaagcaguacgaguucaacagcccccccaacaaccaggugaugcugugcgagcccaccaucaucgagagaaacaucaccgagaucguguaccugaccaacaccaccaucgagaaggagaucugccccaagcccgccgaguacagaaacuggagcaagccccagugcagcaucaccggcuucgcccccuucagcaaggacaacagcaucagacugagcgccggcggcgacaucugggugaccagagagcccuacgugagcugcgaccccgacaagugcuaccaguucgcccugggccagggcaccacccugaacaacgugcacagcaacaacaccgugagagacagaacccccuacagaacccugcugaugaacgagcugggcgugcccuuccaccugggcaccaagcaggugugcaucgccuggagcagcagcagcugccacgacggcaaggccuggcugcacgugugcaucaccggcgacgacaagaacgccaccgccagcuucaucuacaacggcagacugguggacagcguggugagcuggagcaaggacauccugagaacccaggagagcgagugcgugugcaucaacggcaccugcaccguggugaugaccgacggcagcgccagcggcaaggccgacaccaagauccuguucaucgaggagggcaagaucguguacaccagcaagcugagcggcagcgcccagcacguggaggagugcagcugcuaccccagauaccccggcgugagaugcgugugcagagacaacuggaagggcagcaacagacccaucguggacaucaacaucaaggaccacagcaucgugagcagcuacgugugcagcggccuggugggcgacacccccagaaagaacgacagcagcagcagcagccacugccuggaccccaacaacgaggagggcggccacggcgugaagggcugggccuucgacgacggcaacgacguguggaugggcagaaccaucaacgagaccagcagacugggcuacgagaccuucaaggugguggagggcuggagcaaccccaagagcaagcugcagaucaacagacaggugaucguggacagaggcgacagaagcggcuacagcggcaucuucagcguggagggcaagagcugcaucaacagaugcuucuacguggagcugaucagaggcagaaaggaggagaccgaggugcuguggaccagcaacagcaucgugguguucugcggcaccagcggcaccuacggcaccggcagcuggcccgacggcgccgaccugaaccugaugcccaucuga

SEQ ID NO: 186378 - RNA, 1410 nt, Artificial Sequence; identical to SEQ ID NO: 186377
  derived and/or modified CDS sequence (opt4) from neuraminidase__InfluenzaA__EPI553998

SEQ ID NO: 186379 - RNA, 1410 nt, Artificial Sequence
  derived and/or modified CDS sequence (opt4) from neuraminidase__InfluenzaA__EPI551568
augaaccccaaccagaagaucaucaccaucggcagcgugagccugaccaucagcaccaucugcuucuucaugcagaucgccauccugaucaccaccgugacccugcacuucaagcaguacgaguucaacagcccccccaacaaccaggugaugcugugcgagcccaccaucaucgagagaaacaucaccgagaucguguaccugaccaacaccaccaucgagaaggagaucugccccaagcccgccgaguacagaaacuggagcaagccccagugcagcaucaccggcuucgcccccuucagcaaggacaacagcaucagacugagcgccggcggcgacaucugggugaccagagagcccuacgugagcugcgaccccgacaagugcuaccaguucgcccugggccagggcaccacccugaacaacgugcacagcaacaacaucgugagagacagaacccccuacagaacccugcugaugaacgagcugggcgugcccuuccaccugggcaccaagcaggugugcaucgccuggagcagcagcagcugccacgacggcaaggccuggcugcacgugugcaucaccggcgacgacaagaacgccaccgccagcuucaucuacaacggcagacugguggacagcguggugagcuggagcaaggacauccugagaacccaggagagcgagugcgugugcaucaacggcaccugcaccguggugaugaccgacggcagcgccagcggcaaggccgacaccaagauccuguucaucgaggagggcaagaucguguacaccagcaagcugagcggcagcgcccagcacguggaggagugcagcugcuaccccagauaccccggcgugagaugcgugugcagagacaacuggaagggcagcaacagacccaucguggacaucaacaucaaggaccacagcaucgugagcagcuacgugugcagcggccuggugggcgacacccccagaaagaacgacagcagcagcagcagccacugccuggaccccaacaacgaggagggcggccacggcgugaagggcugggccuucgacgacggcaacgacguguggaugggcagaaccaucaacgagaccagcagacugggcuacgagaccuucaaggugguggagggcuggagcaaccccaagagcaagcugcagaucaacagacaggugaucguggacagaggcgacagaagcggcuacagcggcaucuucagcguggagggcaagagcugcaucaacagaugcuucuacguggagcugaucagaggcagaaaggaggagaccgaggugcuguggaccagcaacagcaucgugguguucugcggcaccagcggcaccuacggcaccggcagcuggcccgacggcgccgaccugaaccugaugcccaucuga

SEQ ID NO: 186380 - RNA, 1410 nt, Artificial Sequence
  derived and/or modified CDS sequence (opt4) from neuraminidase__InfluenzaA__EPI629737
augaaccccaaccagaagaucaucgccaucggcagcgugagccugaccaucagcaccaucugcuucuucaugcagaucgccauccugaucaccaccgugacccugcacuucaagcaguacgaguucaacagcccccccaacaaccaggugaugcugugcgagcccaccaucaucgagagaaacaucaccgagaucguguaccugaccaacaccaccaucgagaaggagaucugccccaagcccgccgaguacagaaacuggagcaagccccagugcagcaucaccggcuucgcccccuucagcaaggacaacagcaucagacugagcgccggcggcgacaucugggugaccagagagcccuacgugagcugcgaccccgacaagugcuaccaguucgcccugggccagggcaccacccugaacaacgugcacagcaacaacaccgugagagacagaacccccuacagaacccugcugaugaacgagcugggcgugcccuuccaccugggcaccaagcaggugugcaucgccuggagcagcagcagcugccacgacggcaaggccuggcugcacgugugcaucaccggcgacgacaagaacgccaccgccagcuucaucuacaacggcagacugguggacagcguggugagcuggagcaaggacauccugagaacccaggagagcgagugcgugugcaucaacggcaccugcaccguggugaugaccgacggcagcgccagcggcaaggccgacaccaagauccuguucaucgaggagggcaagaucguguacaccagcaagcugagcggcagcgcccagcacguggaggagugcagcugcuaccccagauaccccggcgugagaugcgugugcagagacaacuggaagggcagcaacagacccaucguggacaucaacaucaaggaccacagcaucgugagcagcuacgugugcagcggccuggugggcgacacccccagaaagaacgacagcagcagcagcagccacugccuggaccccaacaacgaggagggcggccacggcgugaagggcugggccuucgacgacggcaacgacguguggaugggcagaaccaucaacgagaccagcagacugggcuacgagaccuucaaggugguggagggcuggagcaaccccaagagcaagcugcagaucaacagacaggugaucguggacagaggcgacagaagcggcuacagcggcaucuucagcguggagggcaagagcugcaucaacagaugcuucuacguggagcugaucagaggcagaaaggaggagaccgaggugcuguggaccagcaacagcaucgugguguucugcggcaccagcggcaccuacggcaccggcagcuggcccgacggcgccgaccugaaccugaugcccaucuga

SEQ ID NO: 186381 - RNA, 1410 nt, Artificial Sequence; identical to SEQ ID NO: 186377
  derived and/or modified CDS sequence (opt4) from neuraminidase__InfluenzaA__EPI631886

SEQ ID NO: 186382 - RNA, 1410 nt, Artificial Sequence; identical to SEQ ID NO: 186377
  derived and/or modified CDS sequence (opt4) from neuraminidase__InfluenzaA__EPI577025

SEQ ID NO: 186383 - RNA, 1410 nt, Artificial Sequence; identical to SEQ ID NO: 183931
  derived and/or modified CDS sequence (opt4) from neuraminidase__InfluenzaA__EPI404926

SEQ ID NO: 186384 - RNA, 1410 nt, Artificial Sequence; identical to SEQ ID NO: 183931
  derived and/or modified CDS sequence (opt4) from neuraminidase__InfluenzaA__EPI492687

SEQ ID NO: 186385 - RNA, 1410 nt, Artificial Sequence
  derived and/or modified CDS sequence (opt4) from neuraminidase__InfluenzaA__EPI530648
augaaccccaaccagaagaucaucaccaucggcagcgugagccugaccaucagcaccaucugcuucuucaugcagaucgccauccugaucaccaccgugacccugcacuucaagcaguacgaguucaacagcccccccaacaaccaggugaugcugugcgagcccaccaucaucgagagaaacaucaccgagaucguguaccugaccaacaccaccaucgagaaggagaucugccccaagcccgccgaguacagaaacuggagcaagccccagugcggcaucaccggcuucgcccccuucagcaaggacaacagcaucagacugagcgccggcggcgacaucugggugaccagagagcccuacgugagcugcgaccccgacaagugcuaccaguucgcccugggccagggcaccacccugaacaacgugcacagcaacaacaccgugagagacagaacccccuacagaacccugcugaugaacgagcugggcgugcccuuccaccugggcaccaagcaggugugcaucgccuggagcagcagcagcugccacgacggcaaggccuggcugcacgugugcaucaccggcgacgacaagaacgccaccgccagcuucaucuacaacggcagacugguggacagcguggugagcuggagcaaggacauccugagaacccaggagagcgagugcgugugcaucaacggcaccugcaccguggugaugaccgacggcagcgccagcggcaaggccgacaccaagauccuguucaucgaggagggcaagaucgugcacaccagcacccugagcggcagcgcccagcacguggaggagugcagcugcuaccccagauaccccggcgugagaugcgugugcagagacaacuggaagggcagcaacagacccaucguggacaucaacaucaaggaccacagcaucgugagcagcuacgugugcagcggccuggugggcgacacccccagaaagaacgacagcagcagcagcagccacugccuggaccccaacaacgaggagggcggccacggcgugaagggcugggccuucgacgacggcaacgacguguggaugggcagaaccaucaacgagaccagcagacugggcuacgagaccuucaaggugaucgagggcuggagcaaccccaagagcaagcugcagaccaacagacaggugaucguggacagaggcgacagaagcggcuacagcggcaucuucagcguggagggcaagagcugcaucaacagaugcuucuacguggagcugaucagaggcagaaaggaggagaccgaggugcuguggaccagcaacagcaucgugguguucugcggcaccagcggcaccuacggcaccggcagcuggcccgacggcgccgaccugaaccugaugcccaucuga

SEQ ID NO: 186386 - RNA, 1410 nt, Artificial Sequence; identical to SEQ ID NO: 186367
  derived and/or modified CDS sequence (opt4) from neuraminidase__InfluenzaA__EPI684314

SEQ ID NO: 186387 - RNA, 1410 nt, Artificial Sequence
  derived and/or modified CDS sequence (opt4) from neuraminidase__InfluenzaA__EPI614459
augaaccccaaccagaagaucaucaccaucggcagcgugagccugaccaucagcaccaucugcuucuucaugcagaucgccauccugaucaccaccgugacccugcacuucaagcaguacaaguucaacagcccccccaacaaccaggugaugcugugcgagcccaccaucaucgagagaaacaucaccgagaucguguaccugaccaacaccaccaucgagaaggagaucugccccaagcccgccgaguacagaaacuggagcaagccccagugcggcaucaccggcuucgcccccuucagcaaggacaacagcaucagacugagcgccggcggcgacaucugggugaccagagagcccuacgugagcugcgaccccgacaagugcuaccaguucgcccugggccagggcaccacccugaacaacgugcacagcaacaacaccgugagagacagaacccccuacagaacccugcugaugaacgagcugggcgugcccuuccaccugggcaccaagcaggugugcaucgccuggagcagcagcagcugccacgacggcaaggccuggcugcacgugugcaucaccggcgacgacaagaacgccaccgccagcuucaucuacaacggcagacugguggacagcguggugagcuggagcaaggacauccugagaacccaggagagcgagugcgugugcaucaacggcaccugcaccguggugaugaccgacggcagcgccagcggcaaggccgacaccaagauccuguucaucgaggagggcaagaucgugcacaccagcacccugagcggcagcgcccagcacguggaggagugcagcugcuaccccagauaccccggcgugagaugcgugugcagagacaacuggaagggcagcaacagacccaucguggacaucaacaucaaggaccacagcaucgugagcagcuacgugugcagcggccuggugggcgacacccccagaaagaacgacagcagcagcagcagccacugccuggaccccaacaacgaggagggcggccacggcgugaagggcugggccuucgacgacggcaacgacguguggaugggcagaaccaucaacgagaccagcagacugggcuacgagaccuucaaggugaucgagggcuggagcaaccccaagagcaagcugcagaccaacagacaggugaucguggacagaggcgacagaagcggcuacagcggcaucuucagcguggagggcaagagcugcaucaacagaugcuucuacguggagcugaucagaggcagaaaggaggagaccgaggugcuguggaccagcaacagcaucgugguguucugcggcaccagcggcaccuacggcaccggcagcuggcccgacggcgccgaccugaaccugaugcccaucuga

SEQ ID NO: 186388 - RNA, 1410 nt, Artificial Sequence; identical to SEQ ID NO: 186387
  derived and/or modified CDS sequence (opt4) from neuraminidase__InfluenzaA__EPI541466

SEQ ID NO: 186389 - RNA, 1410 nt, Artificial Sequence; identical to SEQ ID NO: 186387
  derived and/or modified CDS sequence (opt4) from neuraminidase__InfluenzaA__EPI696968

SEQ ID NO: 186390 - RNA, 1410 nt, Artificial Sequence; identical to SEQ ID NO: 186387
  derived and/or modified CDS sequence (opt4) from neuraminidase__InfluenzaA__EPI674598

SEQ ID NO: 186391 - RNA, 1410 nt, Artificial Sequence; identical to SEQ ID NO: 186385
  derived and/or modified CDS sequence (opt4) from neuraminidase__InfluenzaA__EPI530678

SEQ ID NO: 186392 - RNA, 1410 nt, Artificial Sequence
  derived and/or modified CDS sequence (opt4) from neuraminidase__InfluenzaA__EPI530680
augaaccccaaccagaagaucaucaccaucggcagcgugagccugaccaucagcaccaucugcuucuucaugcagaucgccauccugaucaccaccgugacccugcacuucaagcaguacgaguucaacagcccccccaacaaccaggugaugcugugcgagcccaccaucaucgagagaaacaucaccgagaucguguaccugaccaacaccaccaucgagaaggagaucugccccaagcccgccgaguacagaaacuggagcaagccccagugcggcaucaccggcuucgcccccuucagcaaggacaacagcaucagacugagcgccggcggcgacaucugggugaccagagagcccuacgugagcugcgaccccgacaagugcuaccaguucgcccugggccagggcaccacccugaacaacgugcacagcaacaacaccgugagagacagaacccccuacagaacccugcugaugaacgagcugggcgugcccuuccaccugggcaccaagcaggugugcaucgccuggagcagcagcagcugccacgacggcaaggccuggcugcacgugugcaucaccggcgacgacaagaacgccaccgccagcuucaucuacaacggcagacugguggacagcguggugagcuggagcaaggacauccugagaacccaggagagcgagugcgugugcaucaacggcaccugcaccguggugaugaccgacggcagcgccagcggcaaggccgacaccaagauccuguucaucgaggagggcaagaucgugcacaccagcacccugagcggcagcgcccagcacguggaggagugcagcugcuaccccagauaccccggcgugagaugcgugugcagagacaacuggaagggcagcaacagacccaucguggacaucaacaucaaggaccacagcaucgugagcagcuacgugugcagcggccuggugggcgacacccccagaaagaacgacagcagcagcagcagccacugccuggaccccaacaacgaggagggcggccacggcgugaagggcugggccuucgacgacggcaacggcguguggaugggcagaaccaucaacgagaccagcagacugggcuacgagaccuucaaggugaucgagggcuggagcaaccccaagagcaagcugcagaccaacagacaggugaucguggacagaggcgacagaagcggcuacagcggcaucuucagcguggagggcaagagcugcaucaacagaugcuucuacguggagcugaucagaggcagaaaggaggagaccgaggugcuguggaccagcaacagcaucgugguguucugcggcaccagcggcaccuacggcaccggcagcuggcccgacggcgccgaccugaaccugaugcccaucuga

SEQ ID NO: 186393 - RNA, 1410 nt, Artificial Sequence; identical to SEQ ID NO: 174098
  derived and/or modified CDS sequence (opt4) from neuraminidase__InfluenzaA__EPI7603

SEQ ID NO: 186394 - RNA, 1410 nt, Artificial Sequence; identical to SEQ ID NO: 186385
  derived and/or modified CDS sequence (opt4) from neuraminidase__InfluenzaA__EPI814527

SEQ ID NO: 186395 - RNA, 1410 nt, Artificial Sequence; identical to SEQ ID NO: 186385
  derived and/or modified CDS sequence (opt4) from neuraminidase__InfluenzaA__EPI674737

SEQ ID NO: 186396 - RNA, 1410 nt, Artificial Sequence; identical to SEQ ID NO: 186385
  derived and/or modified CDS sequence (opt4) from neuraminidase__InfluenzaA__EPI614443

SEQ ID NO: 186397 - RNA, 1410 nt, Artificial Sequence; identical to SEQ ID NO: 186385
  derived and/or modified CDS sequence (opt4) from neuraminidase__InfluenzaA__EPI551812

SEQ ID NO: 186398 - RNA, 1410 nt, Artificial Sequence; identical to SEQ ID NO: 186385
  derived and/or modified CDS sequence (opt4) from neuraminidase__InfluenzaA__EPI696961

SEQ ID NO: 186399 - RNA, 1410 nt, Artificial Sequence; identical to SEQ ID NO: 186385
  derived and/or modified CDS sequence (opt4) from neuraminidase__InfluenzaA__EPI740789

SEQ ID NO: 186400 - RNA, 1410 nt, Artificial Sequence
  derived and/or modified CDS sequence (opt4) from neuraminidase__InfluenzaA__EPI377498
augaaccccaaccagaagaucaucaccaucggcagcgugagccugaccaucagcaccaucugcuucuucaugcagaucgccauccugaucaccaccgugacccugcacuucaagcaguacgaguucaacagcccccccaacaaccaggugaugcugugcgagcccaccaucaucgagagaaacaucaccgagaucguguaccugaccaacaccaccaucgagaaggagaucugccccaagcccgccgaguacagaaacuggagcaagccccagugcggcaucaccggcuucgcccccuucagcaaggacaacagcaucagacugagcgccggcggcgacaucugggugaccagagagcccuacgugagcugcgaccccgacaagugcuaccaguucgcccugggccagggcaccacccugaacaacgugcacagcaacaacaccgugcacgacagaacccccuacagaacccugcugaugaacgagcugggcgugcccuuccaccugggcaccaagcaggugugcaucgccuggagcagcagcagcugccacgacggcaaggccuggcugcacgugugcaucaccggcgacgacaagaacgccaccgccagcuucaucuacaacggcagacugguggacagcguggugagcuggagcaaggagauccugagaacccaggagagcgagugcgugugcaucaacggcaccugcaccguggugaugaccgacggcagcgccagcggcaaggccgacaccaagauccuguucaucgaggagggcaagaucgugcacaccagcacccugagcggcagcgcccagcacguggaggagugcagcugcuaccccagauaccccggcgugagaugcgugugcagagacaacuggaagggcagcaacagacccaucguggacaucaacaucaaggaccacagcaucgugagcagcuacgugugcagcggccuggugggcgacacccccagaaagaacgacagcagcagcagcagccacugccuggaccccaacaacgaggagggcggccacggcgugaagggcugggccuucgacgacggcaacgacguguggaugggcagaaccaucaacgagaccagcagacugggcuacgagaccuucaaggugaucgagggcuggagcaaccccaagagcaagcugcagaucaacagacaggugaucguggacagaggcgacagaagcggcuacagcggcaucuucagcguggagggcaagagcugcaucaacagaugcuucuacguggagcugaucagaggcagaaaggaggagaccgaggugcuguggaccagcaacagcaucgugguguucugcggcaccagcggcaccuacggcaccggcagcuggcccgacggcgccgaccugaaccugaugcccaucuga

SEQ ID NO: 186401 - RNA, 1410 nt, Artificial Sequence; identical to SEQ ID NO: 186400
  derived and/or modified CDS sequence (opt4) from neuraminidase__InfluenzaA__EPI377498

SEQ ID NO: 186402 - RNA, 1410 nt, Artificial Sequence; identical to SEQ ID NO: 186400
  derived and/or modified CDS sequence (opt4) from neuraminidase__InfluenzaA__EPI391246

SEQ ID NO: 186403 - RNA, 1410 nt, Artificial Sequence; identical to SEQ ID NO: 186400
  derived and/or modified CDS sequence (opt4) from neuraminidase__InfluenzaA__EPI407122

SEQ ID NO: 186404 - RNA, 1410 nt, Artificial Sequence; identical to SEQ ID NO: 186400
  derived and/or modified CDS sequence (opt4) from neuraminidase__InfluenzaA__EPI407125

SEQ ID NO: 186405 - RNA, 1410 nt, Artificial Sequence; identical to SEQ ID NO: 186367
  derived and/or modified CDS sequence (opt4) from neuraminidase__InfluenzaA__EPI562038

SEQ ID NO: 186406 - RNA, 1410 nt, Artificial Sequence; identical to SEQ ID NO: 186367
  derived and/or modified CDS sequence (opt4) from neuraminidase__InfluenzaA__EPI562038

SEQ ID NO: 186407 - RNA, 1410 nt, Artificial Sequence; identical to SEQ ID NO: 182677
  derived and/or modified CDS sequence (opt4) from neuraminidase__InfluenzaA__EU716525

SEQ ID NO: 186408 - RNA, 1350 nt, Artificial Sequence
  derived and/or modified CDS sequence (opt4) from neuraminidase__InfluenzaA__EPI232422
augaaccccaaccagaagaucaucaccaucggcagcaucugcauggugaucggcaucgugagccugaugcugcagaucggcaacaugaucagcaucugggugagccacagcauccagaccggcaaccagagacaggccgagcccaucagcaacaccaaguuccugaccgagaaggccguggccagcgugacccuggccggcaacagcagccugugccccaucagcggcugggccguguacagcaaggacaacagcaucagaaucggcagcagaggcgacguguucgugaucagagagcccuucaucagcugcagccaccuggagugcagaaccuucuuccugacccagggcgcccugcugaacgacaagcacagcaacggcaccgugaaggacagaagcccccacagaacccugaugagcugccccgugggcgaggcccccagccccuacaacagcagauucgagagcguggccuggagcgccagcgccugccacgacggcaccagcuggcugaccaucggcaucagcggccccgacaacggcgccguggccgugcugaaguacaacggcaucaucaccgacaccaucaagagcuggagaaacaacauccugagaacccaggagagcgagugcgccugcgugaacggcagcugcuucaccgugaugaccgacggccccagcagcggccaggccagcuacaagaucuucaagauggagaagggcaagguggugaagagcguggagcuggacgcccccaacuaccacuacgaggagugcagcugcuaccccgacgccggcgagaucaccugcgugugcagagacaacuggcacggcagcaacagacccugggugagcuucaaccagaaccuggaguaccagaucggcuacaucugcagcggcguguucggcgacaaccccagacccaacgacggcaccggcagcugcggccccgugagccccaacggcgccuacggcgugaagggcuucagcuucaaguacggcaacggcguguggaucggcagaaccaagagcaccaacagcagaagcggcuucgagaugaucugggaccccaacggcuggaccggcaccgacagcagcuucagcgugaagcaggacaucguggccaucaccgacuggagcggcuacagcggcagcuucgugcagcaccccgagcugaccggccuggacugcaucagacccugcuucuggguggagcugaucagaggcagacccaaggagagcaccaucuggaccagcggcagcagcaucagcuucugcggcgugaacagcgacaccgugagcuggagcuggcccgacggcgccgagcugcccuucaccaucgacaaguga

SEQ ID NO: 186409 - RNA, 1350 nt, Artificial Sequence; identical to SEQ ID NO: 186244
  derived and/or modified CDS sequence (opt4) from neuraminidase__InfluenzaA__EPI227593

SEQ ID NO: 186410 - RNA, 1350 nt, Artificial Sequence
  derived and/or modified CDS sequence (opt4) from neuraminidase__InfluenzaA__EPI435658
augaaccccaaccagaagaucgugaccaucggcagcaucugcauggugaucggcaucaucagccugaugcugcagaucggcaacaucaucagcaucugggugagccacagcauccagaccggcaaccagcaccagaccgagcccaucagaaacaccaacuuccugaccgagaacgccguggccagcgugacccuggccggcaacagcagccugugccccaucagaggcugggccgugcacagcaaggacaacagcaucagaaucggcagcaagggcgacguguucgugaucagagagcccuucaucagcugcagccaccuggagugcagaaccuucuuccugacccagggcgcccugcugaacgacaagcacagcaacggcaccgugaaggacagaagcccccacagaacccugaugagcugccccaucggcgaggcccccagccccuacaacagcagauucgagagcguggccuggagcgccagcgccugccacgacggcaccagcuggcugaucaucggcaucagcggccccgacaacggcgccguggccgugcugaaguacaacggcaucaucaccgacaccaucaagagcuggagaaacaacauccugagaacccaggagagcgagugcgccugcgugaacggcagcugcuucaccgugaugaccgacggccccagcaacggccaggccagcuacaagaucuucaagaucgagaagggcaagguggugaagagcguggagcugaacgcccccaacuaccacuacgaggagugcagcugcuaccccgacgccggcgagaucaucugcgugugcagagacaacuggcacggcagcaacagacccugggugagcuucaaccagaaccuggaguaccagaucggcuacaucugcagcggcguguucggcgacaaccccagacccaacgacggcaccggcagcugcggccccgugagccccaacggcgccuacggcgugaagggcuucagcuucaaguacggcaacggcguguggaucggcagaaccaagagcacccacagcagaagcggcuucgagaugaucugggaccccaacggcuggaccggcaccgacagcgaguucagcaugaagcaggacaucguggccaucaccgacuggagcggcuacagcggcagcuucgugcagcaccccgagcugaccggccuggacugcaucagacccugcuucuggguggagcugaucagaggcagacccaaggagagcaccaucuggaccagcggcagcagcaucagcuucugcggcgugaacagcgacaccgugagcuggagcuggcccgacggcgccgagcugcccuucaccaucgacaaguga

SEQ ID NO: 186411 - RNA, 1350 nt, Artificial Sequence; identical to SEQ ID NO: 186410
  derived and/or modified CDS sequence (opt4) from neuraminidase__InfluenzaA__EPI492513

SEQ ID NO: 186412 - RNA, 1350 nt, Artificial Sequence; identical to SEQ ID NO: 179757
  derived and/or modified CDS sequence (opt4) from neuraminidase__InfluenzaA__EPI165066

SEQ ID NO: 186413 - RNA, 1350 nt, Artificial Sequence
  derived and/or modified CDS sequence (opt4) from neuraminidase__InfluenzaA__EPI531308
augaaccccaaccagaagaucaucaccaucggcagcaucugcauggugaccggcguggugagccugaugcugcaggugggcaacaugaucagcaucuggaucagccacagcauccacaccggcaaccagcaccaggccgagcccaucagcaacaccaacuuccacaccgagaaggccguggugagcgccaagcuggccggcaacagcagccugugccccaucaacggcugggccguguacagcaaggacaacagcaucagaaucggcagcaagggcgacguguucgugaucagagagcccuucaucagcugcagccaccuggagugcagaaccuucuuccugacccagggcgcccugcugaacgacaagcacagcaacggcaccgccaaggacagaagcccccacagaacccugaugagcugccccgugggcgaggcccccagccccuacaacagcagauucgagagcguggccuggagcgccagcgccugccacgacggcaccagcuggcugaccaucggcaucagcggccccgacaacggcgccguggccgugcugaaguacaacggcaucaucaccgacaccaucaagagcuggagaaacaacgugcugagaacccaggagagcgagugcgccugcgugaacggcuacugcuucaccgugaugaccgacggccccagcaacggccaggccagccacaagaucuucaagauggagaagggcaaggugaucaagagcguggagcuggacgcccccaacuaccacuacgaggagugcagcugcuaccccgacgccggcgagaucaccugcgugugcagagacaacuggcacggcagcaacagacccuggaucagcuucaaccagaaccuggaguaccagaucggcuacaucugcagcggcguguucggcgacaaccccagacccaacgacggcaagggcagcugcggccccgugagcagcaacggcgccuacggcgugaagggcuucagcuucaaguacggcaacggcguguggaucggcagaaccaagagcaccaacagcagaagcggcuucgagaugaucugggaccccaacggcuggaccgagaccgacagcagcuucagcgugaagcaggacaucguggccaucaccgacuggagcggcuacagcggcagcuucgugcagcaccccgagcugaccggccuggacugcaucagacccugcuucuggguggagcugaucagaggcagacccaaggagggcaccaucuggaccagcggcagcagcaucagcuucugcggcgugagcggcgacaccgugggcuggagcuggcccgacggcgccgagcugcccuucaccaucgacaaguga

SEQ ID NO: 186414 - RNA, 1350 nt, Artificial Sequence
  derived and/or modified CDS sequence (opt4) from neuraminidase__InfluenzaA__EPI433308
augaaccccaaccagaagaucaucaccaucggcagcaucugcauggugaucggcaucgugagccugaugcugcagaucggcaaccugaucagcaucugggugagccacagcauccagagaggcaaccugaaccagguggagcccaucagcaacaccagcuuccccaccgagaaggccguggccagcgugacccuggccggcaacagcagccugugccccaucagaggcugggccgugcacagcaaggacaacagcaucagaaucggcagcaagggcgacguguucgugaucagagagcccuucaucagcugcagccaccuggagugcagaaccuucuuccugacccagggcgcccugcugaacgacaagcacagcaacggcaccgugaaggacagaagcccccacagaacccugaugagcugccccgugggcgaggcccccagccccuacaacagcagauucgagagcguggccuggagcgccagcgccugccacgacggcaccagcuggcugaccaucggcaucagcggccccgacaacggcgccguggccguggugaaguacaacggcaucaucaccgacaccaucaagagcuggggcaacaacauccugagaacccaggagagcgagugcgccugcgugaacggcagcugcuucaccgugaugaccgacggccccagcaacggccaggccagcuacaagaucuucaagauggagaagggcaaggugaucaagagcguggagcuggacgcccccaacuaccacuacgaggagugcagcugcuaccccgacgccggcgagaucaccugcgugugcagagacaacuggcacggcagcaacagacccugggugagcuucaaccagaaccuggaguaccagaucggcuacaucugcagcggcguguucggcgacaaccccagacccaacgacggcaccggcagcugcggccccgugagccccaacggcgccuacggcgugaagggcuucagcuucaaguacggcaacggcguguggaucggcagaaccaagagccccaacagcagaagcggcuucgagaugaucugggaccccaacggcuggagcgagaccgacagcagcuucagcgugaagcaggacauccuggccgugaccgacuggagcggcuacagcggcagcuucgugcagcaccccgagcugaccggccuggacugcaucagacccugcuucuggguggagcugaucagaggcagacccgaggagagcaccaucuggaccagcggcagcagcaucagcuucugcggcgugaacagcgacaccgugagcuggagcuggcccgacggcgccgagcugcccuucaccaucgacaaguga

SEQ ID NO: 186415 - RNA, 1350 nt, Artificial Sequence
  derived and/or modified CDS sequence (opt4) from neuraminidase__InfluenzaA__EPI114974
augaaccccaaccagaagaucaucaccaucggcagcaucugcauggugaucggcaucgugagccugaugcugcagaucggcaacaugaucagcaucugggugagccacagcauccagaccggcaaccagagacaggccgagcccaucagcaacaccaaguuccugaccgagaaggccguggccagcgugacccuggccggcaacagcagccugugccccaucagcggcugggccguguacagcaaggacaacagcaucagaaucggcagcagaggcgacguguucgugaucagagagcccuucaucagcugcagccaccuggagugcagaaccuucuuccugacccagggcgcccugcugaacgacaagcacagcaacggcaccgugaaggacagaagcccccacagaacccugaugagcugccccgugggcgaggcccccagccccuacaacagcagauucgagagcguggccuggagcgccagcgccugccacgacggcaccagcuggcugaccaucggcaucagcggccccgacaacggcgccguggccgugcugaaguacaacggcaucaucaccgacaccaucaagagcuggagaaacaacauccugagaacccaggagagcgagugcgccugcgugaacggcagcugcuucaccgugaugaccgacggccccagcaacggccaggccagcuacaagaucuucaagauggagaagggcaagguggugaagagcaucgagcuggacgcccccaacuaccacuacgaggagugcagcugcuaccccgacgccggcgagaucaccugcgugugcagagacaacuggcacggcagcaacagacccugggugagcuucaaccagaaccuggaguaccagaucggcuacaucugcagcggcguguucggcgacaaccccagacccaacgacggcaccggcagcugcggccccgugagccccaacggcgccuacggcgugaagggcuucagcuucaaguacggcaacggcguguggaucggcagaaccaagagcaccaacagcagaagcggcuucgagaugaucugggaccccaacggcuggaccggcaccgacagcagcuucagcgugaagcaggacaucguggccaucaccgacuggagcggcuacagcggcagcuucgugcagcaccccgagcugaccggccuggacugcaucagacccugcuucuggguggagcugaucagaggcagacccaaggagagcaccaucuggaccagcggcagcagcaucagcuucugcggcgugaacagcgacaccgugagcuggagcuggcccgacggcgccgagcugcccuucaccaucgacaaguga

SEQ ID NO: 186416 - RNA, 1350 nt, Artificial Sequence
  derived and/or modified CDS sequence (opt4) from neuraminidase__InfluenzaA__EPI622495
augaaccccaaccagaagaucaccaccaucggcagcaucugcauggugaucggcaucgugagccugaugcugcagaucggcaacauggugagcaucugggugagccacagcauccagaccagaaaccagagacaggccgagcccaucagcaacaccagaagccugaccgagaaggccguggccagcgugacccuggccggcaacagcagccugugccccaucagcggcugggccguguacagcaaggacaacagcaucagaaucggcagcaagggcgacguguucgugaucagagagcccuucaucagcugcagccaccuggagugcagaaccuucuuccugacccagggcgcccugcugaacgacaagcacagcaacggcaccgugaaggacagaagcccccacagaacccugaugagcugccccgugggcgaggcccccagccccuacaacagcagauucgagagcguggccuggagcgccagcgccugccacgacggcaccagcuggcugaccaucggcaucagcggccccgacaacggcgccguggccguggugaaguacaacggcaucaucaccgacaccaucaagagcuggagaaacaacauccugagaacccaggagagcgagugcgugugcgugaacggcagcugcuucaccgugaugaccgacggccccagcaacaagcaggccagcuacaagaucuucaagauggagaagggcaagguggugaagagcaucgagcuggacgcccccaacuaccacuacgaggagugcagcugcuaccccgacgccggcgagaucaccugcgugugcagagacaacuggcacggcagcaacagacccuggcugagcuucaaccagaaccuggaguaccagaucggcuacaucugcagcggcguguucggcgacaaccccagacccaacgacggcaccggcagcugcggccccgugagcagcaacggcgccuacggcgugaagggcuucagcuucaaguacggcaacggcguguggaucggcagaaccaagagcaccaacagcagaagcggcuucgagaugaucugggaccccaacggcuggaccggcaccgacagcagcuucagcaugaagcaggacaucguggccaucaccgacuggagcggcuacagcggcagcuucgugcagcaccccgagcugaccggccuggacugcaucagacccugcuucuggguggagcuggugagaggcagacccaaggagggcaccaucuggaccagcggcagcagcaucagcuucugcggcgugaacagcgacaccgugagcuggagcuggcccgacggcgccgagcugcccuucaccaucgacaaguga

SEQ ID NO: 186417 - RNA, 1350 nt, Artificial Sequence
  derived and/or modified CDS sequence (opt4) from neuraminidase__InfluenzaA__EPI349847
augaaccccaaccagaagaucaccaccaucggcagcaucugcauggugaucggcaucgugagccugaugcugcagaucggcaacauggugagcaucugggugagccacagcauccagaccagaaaccagagacaggccgagcccaucagcaacaccagaagccugaccgagaaggccguggccagcgugacccuggccggcaacagcagccugugccccaucagcggcugggccguguacagcaaggacaacagcaucagaaucggcagcaagggcgacguguucgugaucagagagcccuucaucagcugcagccaccuggagugcagaaccuucuuccugacccagggcgcccugcugaacgacaagcacagcaacggcaccgugaaggacagaagcccccacagaacccugaugagcugccccgugggcgaggcccccagccccuacaacagcagauucgagagcguggccuggagcgccagcgccugccacgacggcaccagcuggcugaccaucggcaucagcggccccgacaacggcgccguggccguggugaaguacaacggcaucaucaccgacaccaucaagagcuggagaaacaacauccugagaacccaggagagcgagugcgugugcgugaacggcagcugcuucaccgugaugaccgacggccccagcaacaagcaggccagcuacaagaucuucaagauggagaagggcaagguggugaagagcaucgagcuggacgcccccaacuaccacuacgaggagugcagcugcuaccccgacgccggcgagaucaccugcgugugcagagacaacuggcacggcagcaacagacccuggcugagcuucaaccagaaccuggaguaccagaucggcuacaucugcagcggcguguucggcgacaaccccagacccaacgacggcaccggcagcugcggccccgugagccacaacggcgccuacggcgugaagggcuucagcuucaaguacggcaacggcguguggaucggcagaaccaagagcaccaacagcagaagcggcuucgagaugaucugggaccccaacggcuggaccggcaccgacagcagcuucagcaugaagcaggacaucguggccaucaccgacuggagcggcuacagcggcagcuucgugcagcaccccgagcugaccggccuggacugcaucagacccugcuucuggguggagcuggugagaggcagacccaaggagggcaccaucuggaccagcggcagcagcaucagcuucugcggcgugaacagcgacaccgugagcuggagcuggcccgacggcgccgagcugcccuucaccaucgacaaguga

SEQ ID NO: 186418 - RNA, 1350 nt, Artificial Sequence
  derived and/or modified CDS sequence (opt4) from neuraminidase__InfluenzaA__EPI174804
augaaccccaaccagaagaucaucaccaucggcagcaucugcauggugaucggcaucgugagccugaugcugcagaucggcaacauggugagcaucugggugagccacagcauccagaccagaaaccagagacaggccgagcccaucagcaacaccaagagccugaccgagaaggccguggccagcgugacccuggccggcaacagcagccugugccccaucagcggcugggccguguacagcaaggacaacagcaucagaaucggcagcaagggcgacguguucgugaucagagagcccuucaucagcugcagccaccuggagugcagaaccuucuuccugacccagggcgcccugcugaacgacaagcacagcaacggcaccaucaaggacagaagcccccacagaacccugaugagcugccccgugggcgaggcccccagccccuacaacagcagauucgagagcguggccuggagcgccagcgccugccacgacggcaccagcuggcugaccaucggcaucagcggccccgacaacggcgccguggccgugcugaaguacaacggcaucaucaccgacaccaucaagagcuggagaaacaacauccugagaacccaggagagcgagugcgccugcgugaacggcagcugcuucgccgugaugaccgacggccccagcaacagacaggccagcuacaagaucuucaagauggagaagggcaagguggugaagagcaucgagcuggacgcccccaacuaccacuacgaggagugcagcugcuaccccgacgccggcgagaucaccugcgugugcagagacaacuggcacggcagcaacagacccuggcugagcuucaaccagaaccuggaguaccagaucggcuacaucugcagcggcguguucggcgacaaccccagacccaacgacggcaccggcagcugcggccccgugagcagcaacggcgccuacggcgugaagggcuucagcuucaaguacggcaacggcguguggaucggcagaaccaagagcaccaacagcagaagcggcuucgagaugaucugggaccccaacggcuggaccgagaccgacagcagcuucagcaugaagcaggacaucguggccaucaccgacuggagcggcuacagcggcagcuucgugcagcaccccgagcugaccggccuggacugcaucagacccugcuucuggguggagcuggugagaggcagacccaaggagagcaccaucuggaccagcggcagcagcaucagcuucugcggcgugaacagcgacaccgugagcuggagcuggcccgacggcgccgagcugcccuucaccaucgacaaguga

SEQ ID NO: 186419 - RNA, 1350 nt, Artificial Sequence
  derived and/or modified CDS sequence (opt4) from neuraminidase__InfluenzaA__EPI492441
augaaccccaaccagaagaucauggccaucggcagcgugugcauggugaucggcaucgugagccugaugcugcagaucggcaacaccaucagcaucugggugagccacagcuuccagaccagagugcagcaccaggccgagcccaucagaaacaccaacuuccugaccgagaacgccguggccagcgugacccuggccggcaacagcagccugugccccaucagaggcugggccgugcacagcaaggacaacagcaucagaaucggcagcaagggcgacguguucgugaucagagagcccuucaucagcugcagccaccuggagugcagaaccuucuuccugacccagggcgcccugcugaacgacaagcacagcaacagaaccgugaaggacagaagcccccacagaacccugaugagcugccccgugggcgaggugcccagccccuacaacagcagauucgagagcguggccuggagcgccagcgccugccacgacggcaccagcuggcugaccaucggcaucagcggccccgacaacggcgccguggccgugcugaaguacaacggcaucaucaccgacaccaucaagagcuggagaaacaacauccugagaacccaggagagcgagugcgccugcgugaacggcuucugcuucaccgugaugaccgacggccccagcaacggccaggccagcuacaagaucuucaagaugaagaagggcaagguggugaagagcguggagcugaacgcccccaacuaccacuacgaggagugcagcugcuaccccgacgccggcgagaucaugugcgugugcagagacaacuggcacggcagcaacagacccugggugagcuucaaccagaaccuggaguaccagaucggcuacaucugcagcggcguguucggcgacaaccccagacccaacgacggcaccggcagcugcggccccgugagccccaacggcgccuacggcaucaagggcuucagcuucaaguacggcaacggcguguggaucggcagaaccaagagcaccaacagcagaagcggcuucgagauggugugggaccccaacggcuggaccgacaccgacagcgacuucagcaucaagcaggacaucguggccaucaccgacuggagcggcuacagcggcagcuucgugcagcaccccgagcugaccggccuggacugcaucagacccugcuucuggguggagcugaucagaggcagacccaaggagagcaccaucuggaccagcggcagcagcaucagcuucugcggcgugaacagcgagaccgugagcuggagcuggcccgacggcgccgagcugcccuucaccaucgacaaguga

SEQ ID NO: 186420 - RNA, 1350 nt, Artificial Sequence; identical to SEQ ID NO: 186047
  derived and/or modified CDS sequence (opt4) from neuraminidase__InfluenzaA__EPI164142

SEQ ID NO: 186421 - RNA, 1350 nt, Artificial Sequence
  derived and/or modified CDS sequence (opt4) from neuraminidase__InfluenzaA__EPI827076
augaaccccaaccagaagaucgugaccaucggcagcaucugcauggugaucggcaucaucagccugaugcugcagaucggcaacaucaucagcaucugggugagccacagcauccagaccggcaaccagcaccagaccgagcccaucagaaacaccaacuuccugaccgagaacgccguggccagcgugacccuggccggcaacagcagccugugccccaucaagggcugggccgugcacagcaaggacaacagcaucagaaucggcagcaagggcgacguguucgugaucagagagcccuucaucagcugcagccaccuggagugcagaaccuucuuccugacccagggcgcccugcugaacgacaagcacagcaacggcaccgugaaggacagaagcccccacagaacccugaugagcugccccaucggcgaggcccccagccccuacaacagcagauucgagagcguggccuggagcgccagcgccugccacgacggcaccagcuggcugaucaucggcaucagcggccccgacaacggcgccguggccgugcugaaguacaacggcaucaucaccgacaccaucaagagcuggagaaacaacauccugagaacccaggagagcgagugcgccugcgugaacggcagcugcuucgccgugaugaccgacggccccagcaacggccaggccagcuacaagaucuucaagaucgagaagggcaagguggugaagagcguggagcugaacgcccccaacuaccacuacgaggagugcagcugcuaccccgacgccggcgagaucaucugcgugugcagagacaacuggcacggcagcaacagacccugggugagcuucaaccagaaccuggaguaccagaucggcuacaucugcagcggcguguucggcgacaaccccagacccaacgacggcaccggcagcugcggccccgugagcagcaacggcgccuacggcgugaagggcuucagcuucaaguacggcaacggcguguggaucggcagaaccaagagcacccacagcagaagcggcuucgagaugaucugggaccccaacggcuggaccggcaccgacagcgaguucagcaugaagcaggacaucguggccaucaccgacuggagcggcuacagcggcagcuucgugcagcaccccgagcugaccggccuggacugcaucagacccugcuucuggguggagcugaucagaggcagacccaaggagagcaccaucuggaccagcggcagcagcaucagcuucugcggcgugaacagcgacaccgugagcuggagcuggcccgacggcgccgagcugcccuucaccaucgacaaguga

SEQ ID NO: 186422 - RNA, 1350 nt, Artificial Sequence; identical to SEQ ID NO: 176639
  derived and/or modified CDS sequence (opt4) from neuraminidase__InfluenzaA__EPI168491

SEQ ID NO: 186423 - RNA, 1350 nt, Artificial Sequence
  derived and/or modified CDS sequence (opt4) from neuraminidase__InfluenzaA__EPI827078
augaaccccaaccagaagaucaucaccaucggcagcaucugcauggugaucggcaucgccagccugaugcugcagaucggcaacaucaucagcaucuggaucagccacagcauccagaccggcaaccagugccagaacgagagcaucagcaacaccaaguuccuggccgagaaggccguggccagcgugacccuggccggcaacagcagccugugccccgugagcggcugggccguguacagcaaggacaacagcaucagaaucggcagcaagggcgacguguucgugaucagagagcccuucaucagcugcagccaccuggagugcagaaccuucuuccugacccagggcgcccugcugaacgacaagcacagcaacggcaccgugaaggacagaagcccccacagaacccugaugagcugccccgugggcgaggcccccagccccuacaacagcagauucgagagcguggccuggagcgccagcgccugccacgacggcaccagcuggcugaccaucggcaucagcggccccgacagcggcgccguggccgugcugaaguacaacggcaucaucaccgacaccaucaagagcuggagaaacaacaucaugagaacccaggagagcgagugcgccugcgugaacggcagcugcuucaccaucaugaccgacggccccagcagcggccaggccagcuacaagaucuucaagauggagaagggcaaggugaucaagagcguggagcuggacgcccccaacuaccacuacgaggagugcagcugcuaccccgacgccggcgagaucaccugcgugugcagagacaacuggcacggcagcaacagacccuggaucagcuucaaccagaaccuggaguaccagaucggcuacaucugcagcggcguguucggcgacaaccccagacccaacgacggcaccggcagcugcggccccguguuccccaacggcgccuacggcgugaagggcuucagcuucaaguacggcaacggcguguggaucggcagaaccaagagcaccaacagcagaagcggcuucgagaugaucugggaccccaacggcuggaccggcaccgacagcagcuucagcgugaagcaggacaucguggccaucaccgaguggagcggcuacagcggcagcuucgugcagcaccccgagcugaccggccuggacugcaucagacccugcuucuggguggagcugaucagaggcagacccaaggagagcaccaucuggaccagcggcagcagcaucagcuucugcggcgugaacggcgacaccgugagcuggagcuggcccgacggcgccgagcugcccuucaccaucgacaaguga

SEQ ID NO: 186424 - RNA, 1350 nt, Artificial Sequence
  derived and/or modified CDS sequence (opt4) from neuraminidase__InfluenzaA__EPI594521
augaaccccaaccagaagaucaucaccaucggcagcaucugcgugggcaucggcaucgugagccugaugcugcagaucggcaacauggugagcaucugggugaaccacagcauccagaccgagaaccagugccaggccgagagcaucagcaacaccaaguuccugaccgagaaggccguggcccccgugacccugaugggcaacagcagccugugccccaucagcggcugggccgugcacagcaaggacaacagcaucagaaucggcagcaagggcgacguguucgugaucagagagcccuucaucagcugcagccaccuggagugcagaaccuucuuccugacccagggcgcccugcugaacgacaagcacagcaacggcaccgugaaggacagaagcccccacagagcccugaugagcugccccgugggcgaggcccccagccccuacaacagcagauucgagagcguggccuggagcgccagcgccugccacgacggcaccggcuggcugaccaucggcaucagcggccccgacaacggcgccguggccgugcugaaguacaacggcaucaucaccgacaccaucaagagcuggagaaacaacauccugagaacccaggagagcgagugcgccugcgugaacggcagcugcuucaccgugaugaccgacggccccagcaacggccaggccagcuacaagaucuucaagcuggagaagggcaagguggugaagagcguggagcuggacgcccccaacuaccacuacgaggagugcagcugcuaccccgacgccggcgagaucaccugcgugugcagagacaacuggcacggcagcaacagacccugggugagcuucaaccagaaccuggaguaccagaucggcuacaucugcagcggcguguucggcgacaaccccagacccaacgacggcaccggcagcugcggccccgugagccccaacggcgccuacggcgugaagggcuucagcuucaaguacggcaacggcguguggaucggcagaaccaagagcaccaacagcagaagcggcuucgagaugaucugggaccccaacggcuggaccgagaccgacagcagcuucagcgugaagcaggacaucguggccaucaccgacuggagcggcuacagcggcagcuucgugcagcaccccgagcugaccggccuggacugcaucagacccugcuucuggguggagcugaucagaggcagacccaaggagagcaccaucuggaccagcggcagcagcaucagcuucugcggcgugaacagcgacaccgugggcuggagcuggcccgacggcgccgaggugcccuucaccaucgacaaguga

SEQ ID NO: 186425 - RNA, 1410 nt, Artificial Sequence
  derived and/or modified CDS sequence (opt4) from neuraminidase__InfluenzaA__EPI5787
augaaccccaaccagaagaucaucaccaucggcagcaucugcaugguggugggcaucaucagccugaugcugcagaucggcaacaucaucagcaucugggugagccacagcauccagaccggcaaccagcaccaggccgagcccugcaaccagagcaucaucaccuacgagaacaacaccugggugaaccagaccuacgugaacaucagcaacaccaacuuccugaccgagaaggccguggccagcgugacccuggccggcaacagcagccugugccccaucagcggcugggccgugcacagcaaggacaacggcaucagaaucggcagcaagggcgacguguucgugaucagagagcccuucaucagcugcagccaccuggagugcagaaccuucuuccugacccagggcgcccugcugaacgacaagcacagcaacggcaccgugaaggacagaagcccccacagaacccugaugagcugccccgugggcgaggcccccagccccuacaacagcagauucgagagcguggccuggagcgccagcgccugccacgacggcaccagcuggcugaccaucggcaucagcggccccgacaacggcgccguggccgugcugaaguacaacggcaucaucaccgacaccaucaagagcuggagaaacaacauccugagaacccaggagagcgagugcgccugcgugaacggcagcugcuucaccgugaugaccgacggccccagcaacggccaggccagcuacaagaucuucaagauggagaagggcaagguggugaagagcguggagcugaacgcccccaacuaccacuacgaggagugcagcugcuaccccgacgccggcgagaucaccugcgugugcagagacaacuggcacggcagcaacagacccugggugagcuucaaccagaaccuggaguaccagaucggcuacaucugcagcggcguguucggcgacaaccccagacccaacgacggcaccggcagcugcggccccgugagccccaacggcgccuacggcgugaagggcuucagcuucaaguacggcaacggcguguggaucggcagaaccaagagcaccaacagcagaagcggcuucgagaugaucugggaccccaacggcuggaccggcaccgacagcagcuucagcgugaagcaggacaucguggccaucaccgacuggagcggcuacagcggcagcuucgugcagcaccccgagcugaccggccuggacugcaucagacccugcuucuggguggagcugaucagaggcagacccaaggagagcaccaucuggaccagcggcagcagcaucagcuucugcggcgugaacagcgacaccgugggcuggagcuggcccgacgacgccgagcugcccuucaccaucgacaaguga

SEQ ID NO: 186426 - RNA, 1410 nt, Artificial Sequence; identical to SEQ ID NO: 186425
  derived and/or modified CDS sequence (opt4) from neuraminidase__InfluenzaA__EPI5787

SEQ ID NO: 186427 - RNA, 1350 nt, Artificial Sequence; identical to SEQ ID NO: 181125
  derived and/or modified CDS sequence (opt4) from neuraminidase__InfluenzaA__EPI267031

SEQ ID NO: 186428 - RNA, 1350 nt, Artificial Sequence; identical to SEQ ID NO: 182705
  derived and/or modified CDS sequence (opt4) from neuraminidase__InfluenzaA__EPI376539

SEQ ID NO: 186429 - RNA, 1350 nt, Artificial Sequence
  derived and/or modified CDS sequence (opt4) from neuraminidase__InfluenzaA__EPI124069
augaaccccaaccagaagaucaucaccaucggcagcaucugcauggugaucggcaucgugagccugaugcugcagaucggcaacaugaucagcaucugggugagccacagcauccagaccggcaaccagcaccaggccgagagcaucagcaacaccaacccccugaccgagaaggccguggccagcgugacccuggccggcaacagcagccugugccccaucagaggcugggccgugcacagcaaggacaacaacaucagaaucggcagcaagggcgacguguucgugaucagagagcccuucaucagcugcagccaccuggagugcagaaccuucuuccugacccagggcgcccugcugaacgacaagcacagcaacggcaccgugaaggacagaagcccccacagaacccugaugagcugccccgugggcgaggcccccagccccuacaacagcagauucgagagcguggccuggagcgccagcgccugccacgacggcaccagcuggcugaccaucggcaucagcggccccgacaacgaggccguggccgugcugaaguacaacggcaucaucaccgacaccaucaagagcuggagaaacaacauccugagaacccaggagagcgagugcgccugcgugaacggcagcugcuucaccgugaugaccgacggccccagcgacggccaggccagcuacaagaucuucaagauggagaagggcaagguggugaagagcguggagcuggacgcccccaacuaccacuacgaggagugcagcugcuaccccgacgccggcgagaucaccugcgugugcagagacaacuggcacggcagcaacagacccugggugagcuucaaccagaaccuggaguaccagaucggcuacaucugcagcggcguguucggcgacaaccccagacccaacgacggcaccggcagcugcggccccaugagccccaacggcgccuacggcgugaagggcuucagcuucaaguacggcaacggcguguggaucggcagaaccaagagcaccaacagcagaagcggcuucgagaugaucugggaccccaacggcuggaccggcaccgacagcagcuucagcgugaagcaggacaucguggccaucaccgacuggagcggcuacagcggcagcuucgugcagcaccccgagcugaccggccuggacugcaucagacccugcuucuggguggagcugaucagaggcagacccaaggagagcaccaucuggaccagcggcagcagcaucagcuucugcggcgugaacagcgacaccgugagcuggagcuggcccgacggcgccgagcugcccuucaccaucgacaaguga

SEQ ID NO: 186430 - RNA, 1350 nt, Artificial Sequence
  derived and/or modified CDS sequence (opt4) from neuraminidase__InfluenzaA__EPI342499
augaaccccaaccagaagaucaucaccaucggcagcaucugcauggugaucggcaucgugagccugaugcugcagaucggcaacaugaucagcaucuggaucagccacagcauccagaagggcaaccagcacagaaccgagagcaucagcaacaccaacccccugaccgagaaggccguggccagcgugacccugaccggcaacagcagccugugccccaucagaggcugggccgugcacagcaaggacaacaacaucagaaucggcagcaagggcgacguguucgugaucagagagcccuucaucagcugcagccaccuggagugcagaaccuucuuccugacccagggcgcccugcugaacgacaagcacagcaacggcaccgugaaggacagaagcccccacagaacccugaugagcugcccccugggcgaggcccccagccccuacaacagcagauucgagagcguggccuggagcgccagcgccugccacgacggcaccggcuggcugaccaucggcaucagcggccccgacaacgaggccguggccgugcugaaguacaacggcaucaucaccgacaccaucaagagcuggagaaacaacauccugagaacccaggagagcgagugcgccugcgugaacggcagcugcuucaccgugaugaccgacggccccagcaacggccaggccagcuacaagaucuucaagaugagaaagggcaagguggugaagagcguggagcuggacgcccccaacuaccacuacgaggagugcagcugcuaccccgacaccggcgagaucaccugcgugugcagagacaacuggcacggcagcaacagacccuggaucagcuucaaccagaaccuggaguaccagaucggcuacaucugcagcggcaucuucggcgacaaccccagacccaacgacggcaccggcagcugcggccccaugagccccaacggcgccuacggcgugaagggcuucagcuucaaguacggcaacggcguguggaucggcagaaccaagagcaccaacagcagaagcggcuucgagaugaucugggaccccaacggcuggaccgagaccgacagcagcuucagcgugaagcaggacaucguggccaucaccgacuggagcggcuacagcggcagcuucgugcagcaccccgagcugaccggccuggacugcaucagacccugcuucuggguggagcugaucagaggcagacccaaggagagcaccaucuggaccagcggcagcagcaucagcuucugcggcgugaacagcgacaccgugagcuggagcuggcccgacggcgccgagcugcccuucaccaucgacaaguga

SEQ ID NO: 186431 - RNA, 1350 nt, Artificial Sequence
  derived and/or modified CDS sequence (opt4) from neuraminidase__InfluenzaA__EPI103069
augaaccccaaccagaagaucaucaccaucggcagcaucugcauggugaucggcaucgugagccugaugcugcagaucggcaacaugaucagcaucugggugagccacagcauccagaccggcaaccagagacaggccgagcccaucagcaacaccaaguuccugaccgagaaggccguggccagcgugacccuggccggcaacagcagccugugccccaucagcggcugggccguguacagcaaggacaacagcaucagaaucggcagcagaggcgacguguucgugaucagagagcccuucaucagcugcagccaccuggagugcagaaccuucuuccugacccagggcgcccugcugaacgacaagcacagcaacggcaccaucaaggacagaagcccccacagaacccugaugagcugccccgugggcgaggcccccagccccuacaacagcagauucgagagcguggccuggagcgccagcgccugccacgacggcaccagcuggcugaccaucggcaucagcggccccgacaacggcgccguggccgugcugaaguacaacggcaucaucaccgacaccaucaagagcuggagaaacaacauccugagaacccaggagagcgagugcgccugcgugaacggcagcugcuucaccgugaugaccgacggccccagcagcggccaggccagcuacaagaucuucaagauggagaagggcaagguggugaagagcguggagcuggacgcccccaacuaccacuacgaggagugcagcugcuaccccgacgccggcgagaucaccugcgugugcagagacaacuggcacggcagcaacagacccugggugagcuucaaccagaaccuggaguaccagaucggcuacaucugcagcggcguguucggcgacaaccccagacccaacgacggcaccggcagcugcggccccgugagccccaacggcgccuacggcgugaagggcuucagcuucaaguacggcaacggcguguggaucggcagaaccaagagcaccaacagcagaagcggcuucgagaugaucugggaccccaacggcuggaccggcaccgacagcagcuucagcgugaagcaggacaucguggccaucaccgacuggagcggcuacagcggcagcuucgugcagcaccccgagcugaccggccuggacugcaucagacccugcuucuggguggagcugaucagaggcagacccaaggagagcaccaucuggaccagcggcagcagcaucagcuucugcggcgugaacagcgacaccgugagcuggagcuggcccgacggcgccgagcugcccuucaccaucgacaaguga

SEQ ID NO: 186432 - RNA, 1350 nt, Artificial Sequence; identical to SEQ ID NO: 186408
  derived and/or modified CDS sequence (opt4) from neuraminidase__InfluenzaA__EPI227595

SEQ ID NO: 186433 - RNA, 1410 nt, Artificial Sequence
  derived and/or modified CDS sequence (opt4) from neuraminidase__InfluenzaA__EPI569385
augaaccccaaccagaagaucaucaccaucggcagcgugagccugaccaucgccaccgugugcuuccugaugcagaucgccauccuggccaccaccgugacccugcacuucaagcagaacgagugcagcaucccccccaacaaccagguggugcccugcgagcccaucaucaucgagaagaacaucaccgagaucguguaccugaacaacaccaccaucgagaaggaggugugccccgaggugcccgaguacagaaacuggagcaagccccagugccagaucaccggcuucgcccccuucagcaaggacaacagcaucagacugagcgccggcggcgacaucugggugaccagagagcccuacgugagcugcagccccggcaagugcuaccaguucgcccugggccagggcaccacccugaacaacaagcacagcaacggcaccauccacgacagaaucccccacagaacccugcugaugagcgagcugggcgugcccuuccaccugggcaccaagcaggugugcaucgccuggagcagcagcagcugccacgacggcaaggccuggcugcacgugugcgugaccggcgacgacagaaacgccaccgccagcuucaucuacgacggcaugcuggccgacagcaucggcagcuggagccagaacauccugagaacccaggagagcgagugcgugugcaucaacggcaccugcaccguggugaugaccgacggcagcgccagcggcagagccgacaccagaauccuguucaucaaggagggcaagaucgugcacaucagcccccugagcggcagcgcccagcacaucgaggagugcagcugcuaccccagauaccccgacgugagaugcgugugcagagacaacuggaagggcagcaacagacccgugaucgacaucaacauggccgacuacagcaucgacagcagcuacgugugcagcggccuggugggcgacacccccagaaacgacgacagcagcagcagcagcaacugcagagaccccaacaacgagagaggcaaccccggcgugaagggcugggccuucgacaacggcaacgacguguggaugggcagaaccaucagcgaggacagcagaagcggcuacgagaccuucagagugaccgacggcuggaccaccgccaacagcaagagccaggugaacagacagaucaucguggacaacaacaacuggagcggcuacagcggcaucuucagcguggagggcaagagcugcaucaacagaugcuucuacguggagcugaucagaggcagaccccaggagaccagagugugguggaccagcaacagcaucgugguguucugcggcaccagcggcaccuacggcaccggcagcuggcccgacggcgccaacaucaacuucaugcccaucuga

SEQ ID NO: 186434 - RNA, 1380 nt, Artificial Sequence
  derived and/or modified CDS sequence (opt4) from neuraminidase__InfluenzaA__EPI736916
augaaccccaaccagaagaucaccugcaucagcgccaccggcgugacccugagcguggugagccugcugaucggcaucgccaaccugggccugaacaucggccugcacuacaaggugagcgacagcaccaccaucagcauccccaacaugaacgagaccaaccccaccaccaccaacaucaccaacaucaucgugaacaagaacgaggagagaaccuuccugaaccugaccaagccccugugcgaggugaacagcuggcacauccugagcaaggacaacgccaucagaaucggcgaggacgcccacauccuggugaccagagagcccuaccugagcugcgacccccagggcugcagaauguucgcccugagccagggcaccacccugagaggcagacacgccaacggcaccauccacgacagaagccccuucagagcccugaucagcugggagaugggccaggcccccagccccuacaacaccagaguggagugcaucggcuggagcagcaccagcugccacgacggcaucagcagaaugagcaucugcaucagcggccccaacaacaacgccagcgccguggugugguacagaggcagacccgugaccgagauccccagcugggccggcaacauccugagaacccaggagagcgagugcgugugccacaagggcaucugccccguggugaugaccgacggccccgccaacaacaaggccgccaccaagaucaucuacuucaaggagggcaaggugcagaagaucgaggagcugcagggcaacgcccagcacaucgaggagugcagcugcuacggcgccgccggcaugaucaagugcgugugcagagacaacuggaagggcgccaacagacccaucaucaccaucgaccccgagaugaugacccacaccagcaaguaccugugcagcaagauccugaccgacaccagcagacccaacgaccccaccaacggcaacugcgacgcccccaucaccggcggcagccccgaccccggcgugaagggcuucgccuuccuggacggcgagaacagcuggcugggcagaaccaucagcaaggacagcagaagcggcuacgagaugcugaaggugcccaacgccgagaccgacacccagagcggccccaccagcuaccagcugaucgugaacaaccagaacuggagcggcuacagcggcgccuucaucgacuacugggccaacaaggagugcuucaaccccugcuucuacguggagcugaucagaggcagacccaaggagagcgacgugcuguggaccagcaacagcaugguggcccugugcggcagcagagagagacugggcagcuggagcuggcacgacggcgccgagaucaucuacuucaaguga

SEQ ID NO: 186435 - RNA, 1380 nt, Artificial Sequence; identical to SEQ ID NO: 186054
  derived and/or modified CDS sequence (opt4) from neuraminidase__InfluenzaA__EPI593891

SEQ ID NO: 186436 - RNA, 1380 nt, Artificial Sequence
  derived and/or modified CDS sequence (opt4) from neuraminidase__InfluenzaA__EPI691380
augaaccccaaccagaagaucgugugcaucagcgugaccggcgugacccugagcguggugagccugcugaucggcaucaccaaccugggccugaacaucggccugcacuacaaggugagcgacagcaccaccaucaacauccccaacaugaacgagaccaaccccaccaccaccaacaucaccaacaucaucaugaacaagaacgaggagagaaccuuccugaagcugaccaagccccugugcgaggugaacagcuggcacauccugagcaaggacaacgccaucagaaucggcgaggacgcccacauccuggugaccagagagcccuaccugagcugcgacccccagggcugcagaauguucgcccugagccagggcaccacccugagaggccagcacgccaacggcaccauccacgacagaagccccuucagagcccugaucagcugggagaugggccaggcccccagccccuacaacaccagaguggagugcaucggcuggagcagcaccagcugccacgacggcaucagcagaaugagcaucugcaucagcggccccaacaacaacgccagcgccguggugugguacagaggcagacccgugaccgagauccccagcugggccggcaacauccugagaacccaggagagcgagugcgugugccacaagggcaucugccccguggugaugaccgacggccccgccaacaacaaggccgccaccaagaucaucuacuucaaggagggcaagauccagaagaccgaggagcugcagggcaacgcccagcacaucgaggagugcagcugcuacggcgccgccggcaugaucaagugcgugugcagagacaacuggaagggcgccaacagacccaucaucaccaucgaccccgagaugaugacccacaccagcaaguaccugugcagcaagauccugaccgacaccagcagacccaacgaccccaccaacggcaacugcgacgcccccaucaccggcggcagccccgaccccggcgugaagggcuucgccuuccuggacggcgagaacagcuggcugggcagaaccaucagcaaggacagcagaagcggcuacgagaugcugaaggugcccaacgccgagaucgacauccagagcggccccaucagcuaccagcugguggugaacaaccagaacuggagcggcuacagcggcgccuucaucgacuacugggccaacaaggagugcuucaaccccugcuucuacguggagcugaucagaggcagacccaaggagagcggcgugcuguggaccagcaacagcaugguggcccugugcggcagcagagagagacugggcagcuggagcuggcacgacggcgccgagaucaucuacuucaaguga

SEQ ID NO: 186437 - RNA, 1413 nt, Artificial Sequence
  derived and/or modified CDS sequence (opt4) from neuraminidase__InfluenzaA__EPI533584
augaaccccaaccagaagaucaccugcaucagcgccaccggcaugacccugagcguggugagcaugcugaucggcaucgccaaccugggccugaacaucggccugcacuacaaggugagcgacagcaccaacaucaacauccccaacaugaacgagaccagccccaccaccaccaucaucaacaaccacccccagaacaacuucaccaacaucaccaacaucaucgugaccaagaacgaggagggccaccugcugaaccugaccaagccccugugcgaggugaacagcuggcacauccugagcaaggacaacgccaucagaaucggcgaggacgcccacaucaucgugaccagagagcccuaccugagcugcgacccccagggcugcagaauguucgcccugagccagggcaccacccugagaggcaagcacgccaacggcaccauccacgacagaagccccuucagagcccuggugagcugggagaugggccaggcccccagccccuacaacaccagaguggagugcaucggcuggagcagcaccagcugccacgacggcaucagcagaaugagcaucugcaucagcggccccaacaacaacgccagcgccguggugugguacggcggcagacccgugaccgagauccccagcugggccggcaacauccugagaacccaggagagcgagugcgugugccacggcggcaucugccccguggugaugaccgacggccccgccaacaacagagccgagaccaagaucaucuacuucaaggagggcaagaucaagaagaucgaggagcugaagggcgacgcccagcacaucgaggagugcagcugcuacggcgccagcgagaugaucaagugcaucugcagagacaacuggaagggcgccaacagacccgugaucaccaucgaccccgagaugaugacccacaccagcaaguaccugugcagcaagauccugaccgacaccagcagacccaacgaccccaccaacggcaagugcgaggcccccaucaccggcggcagccccgaccccggcgugaagggcuucgccuuccuggacggcgagaacagcuggcugggcagaaccaucagcaaggacagcagaagcggcuacgagaugcugaaggugcccaacgccgagaccgacacccagagcggcgccaucagccaccagaucaucgugaacaaccagaacuggagcggcuacagcggcgccuucaucgacuacugggccaacaaggagugcuucaaccccugcuucuacguggagcugaucagaggcagacccaaggagagcagcgugcuguggaccagcaacagcaucguggcccugugcggcagcaaggagagacugggcagcuggagcuggcacgacggcgccgagaucaucuacuucaaguga

SEQ ID NO: 186438 - RNA, 1380 nt, Artificial Sequence; identical to SEQ ID NO: 186058
  derived and/or modified CDS sequence (opt4) from neuraminidase__InfluenzaA__EPI641400

SEQ ID NO: 186439 - RNA, 1380 nt, Artificial Sequence; identical to SEQ ID NO: 186058
  derived and/or modified CDS sequence (opt4) from neuraminidase__InfluenzaA__EPI587620

SEQ ID NO: 186440 - RNA, 1410 nt, Artificial Sequence
  derived and/or modified CDS sequence (opt4) from neuraminidase__InfluenzaA__EPI569392
augaaccccaaccagaagaucgugaccaucggcagccugagccugggccuggugguguucaacgugcugcugcacgccgugagcaucauccugaccgugcuggcccugggcaagagcgagaacaacggcaucugcaacggcaccguggugagagaguacaacgagaccgugagaaucgagaaggugacccagugguacaacaccagcgugguggaguacgugccccacuggaacgagggcaccuacaucaacaacaccgagcccaucugcgacgugaagggcuucgcccccuucagcaaggacaacggcaucagagugggcagcagaggccacaucuucgugaucagagagcccuucgugagcugcagccccgugggcugcagaaccuucuuccugacccagggcagccugcugaacgacaagcacagcaacggcaccgugaaggacagaagccccuucagaacccugaugagcguggaggugggccagagccccaacguguaccaggccagauucgaggccguggccuggagcgccaccgccugccacgacggcaagaaguggauggccaucggcgugaccggccccgacagcaaggccguggccguggugcacuacggcggcgugcccaccgacguggugaacagcugggccggcgacauccugagaacccaggagagcagcugcaccugcauccagggcaacugcuacugggugaugaccgacggccccgccaacagacaggcccaguacagaaucuacaaggccaaccagggcaagaucaucggcagaaaggacgugagcuucagcggcggccacaucgaggagugcagcugcuaccccaacgacggcaagguggagugcgugugcagagacaacuggaccggcaccaacagacccgugcugaucaucagccccgaccugagcuacagagugggcuaccugugcgccggccugcccagcgacacccccagaggcgaggacacccaguucgugggcagcugcaccagccccaugggcaaccagggcuacggcgugaagggcuucggcuucagacagggcaccgacgugugggugggcagaaccaucagcagaaccagcagaagcggcuucgagaucaucagaaucaagaacggcuggacccagaccagcaaggagcagaucagaagacagguggugguggacaacagcaacuggagcggcuacagcggcagcuucacccugcccguggagcugagcggcagagagugccuggugcccugcuucuggguggagaugaucagaggcagacccgaggagagaaccaucuggaccagcagcagcagcaucgugaugugcggcguggacuacgagaucgccgacuggagcuggcacgacggcgccauccugcccuucgacaucgacaaguga

SEQ ID NO: 186441 - RNA, 1368 nt, Artificial Sequence
  derived and/or modified CDS sequence (opt4) from neuraminidase__InfluenzaA__EPI459857
augaaccccaaccagaagaucaucaccaucggcagcaucugcauggugaucggcaccgugagccugaucgugcaggugggcaacaucauccugaucugggugaaccacagcauccagaccugcaucaccuacgagaacaacaccugggugaaccagaccuacgugagcaacaccaacuuccugaccggccaggccguggccagcgugacccuggccggcaacagcagccugugccccaucagcggcugggccaucuacagcaaggacaacggcaucagaaucggcagcaagggcgacguguucgugaucagagagcccuucaucagcugcagccaccuggagugcagaaccuucuuccugacccagggcgcccugcugaacgacaagcacagcaacggcaccaucaaggacagaagccccuacagaacccugaugagcugccccgugggcgaggcccccagccccuacaacagcagauucgagagcguggccuggagcgccagcgccugccacgacggcaucaacuggcugaccaucggcaucagcggccccgacaacgaggccguggccgugcugaaguacaacggcgugaucaccgacaccaucaagagcuggagaaacaacauccugagaacccaggagagcgagugcgccugcgugaacggcagcugcuucaccgugaugaccgacggccccagcaacggccaggccagcuacaagaucuucaagaucgagaagggcaagguggugagaagcguggagcuggacgcccccaacuaccacuacgaggagugcagcugcuaccccgacgccggcgagaucaccugcgugugcagagacaacuggcacggcagcaacagacccugggugagcuucaaccagaaccuggaguaccagaccggcuacaucugcagcggcguguucggcgacagccccagacccaacgacggcaccggcagcugcggccccgugagcagcaacggcgccuucggcgugaagggcuucagcuucaaguacggcaacggcguguggaucggcagaaccaagaccaccaacagcagaagcggcuucgagaugaucugggaccccaacggcuggaccgagaccgacagcagcuucagcaugaagcaggacaucaucgccaucaccgacuggagcggcuacagcggcagcuucgugcagcaccccgagcugaccggccugaacugcaugagacccugcuucuggguggagcugaucagaggccagcccagagagaacaccaucuggaccagcggcagcagcaucagcuucugcggcgugaacagcgagaccgugggcuggagcuggcccgacggcgccgagcugcccuucaccaucgacaaguga

SEQ ID NO: 186442 - RNA, 1416 nt, Artificial Sequence
  derived and/or modified CDS sequence (opt4) from neuraminidase__InfluenzaA__EPI242204
augaaccccaaccagaagcuguucgcccugagcggcguggccaucgcccugagcgugcugaaccugcugaucggcaucagcaacgugggccugaacgugagccugcaccugaagggcgagggcgugaagcaggagaacaaccugaccugcaccaccaucacccagaacaacaccaccgugguggagaacaccuacgugaacaacaccaccaucaucaacaagggcaccaaccugaaggcccccaacuaccugcugcugaacaagagccugugcagcguggagggcuggguggugaucgccaaggacaacgccaucagauucggcgagagcgagcagaucaucgugaccagagagcccuacgugagcugcgaccccagcggcugcaagauguacgcccugcaccagggcaccaccaucagaaacaagcacagcaacggcaccauccacgacagaaccaccuucagaggccugaucagcaccccccugggcaccccccccaccgugagcaacagcgacuucaucugcgugggcuggagcagcaccagcugccacgacggcgugggcagaaugaccaucugcauccagggcaacaacgacaacgccaccgccaccguguacuacaacagaagacugaccaccaccaucaagaccugggccaagaacauccugagaacccaggagagcgagugcgugugccacaacggcaccugcgccguggugaugaccgacggccccgccagcagccaggccuacaccaagaucauguacuuccacaagggccugaucaucaaggaggagccccugagaggcagcgccagacacaucgaggagugcagcugcuacggccacgaccagaaggugagcugcgugugcagagacaacuggcagggcgccaacagacccaucaucgagaucgacaugagcacccuggagcacaccagcagauacgugugcaccggcgugcugaccgacaccagcagacccggcgacaagcccaacggcgacugcagcaaccccaucaccggcagccccggcgcccccggcgugaagggcuucggcuuccugaacggcgacaacaccuggcugggcagaaccaucagccccagaagcagaagcggcuucgagaugcugaagauccccaacgccgagaccgaccccaacagcagaaucaucgagagacaggagaucguggacaacagcaacuggagcggcuacagcggcagcuucaucgacuacugggacgaggccaacgagugcuacaaccccugcuucuacguggagcugaucagaggcagacccgaggaggccaaguacgugugguggaccagcaacagccugaucgcccugugcggcagccccgugagcgugggcagcggcagcuuccccgacggcgcccagauccaguacuucagcuga

SEQ ID NO: 186443 - RNA, 1416 nt, Artificial Sequence
  derived and/or modified CDS sequence (opt4) from neuraminidase__InfluenzaA__EPI408029
augaaccccaaccagaagcuguucgcccugagcggcguggccaucgcccugagcgugcugaaccugcugaucggcaucagcaacgugggccugaacaugagccugcaccugaagggcgagggcgugaagcaggagaacaaccugaccugcaccaccaucacccagaacaacaccaccgugguggagaacaccuacgugaacaacaccaccaucaucaacaagggcaccaaccugaaggcccccaacuaccugcugcugaacaagagccugugcagcguggagggcuggguggugaucgccaaggacaacgccaucagauucggcgagagcgagcagaucaucgugaccagagagcccuacgugagcugcgaccccagcggcugcaagauguacgcccugcaccagggcaccaccaucagaaacaagcacagcaacggcaccauccacgacagaaccaccuucagaggccugcugagcaccccccugggcaccccccccaccgugagcaacagcgacuucaucugcgugggcuggagcagcaccagcugccacgacggcgugggcagaaugaccaucugcauccagggcaacaacgacaacgccaccgccaccguguacuacaacagaagacugaccaccaccaucaagaccugggccaagaacauccugagaacccaggagagcgagugcgugugccacaacggcaccugcgccguggugaugaccgacggccccgccagcagccaggccuacaccaagaucauguacuuccacaagggccugaucaucaaggaggagccccugagaggcagcgccagacacaucgaggagugcagcugcuacggccacgaccagaaggugagcugcgugugcagagacaacuggcagggcgccaacagacccaucaucgagaucgacaugagcacccuggagcacaccagcagauacgugugcaccggcgugcugaccgacaccagcagacccggcgacaagcccaacggcgacugcagcaaccccaucaccggcagccccggcgcccccggcgugaagggcuucggcuuccugaacggcgacaacaccuggcugggcagaaccaucagccccagaagcagaagcggcuucgagaugcugaagauccccaacgccgagaccgaccccaacagcagaaucaucgagagacaggagaucguggacaacagcaacagaagcggcuacagcggcagcuucaucgacuacugggacgaggccaacgagugcuacaaccccugcuucuacguggagcugaucagaggcagacccgaggaggccaaguacgugugguggaccagcaacagccugaucgcccugugcggcagccccgugagcgugggcagcggcagcuuccccgacggcgcccagauccaguacuucagcuga

SEQ ID NO: 186444 - RNA, 1398 nt, Artificial Sequence; identical to SEQ ID NO: 183514
  derived and/or modified CDS sequence (opt4) from neuraminidase__InfluenzaA__EPI439509

SEQ ID NO: 186445 - RNA, 1350 nt, Artificial Sequence; identical to SEQ ID NO: 186047
  derived and/or modified CDS sequence (opt4) from neuraminidase__InfluenzaA__EPI164223

SEQ ID NO: 186446 - RNA, 1398 nt, Artificial Sequence; identical to SEQ ID NO: 183514
  derived and/or modified CDS sequence (opt4) from neuraminidase__InfluenzaA__EPI486493

SEQ ID NO: 186447 - RNA, 1398 nt, Artificial Sequence
  derived and/or modified CDS sequence (opt4) from neuraminidase__InfluenzaA__EPI740737
augaaccccaaccagaagauccugugcaccagcgccaccgccaucaccaucagcgccaucgccgugcugaucggcaucgccaaccugggccugaacaucggccugcaccugaagcccggcugcaacugcagccacagccagcccgagaccaccaacaccagccagaccaucaucaacaacuacuacaacgagaccaacaucaccaacauccagaucgaggagagaaccagcagaaacuucaacaaccugaccaagggccugugcaccaucaacagcuggcacaucuacggcaaggacaacgccgugagaaucggcgagagcagcgacgugcuggugaccagagagcccuacgugagcugcgaccccgacgagugcagauucuacgcccugagccagggcaccaccaucagaggcaagcacagcaacggcaccauccacgacagaagccaguacagagcccugaucagcuggccccugagcagcccccccaccgugcacaacagcagaguggagugcaucggcuggagcagcaccagcugccacgacggcaagagcagaaugagcaucugcaucagcggccccaacaacaacgccagcgccguggugugguacaacagaagacccguggccgagaucaacaccugggccagaaacauccugagaacccaggagagcgagugcgugugccacaacggcgugugccccgugguguucaccgacggccccgccaccggccccgccgacaccagaaucuacuacuucaaggagggcaagauccugaagugggagagccugaccggcaccgccaagcacaucgaggagugcagcugcuacggcgagagaaccggcaucaccugcaccugcagagacaacuggcagggcagcaacagacccguggugcagaucgaccccguggccaugacccacaccagccaguacaucugcagccccgugcugaccgacagccccagacccaacgaccccaacaucggcaagugcaacgaccccuaccccggcaacaacaacaacggcgugaagggcuucagcuaccuggacggcgccaacaccuggcugggcagaaccaucagcaccgccagcagaagcggcuacgagaugcugaaggugcccaacgcccugaccgacgacagaagcaagcccauccagggccagaccaucgugcugaacgccgacuggagcggcuacagcggcagcuucauggacuacugggccgagggcgacugcuacagagccugcuucuacguggagcugaucagaggcagacccaaggaggacaaggugugguggaccagcaacagcaucgugagcaugugcagcagcaccgaguuccugggccaguggaacuggcccgacggcgccaagaucgaguacuuccuguga

SEQ ID NO: 186448 - RNA, 1398 nt, Artificial Sequence
  derived and/or modified CDS sequence (opt4) from neuraminidase__InfluenzaA__EPI730494
augaaccccaaccagaagauccugugcaccagcgccaccgccaucaccaucggcgccaucgccgugcugaucggcaucgccaaccugggccugaacaucggccugcaccugaagcccggcugcaacugcagccacagccagcccgagaucaccaacaccagccagaccaucaucaacaacuacuacagcgagaccaacaucaccaacauccagauggaggagagaaccagcaagaacuucaacaaccugaccaagggccugugcaccaucaacagcuggcacaucuacggcaaggacaacgccgugagaaucggcgagagcagcgacgugcuggugaccagagagcccuacgugagcugcgaccccgacgagugcagauucuacgcccugagccagggcaccaccaucagaggcaagcacagcaacggcaccauccacgacagaagccaguacagagcccugaucagcuggccccugagcagcccccccaccguguacaacagcagaguggagugcaucggcuggagcagcaccagcugccacgacggcaagagcagaaugagcaucugcaucagcggccccaacaacaacgccagcgccguggugugguacaacagaagacccguggccgagaucaacaccugggccagaaacauccugagaacccaggagagcgagugcgugugccacaacggcgugugccccgugguguucaccgacggcagcgccaccggccccgccgacaccagaaucuacuacuucaaggagggcaagauccugaagugggagagccugaccggcaccgccaagcacaucgaggagugcagcugcuacggcgagagaaccggcaucaccugcaccugcagagacaacuggcagggcagcaacagacccgugauccagaucgaccccguggccaugacccacaccagccaguacaucugcagccccgugcugaccgacaaccccagacccaacgaccccaacaucggcaagugcaacgaccccuaccccggcaacaacaacaacggcaucaagggcuucagcuaccuggacggcgccaacaccuggcugggcagaaccaucagcaccgccagcagaagcggcuacgagaugcugaaggugcccaacgcccugaccgacgacagaagcaagcccauccagggccagaccaucgugcugaacgccgacuggagcggcuacagcggcagcuucauggacuacugggccgagggcgacugcuacagagccugcuucuacguggagcugaucagaggcagacccaaggaggacaaggugugguggaccagcaacagcaucgugagcaugugcagcagcaccgaguuccugggccaguggaacuggcccgacggcgccaagaucgaguacuuccuguga

SEQ ID NO: 186449 - RNA, 1398 nt, Artificial Sequence
  derived and/or modified CDS sequence (opt4) from neuraminidase__InfluenzaA__EPI712925
augaaccccaaccagaagauccugugcaccagcgccaccgccaucaccaucggcgccaucgccgugcugaucggcaucgccaaccugggccugaacaucggccugcaccugaagcccggcugcaacugcagccacagccagcccgagaccaccaacaccagccagaccaucaucaacaacuacuacaacgagaccaacaucaccaacauccagaucgaggagagaaccagcagaaacuucaacaaccugaccaagggccugugcaccaucaacagcuggcacaucuacggcaaggacaacgccgugagaaucggcgagagcagcgacgugcuggugaccagagagcccuacgugagcugcgaccccgacgagugcagauucuacgcccugagccagggcaccaccaucagaggcaagcacagcaacggcaccauccacgacagaagccaguacagagcccugaucagcuggccccugagcagcccccccaccgugcacaacagcagaguggagugcaucggcuggagcagcaccagcugccacgacggcaagagcagaaugagcaucugcaucagcggccccaacaacaacgccagcgccguggugugguacaacagaagacccguggccgagaucaacaccugggccagaaacauccugagaacccaggagagcgagugcgugugccacaacggcgugugccccgugguguucaccgacggccccgccaccggccccgccgacaccagaaucuacuacuucaaggagggcaagauccugaagugggagagccugaccggcaccgccaagcacaucgaggagugcagcugcuacggcgagagaaccggcaucaccugcaccugcagagacaacuggcagggcagcaacagacccguggugcagaucgaccccguggccaugacccacaccagccaguacaucugcagccccgugcugaccgacagccccagacccaacgaccccaacaucggcaagugcaacgaccccuaccccggcaacaacaacaacggcgugaagggcuucagcuaccuggacggcgccaacaccuggcugggcagaaccaucagcaccgccagcagaagcggcuacgagaugcugaaggugcccaacgcccugaccgacgacagaagcaagcccauccagggccagaccaucgugcugaacgccgacuggagcggcuacagcggcagcuucauggacuacugggccgagggcgacugcuacagagccugcuucuacguggagcugaucagaggcagacccaaggaggacaaggugugguggaccagcaacagcaucgugagcaugugcagcagcaccgaguuccugggccaguggaacuggcccgacggcgccaagaucgaguacuuccuguga

SEQ ID NO: 186450 - RNA, 1398 nt, Artificial Sequence
  derived and/or modified CDS sequence (opt4) from neuraminidase__InfluenzaA__EPI448938
augaaccccaaccagaagauccugugcaccagcgccaccgccaucaucaucggcgccaucgccgugcugaucggcauggccaaccugggccugaacaucggccugcaccugaagcccggcugcaacugcagccacagccagcccgagaccaccaacaccagccagaccaucaucaacaacuacuacaacgagaccaacaucaccaacauccagauggaggagagaaccagcagaaacuucaacaaccugaccaagggccugugcaccaucaacagcuggcacaucuacggcaaggacaacgccgugagaaucggcgagagcagcgacgugcuggugaccagagagcccuacgugagcugcgaccccgacgagugcagauucuacgcccugagccagggcaccaccaucagaggcaagcacagcaacggcaccauccacgacagaagccaguacagagcccugaucagcuggccccugagcagcccccccaccguguacaacagcagaguggagugcaucggcuggagcagcaccagcugccacgacggcaagagcagaaugagcaucugcaucagcggccccaacaacaacgccagcgccguggugugguacaacagaagacccguggccgagaucaacaccugggccagaaacauccugagaacccaggagagcgagugcgugugccacaacggcgugugccccgugguguucaccgacggcagcgccaccggccccgccgacaccagaaucuacuacuucaaggagggcaagauccugaagugggagagccugaccggcaccgccaagcacaucgaggagugcagcugcuacggcgagagaaccggcaucaccugcaccugcagagacaacuggcagggcagcaacagacccgugauccagaucgaccccguggccaugacccacaccagccaguacaucugcagccccgugcugaccgacaaccccagacccaacgaccccaacaucggcaagugcaacgaccccuaccccggcaacaacaacaacggcgugaagggcuucagcuaccuggacggcgccaacaccuggcugggcagaaccaucagcaccgccagcagaagcggcuacgagaugcugaaggugcccaacgcccugaccgacgacagaagcaagcccauccagggccagaccaucgugcugaacgccgacuggagcggcuacagcggcagcuucauggacuacugggccgagggcgacugcuacagagccugcuucuacguggagcugaucagaggcagacccaaggaggacaaggugugguggaccagcaacagcaucgugagcaugugcagcagcaccgaguuccugggccaguggaacuggcccgacggcgccaagaucgaguacuuccuguga

SEQ ID NO: 186451 - RNA, 1410 nt, Artificial Sequence
  derived and/or modified CDS sequence (opt4) from neuraminidase__InfluenzaA__EPI445995
augaaccccaaccagaagaucaucgcccugggcagcgccagccugaccaucgccaucaucugccugcugauccagaucgccauccuggccaccaccaugacccugcacuucaugcagaacgagcacaccaacagcaccagaaacaagguggugcccugcgagagcaucaucaucgagagaaacaucaccgagaucgugcaccugaacggcaccaucaucgagaaggagagcugccccaaggccguggaguacaagaacuggagcaagccccagugccagaucaccggcuucgcccccuucagcaaggacaacagcaucagacugagcgccggcggcgacaucugggugaccagagagcccuacgugagcugcagccugagcaagugcuaccaguucgcccugggccagggcaccacccugaacaacagacacagcaacggcaccacccacgacagaagccccuacagaacccugcugaugagcgagcugggcgugcccuuccaccugggcaccaagcaggugugcaucgccuggagcagcagcagcugccacgacggcagagccuggcugcacgugugcgugaccggcgacgacaagaacgccaccgccagcgugaucuacggcggcaugcugaccgacagcaucggcagcuggagcaagaacauccugagaacccaggagagcgagugcgugugcaucaacggcaccugcaccguggugaugaccgacggcagcgccagcggcagagccgacaccagaauccuguucaucagagagggcaagaucgugcacaucagcccccugagcggcagcgcccagcacguggaggagugcagcugcuaccccagauaccccgaggugagaugcgugugcagagacaacuggaagggcagcaacagacccgugcuguacaucaacguggccgacuacagcaucgacagcagcuacgugugcagcggccuggugggcgacacccccagaaacgaggacagcagcagcagcagcaacugcagagaccccaacaacgagagaggcggccccggcgugaagggcugggccuucgacaacggcgacgacguguggaugggcagaaccaucaagaaggacagcagagccggcuacgagaccuucagagugguggacggcuggacccuggccaacagcaagagccagaccaacagacaggugaucguggacagcgacaacuggagcggcuacagcggcauguucagcguggagggcaagaccugcaucaacagaugcuucuacguggagcugaucagaggcagaccccaggagaccagagugugguggaccagcaacagcaucaucguguucugcggcaccagcggcaccuacggcaccggcagcuggcccgacggcgccgacaucaacuucaugagcaucuga

SEQ ID NO: 186452 - RNA, 1410 nt, Artificial Sequence
  derived and/or modified CDS sequence (opt4) from neuraminidase__InfluenzaA__EPI470861
augaaccccaaccagaagaucaucgccaucggcagcgugagccugaccaucgccaccaucugccugcugaugcagaucgccauccuggccaccaccaugacccugcacuucaagcagaacgagugcaucaacagcagcaacaaccagguggugcccugcgagcccaucaucaucgagagaaacaucaccgagaucgugcaccugaacagcaccacccuggagaaggagaucugccccaagguggccgacuacagaaacuggagcaagccccagugccagaucaccggcuucgcccccuucagcaaggacaacagcaucagacugagcgccggcggcgacaucugggugaccagagagcccuacgugagcugcggccugggcaagugcuaccaguucgcccugggccagggcaccacccuggagaacaagcacagcaacggcaccgcccacgacagaaccccccacagaacccugcugaugaacgagcugggcgugcccuuccaccuggccaccaagcaggugugcaucgccuggagcagcagcagcugccacgacggcaaggccuggcugcacgugugcgugaccggcgacgacagaaacgccaccgccagcaucaucuacgacggcauccugguggacagcaucggcagcuggagcaagaacauccugagaacccaggagagcgagugcgugugcaucaacggcaccugcgccguggugaugaccgacggcagcgccagcggcagagccgacaccagaauccuguucaucagagagggcaagaucgcccacaucagcccccugagcggcagcgcccagcacguggaggagugcagcugcuaccccagauaccccgaggugagaugcgugugcagagacaacuggaagggcagcaacagacccgugcuguacaucaacauggccaacuacagcaucgacagcagcuacgugugcagcggccuggugggcgacacccccagaaacgacgacagaagcagcagcagcaacugcagagaccccaacaacgagagaggcgcccccggcgugaagggcugggccuucgacaacggcaacgacaucuggaugggcagaaccaucaagaaggacagcagaagcggcuacgagaccuucagagugaucggcggcuggaccaccgccaacagcaagagccagaucaacagacaggugaucguggacagcgacaacagcagcggcuacagcggcaucuucagcguggagggcaagagcugcaucaacagaugcuucuacguggagcugaucagaggcagacccaaggagaccagagugugguggaccagcaacagcaucaucguguucugcggcaccagcggcaccuacggcaccggcagcuggcccgacggcgccaacaucaacuucaugcccaucuga

SEQ ID NO: 186453 - RNA, 1401 nt, Artificial Sequence
  derived and/or modified CDS sequence (opt4) from neuraminidase__InfluenzaA__EPI498036
augaaccccaaccagaagaucaucgccaucggcagcgugagccugaucaucgccaucaucugccugcugaugcagaucgccauccugaccaccaccaugacccugcacuucagacagaacgagugcagcaaccccagcaacaaccaggugaugcccugcgagcccaucauccuggagagaaacaccgugcaccugaacagcaccaucaucgagagagagaucugccccaagguggccgacuacaagaacuggagcaagccccagugccagaucaccggcuucgcccccuucagcaaggacaacagcaucagacugagcgccggcggcgacaucugggugaccagagagcccuacgugagcugcagccuggacaagugcuaccaguucgcccugggccagggcaccacccugaagaacaagcacagcaacggcaccacccacgacagaaccccccacagaacccugcugaugaacgagcugggcgugcccuuccaccugggcaccaagcaggugugcaucgccuggagcagcagcagcugcuacgacggcaaggccuggcugcacaucugcgugaccggcgacgacaagaacgccaccgccagcaucaucuacgacggcaugcugguggacagcaucggcagcuggagcaagaacauccugagaacccaggagagcgagugcgugugcaucaacggcaccugcgccguggugaugaccgacggcagcgccagcggcaaggccgacaccagagugcuguucaucagagagggcaagaucaucaacaucagcccccugagcggcagcgcccagcacguggaggagugcagcugcuaccccagauaccccgaggugagaugcgugugcagagacaacuggaagggcagcaacagacccauccuguacaucaacauggccgacuacagcaucgagagcagcuacgugugcagcggccuggugggcgacacccccagaaacgacgacagcagcagcagcagcaacugcagagaccccaacaacgagagaggcgcccccggcgugaagggcugggccuucgacgacggcaacgacguguggaugggcagaaccaucaagaacggcagcagaagcggcuacgagaccuucagaguggugaacggcuggaccauggccaacagcaagagccagaucaacagacaggugaucguggacagcgacgacuggagcggcuacagcggcaucuucagcguggagggcaagaagugcaucaacagaugcuucuacguggagcugaucagaggcagaccccaggagcccagagugugguggaccagcaacagcaucaucguguucugcggcaccagcggcaccuacggcaccggcagcuggcccgacggcgccaacaucaacuucaugcccguguga

SEQ ID NO: 186454 - RNA, 1410 nt, Artificial Sequence
  derived and/or modified CDS sequence (opt4) from neuraminidase__InfluenzaA__EPI470902
augaaccccaaccagaagaucguggccaucggcagcgccagccugaccaucgccaccaugugccugcugaugcagaucgcccuguucgccaccaccaugacccugcacuucaagcagaccggcugcaccaacagcagcgacaaccaggccgugcccugcggccccaucaucaucgagagaaacaucaccgagaucgugcaccugaacagcaccacccuggagaaggagaccugccccaagagcgccggcuacagaaacuggagcaagccccagugccagaucaccggcuucgcccccuucagcaaggacaacagcaucagacuggccgccgccggcgacaucugggugaccagagagcccuacgugagcugcggccugggcaagugcuaccaguucgcccugggccagggcaccacccuggacaacaagcacagcaacggcaccacccacgacagaaccccccacagaacccugcugaugaacgagcugggcgugcccuuccaccuggccaccaagcaggugugcaucgccuggagcagcagcagcugccacgacggcaaggccuggcugcacgugugcgugaccggcgacgacaagaacgccaccgccagcaucaucuacgacggcauccugguggacagcaucgccagcuggagcaagaacauccugagaacccaggagagcgagugcgugugcaucaacggcaccugcaccguggugaugaccgacggcagcgccagcggcagagccgacaccagaauccuguucaucagagagggcaagaucgugcacaucagcccccugagcggcagcgcccagcacguggaggagugcagcugcuaccccagauaccccgaggugagaugcgugugcagagacaacuggaagggcagcaacagacccgugcuguucaucaacauggccgacuacagcaucgacagcagcuacgugugcagcggccuggugggcgacacccccagaaacgacgacagaagcagcagcagcaacugcagagaccccaacaacgagagaggcgcccccggcgugaagggcugggccuucgacagcggcaacgacaucuggaugggcagaaccaucgagaaggacagcagaagcggcuacgagaccuucagagugaucggcggcuggagcaccgccaacagcaagagccagaucaacagacaggugaucguggacagagacaacagcagcggcuacagcggcaucuucagcguggagggcaagagcugcaucaacagaugcuucuacguggagcugaucagaggcagacccaaggagaacagagugugguggaccagcaacagcaucaucguguucugcggcaccagcggcaccuacggcaccggcagcuggcccgacggcgccaacaucaaccugaugcccaucuga

SEQ ID NO: 186455 - RNA, 1401 nt, Artificial Sequence
  derived and/or modified CDS sequence (opt4) from neuraminidase__InfluenzaA__EPI838241
augaaccccaaccagaagaucaccgccaucggcagcgugagccugaucaucgccaucaucugccugcugaugcagaucgccauccugaccaccaccaugacccugcacuucagacagaacgagugcagcaacagcagcaacaaccaggugaugcccugcgagcccaucaucaucgagagaaacaccgugcaccugaacagcaccaccaucgagagagagaucugccccaagguggccgaguacaagaacuggagcaagccccagugccagaucaccggcuucgcccccuucagcaaggacaacagcaucagacugagcgccagcggcgacaucugggugaccagagagcccuacgugagcugcagccuggacaagugcuaccaguucgcccugggccagggcaccacccugaagaacaagcacagcaacggcaccgcccacgacagaaccccccacagaacccugcugaugaacgagcugggcgugcccuuccaccugggcaccaagcaggugugcaucgccuggagcagcagcagcugcuacgacggcaaggccuggcugcacgugugcgugaccggcgacgacaagaacgccaccgccagcaucaucuacgacggcaugcugguggacagcaucggcagcuggagcaagaacauccugagaacccaggagagcgagugcgugugcaucaacggcaccugcgccguggugaugaccgacggcagcgccagcggcaaggccgacaccagagugcuguucaucagagagggcaagaucaucaacaucagcccccugagcggcagcgcccagcacguggaggagugcagcugcuaccccagauaccccgaggugagaugcgugugcagagacaacuggaagggcagcaacagacccauccuguacaucaacauggccgacuacagcaucgagagcagcuacgugugcagcggccuggugggcgacacccccagaaacgacgacagcagcagcagcagcaacugcagagaccccaacaacgagagaggcgcccccggcgugaagggcugggccuucgacgacggcaacgacguguggaugggcagaaccaucaagaacggcagcagaagcggcuacgagaccuucagaguggugaacggcuggaccauggccaacagcaagagccagaucaacagacaggugaucguggagagcgacgacuggagcggcuacagcggcaucuucagcguggagggcaagaagugcaucaacagaugcuucuacguggagcugaucagaggcagaccccaggagcccagagugugguggaccagcaacagcaucaucguguucugcggcaccagcggcaccuacggcaccggcagcuggcccgacggcgccaacaucaacuucaugcccaucuga

SEQ ID NO: 186456 - RNA, 1401 nt, Artificial Sequence; identical to SEQ ID NO: 186455
  derived and/or modified CDS sequence (opt4) from neuraminidase__InfluenzaA__EPI680525

SEQ ID NO: 186457 - RNA, 1401 nt, Artificial Sequence; identical to SEQ ID NO: 186063
  derived and/or modified CDS sequence (opt4) from neuraminidase__InfluenzaA__EPI690481

SEQ ID NO: 186458 - RNA, 1755 nt, Artificial Sequence
  derived and/or modified CDS sequence (opt4) from hemagglutinin__InfluenzaB__ABL76276
augaaggccaucaucgugcugcugaugguggugaccagcaacgccgacagaaucugcaccggcaucaccagcagcaacagcccccacguggugaagaccgccacccagggcgaggugaacgugaccggcgugaucccccugaccaccacccccaccaagagccacuucgccaaccugaagggcaccaagaccagaggcaagcugugccccaccugccugaacugcaccgaccuggacguggcccugggcagacccaugugcgugggcaucacccccagcgccaaggccagcauccugcacgaggugagacccgugaccagcggcugcuuccccaucaugcacgacagaaccaagaucagacagcugcccaaccugcugagaggcuacgagaagaucagacugagcacccagaacgugaucaacgccgagaaggcccccggcggccccuacagacugggcaccagcggcagcugccccaacgccaccagcagaagcggcuucuucgccaccauggccugggccgugcccagagacaacaacaagaccgccaccaacccccugaccguggaggugccccacaucugcaccaaggaggaggaccagaucaccguguggggcuuccacagcgacaacaagacccagaugaagaaccuguacggcgacagcaacccccagaaguucaccagcagcgccaacggcgugaccacccacuacgugagccagaucggcggcuuccccgaccagaccgaggacggcggccugccccagagcggcagaaucgugguggacuacauggugcagaagcccggcaagaccggcaccaucguguaccagagaggcauccugcugccccagaagguguggugcgccagcggcagaagcaaggugaucaagggcagccugccccugaucggcgaggccgacugccugcacgagaaguacggcggccugaacaagagcaagcccuacuacaccggcgagcacgccaaggccaucggcaacugccccaucugggugaagaccccccugaagcuggccaacggcaccaaguacagaccccccgccaagcugcugaaggagagaggcuucuucggcgccaucgccggcuuccuggagggcggcugggagggcaugaucgccggcuggcacggcuacaccagccacggcgcccacggcguggccguggccgccgaccugaagagcacccaggaggccaucaacaagaucaccaagaaccugaacagccugagcgagcuggaggugaagaaccugcagagacugagcggcgccauggacgagcugcacaacgagauccuggagcuggacgagaagguggacgaccugagagccgacaccaucagcagccagaucgagcuggccgugcugcugagcaacgagggcaucaucaacagcgaggacgagcaccugcuggcccuggagagaaagcugaagaagaugcugggccccagcgccguggacaucggcaacggcugcuucgagaccaagcacaagugcaaccagaccugccuggacagaaucgccgccggcaccuucaacgccggcgaguucagccugcccaccuucgacagccugaacaucaccgccgccagccugaacgacgacggccuggacaaccacaccauccugcuguacuacagcaccgccgccagcagccuggccgugacccugaugaucgccaucuucaucguguacaugaucagcagagacaacgugagcugcagcaucugccuguga

SEQ ID NO: 186459 - RNA, 1755 nt, Artificial Sequence
  derived and/or modified CDS sequence (opt4) from hemagglutinin__InfluenzaB__ABL76287
augaaggccaucaucgugcugcugaugguggugaccagcaacgccgacagaaucugcaccggcaucaccagcagcaacagcccccacguggugaagaccgccacccagggcgaggugaacgugaccggcgugaucccccugaccaccacccccaccaagagccacuucgccaaccugaagggcaccaagaccagaggcaagcugugccccaccugccugaacugcaccgaccuggacguggcccugggcagacccaugugcgugggcgugacccccagcgccaaggccagcauccugcacgaggugagacccgugaccagcggcugcuuccccaucaugcacgacagaaccaagaucagacagcugcccaaccugcugagaggcuacgagaagaucagacugagcacccagaacgugaucaacgccgagaaggcccccggcggccccuacagacugggcaccagcggcagcugccccaacgccaccagcagaagcggcuucuucgccaccauggccugggccgugcccagagacaacaacaagaccgccaccaacccccugaccaucgaggugccccacaucugcaccaaggaggaggaccagaucaccguguggggcuuccacagcgacaacaagauccagaugaagaaccuguacggcgacagcaacccccagaaguucaccagcagcgccaacggcgugaccacccacuacgugagccagaucggcggcuuccccgaccagaccgaggacggcggccugccccagagcggcagaaucgugguggacuacauggugcagaagcccggcaagaccggcaccaucguguaccagagaggcauccugcugccccagaagguguggugcgccagcggcagaagcaaggugaucaagggcagccugccccugaucggcgaggccgacugccugcacgagaaguacggcggccugaacaagagcaagcccuacuacaccggcgagcacgccaaggccaucggcaacugccccaucugggugaagaccccccugaagcuggccaacggcaccaaguacagaccccccgccaagcugcugaaggagagaggcuucuucggcgccaucgccggcuuccuggagggcggcugggagggcaugaucgccggcuggcacggcuacaccagccacggcgcccacggcguggccguggccgccgaccugaagagcacccaggaggccaucaacaagaucaccaagaaccugaacagccugagcgagcuggaggugaagaaccugcagagacugagcggcgccauggacgagcugcacaacgagauccuggagcuggacgagaagguggacgaccugagagccgacaccaucagcagccagaucgagcuggccgugcugcugagcaacgagggcaucaucaacagcgaggacgagcaccugcuggcccuggagagaaagcugaagaagaugcugggccccagcgccguggacaucggcaacggcugcuucgagaccaagcacaagugcaaccagaccugccuggacagaaucgccgccggcaccuucaacgccggcgaguucagccugcccaccuucgacagccugaacaucaccgccgccagccugaacgacgacggccuggacaaccacaccauccugcuguacuacagcaccgccgccagcagccuggccgugacccugaugaucgccaucuucaucguguacaugaucagcagagacaacgugagcugcagcaucugccuguga

SEQ ID NO: 186460 - RNA, 1755 nt, Artificial Sequence
  derived and/or modified CDS sequence (opt4) from hemagglutinin__InfluenzaB__ABL76298
augaaggccaucaucgugcugcugaugguggugaccagcaacgccgacagaaucugcaccggcaucaccagcagcaacagcccccacguggugaagaccgccacccagggcgaggugaacgugaccggcgugaucccccugaccaccacccccaccaagagccacuucgccaaccugaagggcaccaagaccagaggcaagcugugccccaccugccugaacugcaccgaccuggacguggcccugggcagacccaugugcgugggcgugacccccagcgccaaggccagcauccugcacgaggugagacccgugaccagcggcugcuuccccaucaugcacgacagaaccaagaucagacagcugcccaaccugcugagaggcuacgagaagaucagacugagcacccagaacgugaucaacgccgagaaggcccccggcggccccuacagacugggcaccagcggcagcugccccaacgccaccagcagaagcggcuucuucgccaccauggccugggccgugcccagagacaacaacaagaccgccaccaacccccugaccguggaggugccccacaucugcaccaaggaggaggaccagaucaccguguggggcuuccacagcgacaacaagacccagaugaagaaccuguacggcgacagcaacccccagaaguucaccagcagcgccaacggcgugaccacccacuacgugagccagaucggcggcuuccccgaccagaccgaggacggcggccugccccagagcggcagaaucgugguggacuacauggugcagaagcccggcaagaccggcaccaucguguaccagagaggcauccugcugccccagaagguguggugcgccagcggcagaagcaaggugaucaagggcagccugccccugaucggcgaggccgacugccugcacgagaaguacggcggccugaacaagagcaagcccuacuacaccggcgagcacgccaaggccaucggcaacugccccaucugggugaagaccccccugaagcuggccaacggcaccaaguacagaccccccgccaagcugcugaaggagagaggcuucuucggcgccaucgccggcuuccuggagggcggcugggagggcaugaucgccggcuggcacggcuacaccagccacggcgcccacggcguggccguggccgccgaccugaagagcacccaggaggccaucaacaagaucaccaagaaccugaacagccugagcgagcuggaggugaagaaccugcagagacugagcggcgccauggacgagcugcacaacgagauccuggagcuggacgagaagguggacgaccugagagccgacaccaucagcagccagaucgagcuggccgugcugcugagcaacgagggcaucaucaacagcgaggacgagcaccugcuggcccuggagagaaagcugaagaagaugcugggccccagcgccguggacaucggcaacggcugcuucgagaccaagcacaagugcaaccagaccugccuggacagaaucgccgccggcaccuucaacgccggcgaguucagccugcccaccuucgacagccugaacaucaccgccgccagccugaacgacgacggccuggacaaccacaccauccugcuguacuacagcaccgccgccagcagccuggccgugacccugaugaucgccaucuucaucguguacauggugagcagagacaacgugagcugcagcaucugccuguga

SEQ ID NO: 186461 - RNA, 1755 nt, Artificial Sequence
  derived and/or modified CDS sequence (opt4) from hemagglutinin__InfluenzaB__ABL76309
augaaggccaucaucgugcugcugaugguggugaccagcaacgccgacagaaucugcaccggcaucaccagcagcaacagcccccacguggugaagaccgccacccagggcgaggugaacgugaccggcgugaucccccugaccaccacccccaccaagagccacuucgccaaccugaagggcaccaagaccagaggcaagcugugccccaccugccugaacugcaccgaccuggacguggcccugggcagacccaugugcgugggcgugacccccagcgccaaggccagcauccugcacgaggugagacccgugaccagcggcugcuuccccaucaugcacgacagaaccaagaucagacagcugcccaaccugcugagaggcuacgagaagaucagacugagcacccagaacgugaucaacgccgagaaggcccccggcggccccuacagacugggcaccagcggcagcugccccaacgccaccagcagaagcggcuucuucgccaccauggccugggccgugcccagagacaacaacaagaccgccaccaacccccugaccguggaggugccccacaucugcaccaaggaggaggaccagaucaccguguggggcuuccacagcgacaacaagacccagaugaagaaccuguacggcgacagcaacccccagaaguucaccagcagcgccaacggcgugaccacccacuacgugagccagaucggcggcuuccccgaccagaccgaggacggcggccugccccagagcggcagaaucgugguggacuacauggugcagagacccggcaagaccggcaccaucguguaccagagaggcauccugcugccccagaagguguggugcgccagcggcagaagcaaggugaucaagggcagccugccccugaucggcgaggccgacugccugcacgagaaguacggcggccugaacaagagcaagcccuacuacaccggcgagcacgccaaggccaucggcaacugccccaucugggugaagaccccccugaagcuggccaacggcaccaaguacagaccccccgccaagcugcugaaggagagaggcuucuucggcgccaucgccggcuuccuggagggcggcugggagggcaugaucgccggcuggcacggcuacaccagccacggcgcccacggcguggccguggccgccgaccugaagagcacccaggaggccaucaacaagaucaccaagaaccugaacagccugagcgagcuggaggugaagaaccugcagagacugagcggcgccauggacgagcugcacaacgagauccuggagcuggacgagaagguggacgaccugagagccgacaccaucagcagccagaucgagcuggccgugcugcugagcaacgagggcaucaucaacagcgaggacgagcaccugcuggcccuggagagaaagcugaagaagaugcugggccccagcgccguggacaucggcaacggcugcuucgagaccaagcacaagugcaaccagaccugccuggacagaaucgccgccggcaccuucaacgccgaggaguucagccugcccaccuucgacagccugaacaucaccgccgccagccugaacgacgacggccuggacaaccacaccauccugcuguacuacagcaccgccgccagcagccuggccgugacccugaugaucgccaucuucaucguguacaugaucagcagagacaacgugagcugcagcaucugccuguga

SEQ ID NO: 186462 - RNA, 1755 nt, Artificial Sequence
  derived and/or modified CDS sequence (opt4) from hemagglutinin__InfluenzaB__ABL76331
augaaggccaucaucgugcugcugaugguggugaccagcaacgccgacagaaucugcaccggcaucaccagcagcaacagcccccacguggugaagaccgccacccagggcgaggugaacgugaccggcgugaucccccugaccaccacccccaccaagagccacuucgccaaccugaagggcaccaagaccagaggcaagcugugccccaccugccugaacugcaccgaccuggacguggcccugggcagacccaugugcgugggcaucacccccagcgccaaggccagcauccugcacgaggugagacccgugaccagcggcugcuuccccaucaugcacgacagaaccaagaucagacagcugcccaaccugcugagaggcuacgagaagaucagacugagcacccagaacgugaucaacgccgagaaggcccccggcggccccuacagacugggcaccagcggcagcugccccaacgccaccagcagaagcggcuucuucgccaccauggccugggccgugcccagagacaacaacaagaccgccaccaacccccugaccaucgaggugccccacaucugcaccaaggaggaggaccagaucaccguguggggcuuccacagcgacaacaagacccagaugaagaaccuguacggcgacagcaacccccagaaguucaccagcagcgccaacggcgugaccacccacuacgugagccagaucggcggcuuccccgaccagaccgaggacggcggccugccccagagcggcagaaucgugguggacuacauggugcagaagcccggcaagaccggcaccaucguguaccagagaggcauccugcugccccagaagguguggugcgccagcggcagaagcaaggugaucaagggcagccugccccugaucggcgaggccgacugccugcacgagaaguacggcggccugaacaagagcaagcccuacuacaccggcgagcacgccaaggccaucggcaacugccccaucugggugaagaccccccugaagcuggccaacggcaccaaguacagaccccccgccaagcugcugaaggagagaggcuucuucggcgccaucgccggcuuccuggagggcggcugggagggcaugaucgccggcuggcacggcuacaccagccacggcgcccacggcguggccguggccgccgaccugaagagcacccaggaggccaucaacaagaucaccaagaaccugaacagccugagcgagcuggaggugaagaaccugcagagacugagcggcgccauggacgagcugcacaacgagauccuggagcuggacgagaagguggacgaccugagagccgacaccaucagcagccagaucgagcuggccgugcugcugagcaacgagggcaucaucaacagcgaggacgagcaccugcuggcccuggagagaaagcugaagaagaugcugggccccagcgccguggacaucggcaacggcugcuucgagaccaagcacaagugcaaccagaccugccuggacagaaucgccgccggcaccuucaacgccggcgaguucagccugcccaccuucgacagccugaacaucaccgccgccagccugaacgacgacggccuggacaaccacaccauccugcuguacuacagcaccgccgccagcagccuggccgugacccugaugaucgccaucuucaucguguacaugaucagcagagacaacgugagcugcagcaucugccuguga

SEQ ID NO: 186463 - RNA, 1755 nt, Artificial Sequence
  derived and/or modified CDS sequence (opt4) from hemagglutinin__InfluenzaB__ABL76342
augaaggccaucaucgugcugcugaugguggugaccagcaacgccgacagaaucugcaccggcaucaccagcagcaacagcccccacguggugaagaccgccacccagggcgaggugaacgugaccggcgugaucccccugaccaccacccccaccaagagccacuucgccaaccugaagggcaccaagaccagaggcaagcugugccccaccugccugaacugcaccgaccuggacguggcccugggcagacccaugugcgugggcgugacccccagcgccaaggccagcauccugcacgaggugagacccgugaccagcggcugcuuccccaucaugcacgacagaaccaagaucagacagcugcccaaccugcugagaggcuacgagaagaucagacugagcacccagaacgugaucaacgccgagaaggcccccggcggccccuacagacugggcaccagcggcagcugccccaacgccaccagcagaagcggcuucuucgccaccauggccugggccgugcccagagacaacaacaagaccgccaccaacccccugaccguggaggugccccacaucugcaccaaggaggaggaccagaucaccguguggggcuuccacagcgacaacaagacccagaugaagaaccuguacggcgacagcaacccccagaaguucaccagcagcgccaacggcgugaccacccacuacgugagccagaucggcgacuuccccgaccagaccgaggacggcggccugccccagagcggcagaaucgugguggacuacauggugcagaagcccggcaagaccggcaccaucguguaccagagaggcauccugcugccccagaagguguggugcgccagcggcagaagcaaggugaucagaggcagccugccccugaucggcgaggccgacugccugcacgagaaguacggcggccugaacaagagcaagcccuacuacaccggcgagcacgccaaggccaucggcaacugccccaucugggugaagaccccccugaagcuggccaacggcaccaaguacagaccccccgccaagcugcugaaggagagaggcuucuucggcgccaucgccggcuuccuggagggcggcugggagggcaugaucgccggcuggcacggcuacaccagccacggcgcccacggcguggccguggccgccgaccugaagagcacccaggaggccaucaacaagaucaccaagaaccugaacagccugagcgagcuggaggugaagaaccugcagagacugagcggcgccauggacgagcugcacaacgagauccuggagcuggacgagaagguggacgaccugagagccgacaccaucagcagccagaucgagcuggccgugcugcugagcaacgagggcaucaucaacagcgaggacgagcaccugcuggcccuggagagaaagcugaagaagaugcugggccccagcgccguggacaucggcaacggcugcuucgagaccaagcacaagugcaaccagaccugccuggacagaaucgccgccggcaccuucaacgccggcgacuucagccugcccaccuucgacagccugaacaucaccgccgccagccugaacgacgacggccuggacaaccacaccauccugcuguacuacagcaccgccgccagcagccuggccgugacccugaugaucgccaucuucaucguguacaugaucagcagagacaacgugagcugcagcaucugccuguga

SEQ ID NO: 186464 - RNA, 1755 nt, Artificial Sequence
  derived and/or modified CDS sequence (opt4) from hemagglutinin__InfluenzaB__ABL76353
augaaggccaucaucgugcugcugaugguggugaccagcaacgccgacagaaucugcaccggcaucaccagcagcaacagcccccacguggugaagaccgccacccagggcgaggugaacgugaccggcgugaucccccugaccaccacccccaccaagagccacuucgccaaccugaagggcaccaagaccagaggcaagcugugccccaccugccugaacugcaccgaccuggacguggcccugggcagacccaugugcgugggcgugacccccagcgccaaggccagcauccugcacgaggugagacccgugaccagcggcugcuuccccaucaugcacgacagaaccaagaucagacagcugcccaaccugcugagaggcuacgagaagaucagacugagcacccagaacgugaucaacgccgagaaggcccccggcggccccuacagacugggcaccagcggcagcugccccaacgccaccagcagaagcggcuucuucgccaccauggccugggccgugcccagagacaacaacaagaccgccaccaacccccugaccguggaggugccccacaucugcaccaaggaggaggaccagaucaccguguggggcuuccacagcgacaacaagacccagaugaagaaccuguacggcgacagcaacccccagaaguucaccagcagcgccaacggcgugaccacccacuacgugagccagaucggcggcuuccccgaccagaccgaggacggcggccugccccagagcggcagaaucgugguggacuacauggugcagaagcccggcaagaccggcaccaucguguaccagagaggcauccugcugccccagaagguguggugcgccagcggcagaagcaaggugaucagaggcagccugccccugaucggcgaggccgacugccugcacgagaaguacggcggccugaacaagagcaagcccuacuacaccggcgagcacgccaaggccaucggcaacugccccaucugggugaagaccccccugaagcuggccaacggcaccaaguacagaccccccgccaagcugcugaaggagagaggcuucuucggcgccaucgccggcuuccuggagggcggcugggagggcaugaucgccggcuggcacggcuacaccagccacggcgcccacggcguggccguggccgccgaccugaagagcacccaggaggccaucaacaagaucaccaagaaccugaacagccugagcgagcuggaggugaagaaccugcagagacugagcggcgccauggacgagcugcacaacgagauccuggagcuggacgagaagguggacgaccugagagccgacaccaucagcagccagaucgagcuggccgugcugcugagcaacgagggcaucaucaacagcgaggacgagcaccugcuggcccuggagagaaagcugaagaagaugcugggccccagcgccguggacaucggcaacggcugcuucgagaccaagcacaagugcaaccagaccugccuggacagaaucgccgccggcaccuucaacgccggcgacuucagccugcccaccuucgacagccugaacaucaccgccgccagccugaacgacgacggccuggacaaccacaccauccugcuguacuacagcaccgccgccagcagccuggccgugacccugaugaucgccaucuucaucguguacaugaucagcagagacaacgugagcugcagcaucugccuguga

SEQ ID NO: 186465 - RNA, 1755 nt, Artificial Sequence
  derived and/or modified CDS sequence (opt4) from hemagglutinin__InfluenzaB__ABL76375
augaaggccaucaucgugcugcugaugguggugaccagcaacgccgacagaaucugcaccggcaucaccagcagcaacagcccccacguggugaagaccgccacccagggcgaggugaacgugaccggcgccaucccccugaccaccacccccaccaagagccacuucgccaaccugaagggcaccaagaccagaggcaagcugugccccaccugccugaacugcaccgaccuggacguggcccugggcagacccaugugcgugggcaucacccccagcgccaaggccagcauccugcacgaggugagacccgugaccagcggcugcuuccccaucaugcacgacagaaccaagaucagacagcugcccaaccugcugagaggcuacgagaagaucagacugagcacccagaacgugaucaacgccgagaaggcccccggcggccccuacagacugggcaccagcggcagcugccccaacgccaccagcaagagcggcuucuucgccaccauggccugggccgugcccagagacaacaacaagaccgccaccaacccccugaccguggaggugccccacaucugcaccaaggaggaggaccagaucaccguguggggcuuccacagcgacaacaagacccagaugaagaaccuguacggcgacagcaacccccagaaguucaccagcagcgccaacggcaucaccacccacuacgugagccagaucggcggcuuccccgaccagaccgaggacggcggccugccccagagcggcagaaucgugguggacuacauggugcagaagcccggcaagaccggcaccaucguguaccagagaggcauccugcugccccagaagguguggugcgccagcggcagaagcaaggugaucaagggcagccugccccugaucggcgaggccgacugccugcacgagaaguacggcggccugaacaagagcaagcccuacuacaccggcgagcacgccaaggccaucggcaacugccccaucugggugaagaccccccugaagcuggccaacggcaccaaguacagaccccccgccaagcugcugaaggagagaggcuucuucggcgccaucgccggcuuccuggagggcggcugggagggcaugaucgccggcuggcacggcuacaccagccacggcgcccacggcguggccguggccgccgaccugaagagcacccaggaggccaucaacaagaucaccaagaaccugaacagccugagcgagcuggaggugaagaaccugcagagacugagcggcgccauggacgagcugcacaacgagauccuggagcuggacgagaagguggacgaccugagagccgacaccaucagcagccagaucgagcuggccgugcugcugagcaacgagggcaucaucaacagcgaggacgagcaccugcuggcccuggagagaaagcugaagaagaugcugggccccagcgccguggacaucggcaacggcugcuucgagaccaagcacaagugcaaccagaccugccuggacagaaucgccgccggcaccuucaacgccggcgaguucagccugcccaccuucgacagccugaacaucaccgccgccagccugaacgacgacggccuggacaaccacaccauccugcuguacuacagcaccgccgccagcagccuggccgugacccugaugaucgccaucuucaucguguacaugaucagcagagacaacgugagcugcagcaucugccuguga

SEQ ID NO: 186466 - RNA, 1755 nt, Artificial Sequence; identical to SEQ ID NO: 186465
  derived and/or modified CDS sequence (opt4) from hemagglutinin__InfluenzaB__ABL76386

SEQ ID NO: 186467 - RNA, 1755 nt, Artificial Sequence
  derived and/or modified CDS sequence (opt4) from hemagglutinin__InfluenzaB__ABL76408
augaaggccaucaucgugcugcugaugguggugaccagcaacgccgacagaaucugcaccggcaucaccagcagcaacagcccccacguggugaagaccgccacccagggcgaggugaacgugaccggcgccaucccccugaccaccacccccaccaagagccacuucgccaaccugaagggcaccaagaccagaggcaagcugugccccaccugcuucaacugcaccgaccuggacguggcccugggcagacccaugugcgugggcaucacccccagcgccaaggccagcauccugcacgaggugagacccgugaccagcggcugcuuccccaucaugcacgacagaaccaagaucagacagcugcccaaccugcugagaggcuacgagaagaucagacugagcacccagaacgugaucgacgccgagaaggcccccggcggccccuacagacugggcaccagcggcagcugccccaacgccaccagcaagagcggcuucuucgccaccauggccugggccgugcccagaggcaacaacaagaccgccaccaacccccugaccguggaggugccccacaucugcaccaaggaggaggaccagaucaccguguggggcuuccacagcgacaacaagacccagaugaagaaccuguacggcgacagcaacccccagaaguucaccagcagcgccaacggcaucaccacccacuacgugagccagaucggcggcuuccccgaccagaccgaggacggcggccugccccagagcggcagaaucgugguggacuacauggugcagaagcccggcaagaccggcaccaucguguaccagagaggcauccugcugccccagaagguguggugcgccagcggcagaagcaaggugaucaagggcagccugccccugaucggcgaggccgacugccugcacgagaaguacggcggccugaacaagagcaagcccuacuacaccggcgagcacgccaaggccaucggcaacugccccaucugggugaagaccccccugaagcuggccaacggcaccaaguacagaccccccgccaagcugcugaaggagagaggcuucuucggcgccaucgccggcuuccuggagggcggcugggagggcaugaucgccggcuggcacggcuacaccagccacggcgcccacggcguggccguggccgccgaccugaagagcacccaggaggccaucaacaagaucaccaagaaccugaacagccugagcgagcuggaggugaagaaccugcagagacugagcggcgccauggacgagcugcacaacgagauccuggagcuggacgagaagguggacgaccugagagccgacaccaucagcagccagaucgagcuggccgugcugcugagcaacgagggcaucaucaacagcgaggacgagcaccugcuggcccuggagagaaagcugaagaagaugcugggccccagcgccguggacaucggcaacggcugcuucgagaccaagcacaagugcaaccagaccugccuggacagaaucgccgccggcaccuucaacgccggcgaguucagccugcccaccuucgacagccugaacaucaccgccgccagccugaacgacgacggccuggacaaccacaccauccugcuguacuacagcaccgccgccagcagccuggccgugacccugaugaucgccaucuucaucguguacaugaucagcagagacaacgugagcugcagcaucugccuguga

SEQ ID NO: 186468 - RNA, 1755 nt, Artificial Sequence
  derived and/or modified CDS sequence (opt4) from hemagglutinin__InfluenzaB__ABL76419
augaaggccaucaucgugcugcugaugguggugaccagcaacgccgacagaaucugcaccggcaucaccagcagcaacagcccccacguggugaagaccgccacccagggcgaggugaacgugaccggcgccaucccccugaccaccacccccaccaagagccacuucgccaaccugaagggcaccaagaccagaggcaagcugugccccaccugcuucaacugcaccgaccuggacguggcccugggcagacccaugugcgugggcaucacccccagcgccaaggccagcauccugcacgagaucagacccgugaccagcggcugcuuccccaucaugcacgacagaaccaagaucagacagcugcccaaccugcugagaggcuacgagaagaucagacugagcacccagaacgugaucgacgccgagaaggcccccggcggccccuacagacugggcaccagcggcagcugccccaacgccaccagcaagagcggcuucuucgccaccauggccugggccgugcccagaggcaacaacaagaccgccaccaacccccugaccguggaggugccccacaucugcaccaaggaggaggaccagaucaccguguggggcuuccacagcgacaacaagacccagaugaagaaccuguacggcgacagcaacccccagaaguucaccagcagcgccaacggcaucaccacccacuacgugagccagaucggcggcuuccccgaccagaccgaggacggcggccugccccagagcggcagaaucgugguggacuacauggugcagaagcccggcaagaccggcaccaucguguaccagagaggcauccugcugccccagaagguguggugcgccagcggcagaagcaaggugaucaagggcagccugccccugaucggcgaggccgacugccugcacgagaaguacggcggccugaacaagagcaagcccuacuacaccggcgagcacgccaaggccaucggcaacugccccaucugggugaagaccccccugaagcuggccaacggcaccaaguacagaccccccgccaagcugcugaaggagagaggcuucuucggcgccaucgccggcuuccuggagggcggcugggagggcaugaucgccggcuggcacggcuacaccagccacggcgcccacggcguggccguggccgccgaccugaagagcacccaggaggccaucaacaagaucaccaagaaccugaacagccugagcgagcuggaggugaagaaccugcagagacugagcggcgccauggacgagcugcacaacgagauccuggagcuggacgagaagguggacgaccugagagccgacaccaucagcagccagaucgagcuggccgugcugcugagcaacgagggcaucaucaacagcgaggacgagcaccugcuggcccuggagagaaagcugaagaagaugcugggccccagcgccguggacaucggcaacggcugcuucgagaccaagcacaagugcaaccagaccugccuggacagaaucgccgccggcaccuucaacgccggcgaguucagccugcccaccuucgacagccugaacaucaccgccgccagccugaacgacgacggccuggacaaccacaccauccugcuguacuacagcaccgccgccagcagccuggccgugacccugaugaucgccaucuucaucguguacaugaucagcagagacaacgugagcugcagcaucugccuguga

SEQ ID NO: 186469 - RNA, 1758 nt, Artificial Sequence
  derived and/or modified CDS sequence (opt4) from hemagglutinin__InfluenzaB__ABL76441
augaaggccaucaucgugcugcugaugguggugaccagcaacgccgacagaaucugcaccggcaucaccagcagcaacagcccccacguggugaagaccgccacccagggcgaggugaacgugaccggcgugaucccccugaccaccacccccaccaagagccacuucgccaaccugaagggcaccaagaccagaggcaagcugugccccaagugccugaacugcaccgaccuggacguggcccugggcagacccaagugcaccggcaacauccccagcgccaaggugagcauccugcacgaggugagacccgugaccagcggcugcuuccccaucaugcacgacagaaccaagaucagacagcugcccaaccugcugagaggcuacgagcacaucagacugagcacccacaacgugaucaacgccgagaaggcccccggcggccccuacaagaucggcaccagcggcagcugccccaacgugaccaacggcaacggcuucuucgccaccauggccugggccgugcccaagaacgacaacaacaagaccgccaccaacagccugaccaucgaggugcccuacaucugcaccgagggcgaggaccagaucaccguguggggcuuccacagcgacaacgagacccagauggccaagcuguacggcgacagcaagccccagaaguucaccagcagcgccaacggcgugaccacccacuacgugagccagaucggcggcuuccccaaccagaccgaggacggcggccugccccagagcggcagaaucgugguggacuacauggugcagaagagcggcaagcccggcaccaucaccuaccagagaggcauccugcugccccagaagguguggugcgccagcggcagaagcaaggugaucaagggcagccugccccugaucggcgaggccgacugccugcacgagaaguacggcggccugaacaagagcaagcccuacuacaccggcgagcacgccaaggccaucggcaacugccccaucugggugaagaccccccugaagcuggccaacggcaccaaguacagaccccccgccaagcugcugaaggagagaggcuucuucggcgccaucgccggcuuccuggagggcggcugggagggcaugaucgccggcuggcacggcuacaccagccacggcgcccacggcguggccguggccgccgaccugaagagcacccaggaggccaucaacaagaucaccaagaaccugaacagccugagcgagcuggaggugaagaaccugcagagacugagcggcgccauggacgagcugcacaacgagauccuggagcuggacgagaagguggacgaccugagagccgacaccaucagcagccagaucgagcuggccgugcugcugagcaacgagggcaucaucaacagcgaggacgagcaccugcuggcccuggagagaaagcugaagaagaugcugggccccagcgccguggagaucggcaacggcugcuucgagaccaagcacaagugcaaccagaccugccuggacagaaucgccgccggcaccuucgacgccggcgaguucagccugcccaccuucgacagccugaacaucaccgccgccagccugaacgacgacgagcuggacaaccacaccauccugcuguacuacagcaccgccgccagcagccuggccgugacccugaugaucgccaucuucgugguguacauggugagcagagacaacgugagcugcagcaucugccuguga

SEQ ID NO: 186470 - RNA, 1758 nt, Artificial Sequence
  derived and/or modified CDS sequence (opt4) from hemagglutinin__InfluenzaB__ABL76463
augaaggccaucaucgugcugcugaugguggugaccagcaacgccgacagaaucugcaccggcaucaccagcagcaacagcccccacguggugaagaccgccacccagggcgaggugaacgugaccggcgugaucccccugaccaccacccccaccaagagccacuucgccaaccugaagggcaccaagaccagaggcaagcugugccccaagugccugaacugcaccgaccuggacguggcccugggcagacccaagugcaccggcaacauccccagcgccaaggugagcauccugcacgaggugagacccgugaccagcggcugcuuccccaucaugcacgacagaaccaagaucagacagcugcccaaccugcugagaggcuacgagcacaucagacugagcacccacaacgugaucaacgccgagaaggcccccggcggccccuacaagaucggcaccagcggcagcugccccaacgugaccaacggcaacggcuucuucgccaccauggccugggccgugcccaagaacgacaacaacaagaccgccaccaacagccugaccaucgaggugcccuacaucugcaccgagggcgaggaccagaucaccguguggggcuuccacagcgacaacgagacccagauggccaagcuguacggcgacagcaagccccagaaguucaccagcagcgccaacggcgugaccacccacuacgugagccagaucggcggcuuccccaaccagaccgaggacggcggccugccccagagcggcagaaucgugguggacuacauggugcagaagagcggcaagaccggcaccaucaccuaccagagaggcauccugcugccccagaagguguggugcgccagcggcagaagcaaggugaucaagggcagccugccccugaucggcgaggccgacugccugcacgagaaguacggcggccugaacaagagcaagcccuacuacaccggcgagcacgccaaggccaucggcaacugccccaucugggugaagaccccccugaagcuggccaacggcaccaaguacagaccccccgccaagcugcugaaggagagaggcuucuucggcgccaucgccggcuuccuggagggcggcugggagggcaugaucgccggcuggcacggcuacaccagccacggcgcccacggcguggccguggccgccgaccugaagagcacccaggaggccaucaacaagaucaccaagaaccugaacagccugagcgagcuggaggugaagaaccugcagagacugagcggcgccauggacgagcugcacaacgagauccuggagcuggacgagaaggugaacgaccugagagccgacaccaucagcagccagaucgagcuggccgugcugcugagcaacgagggcaucaucaacagcgaggacgagcaccugcuggcccuggagagaaagcugaagaagaugcugggccccagcgccguggagaucggcaacggcugcuucgagaccaagcacaagugcaaccagaccugccuggacagaaucgccgccggcaccuucgacgccggcgaguucagccugcccaccuucgacagccugaacaucaccgccgccagccugaacgacgacggccuggacaaccacaccauccugcuguacuacagcaccgccgccagcagccuggccgugacccugaugaucgccaucuucgugguguacauggugagcagagacaacgugagcugcagcaucugccuguga

SEQ ID NO: 186471 - RNA, 1758 nt, Artificial Sequence
  derived and/or modified CDS sequence (opt4) from hemagglutinin__InfluenzaB__ABL76474
augaaggccaucaucgugcugcugaugguggugaccagcaacgccgacagaaucugcaccggcaucaccagcagcaacagcccccacguggugaagaccgccacccagggcgaggugaacgugaccggcgugaucccccugaccaccacccccaccaagagccacuucgccaaccugaagggcaccaagaccagaggcaagcugugccccaagugccugaacugcaccgaccuggacguggcccugggcagacccaagugcaccggcaacauccccagcgccaaggugagcauccugcacgaggugagacccgugaccagcggcugcuuccccaucaugcacgacagaaccaagaucagacagcugcccaaccugcugagaggcuacgagcacaucagacugagcacccacaacgugaucaacgccgagaaggcccccggcggccccuacaagaucggcaccagcggcagcugccccaacgugaccaacggcaacggcuucuucgccaccauggccugggccgugcccaagaacgacaacaacaagaccgccaccaacagccugaccaucgaggugcccuacaucugcaccgagggcgaggaccagaucaccguguggggcuuccacagcgacaacgagacccagauggccaagcuguacggcgacagcaagccccagaaguucaccagcagcgccaacggcgugaccacccacuacgugagccagaucggcggcuuccccaaccagaccgaggacggcggccugccccagagcggcagaaucgugguggacuacauggugcagaagagcggcaagaccggcaccaucaccuaccagagaggcauccugcugccccagaagguguggugcgccagcggcagaagcaaggugaucaagggcagccugccccugaucggcgaggccgacugccugcacgagaaguacggcggccugaacaagagcaagcccuacuacaccggcgagcacgccaaggccaucggcaacugccccaucugggugaagaccccccugaagcuggccaacggcaccaaguacagaccccccgccaagcugcugaaggagagaggcuucuucggcgccaucgccggcuuccuggagggcggcugggagggcaugaucgccggcuggcacggcuacaccagccacggcgcccacggcguggccguggccgccgaccugaagagcacccaggaggccaucaacaagaucaccaagaaccugaacagccugagcgagcuggaggugaagaaccugcagagacugagcggcgccauggacgagcugcacaacgagauccuggagcuggacgagaagguggacgaccugagagccgacaccaucagcagccagaucgagcuggccgugcugcugagcaacgagggcaucaucaacagcgaggacgagcaccugcuggcccuggagagaaagcugaagaagaugcugggccccagcgccguggagaucggcaacggcugcuucgagaccaagcacaagugcaaccagaccugccuggacagaaucgccgccggcaccuucgacgccggcgaguucagccugcccaccuucgacagccugaacaucaccgccgccagccugaacgacgacgagcuggacaaccacaccauccugcuguacuacagcaccgccgccagcagccuggccgugacccugaugaucgccaucuucgugguguacauggugagcagagacaacgugagcugcagcaucugccuguga

SEQ ID NO: 186472 - RNA, 1758 nt, Artificial Sequence
  derived and/or modified CDS sequence (opt4) from hemagglutinin__InfluenzaB__ABL76485
augaaggccaucaucgugcugcugaugguggugaccagcaacgccgacagaaucugcaccggcaucaccagcagcaacagcccccacguggugaagaccgccacccagggcgaggugaacgugaccggcgugaucccccugaccaccacccccaccaagagccacuucgccaaccugaagggcaccaagaccagaggcaagcugugccccaagugccugaacugcaccgaccuggacguggcccugggcagacccaagugcaccggcaacauccccagcgccgaggugagcauccugcacgaggugagacccgugaccagcggcugcuuccccaucaugcacgacagaaccaagaucagacagcugcccaaccugcugagaggcuacgagcacaucagacugagcacccacaacgugaucaacgccgagaaggcccccggcggccccuacaagaucggcaccagcggcagcugccccaacgugaccaacggcaacggcuucuucgugaccauggccugggccgugcccaagaacgacaacaacaagaccgccaccaacagccugaccaucgaggugcccuacaucugcaccgagggcgaggaccagaucaccguguggggcuuccacagcgacaacgagacccagauggccaagcuguacggcgacagcaagccccagaaguucaccagcagcgccaacggcgugaccacccacuacgugagccagaucggcggcuuccccaaccagaccgaggacggcggccugccccagagcggcagaaucgugguggacuacauggugcagaagagcggcaagaccggcaccaucaccuaccagagaggcauccugcugccccagaagguguggugcgccagcggcagaagcaaggugaucaagggcagccugccccugaucggcgaggccgacugccugcacgagaaguacggcggccugaacaagagcaagcccuacuacaccggcgagcacgccaaggccaucggcaacugccccaucugggugaagaccccccugaagcuggccaacggcaccaaguacagaccccccgccaagcugcugaaggagagaggcuucuucggcgccaucgccggcuuccuggagggcggcugggagggcaugaucgccggcuggcacggcuacaccagccacggcgcccacggcguggccguggccgccgaccugaagagcacccaggaggccaucaacaagaucaccaagaaccugaacagccugagcgagcuggaggugaagaaccugcagagacugagcggcgccauggacgagcugcacaacgagauccuggagcuggacgagaagguggacgaccugagagccgacaccaucagcagccagaucgagcuggccgugcugcugagcaacgagggcaucaucaacagcgagaacgagcaccugcuggcccuggagagaaagcugaagaagaugcugggccccagcgccguggagaucggcaacggcugcuucgagaccaagcacaagugcaaccagaccugccuggacagaaucgccgccggcaccuucgacgccggcgaguucagccugcccaccuucgacagccugaacaucaccgccgccagccugaacgacgacggccuggacaaccacaccauccugcuguacuacagcaccgccgccagcagccuggccgugacccugaugaucgccaucuucgugguguacauggugagcagagacaacgugagcugcagcaucugccuguga

SEQ ID NO: 186473 - RNA, 1758 nt, Artificial Sequence
  derived and/or modified CDS sequence (opt4) from hemagglutinin__InfluenzaB__ABL76507
augaaggccaucaucgugcugcugaugguggugaccagcaacgccgacagaaucugcaccggcaucaccagcagcaacagcccccacguggugaagaccgccacccagggcgaggugaacgugaccggcgugaucccccugaccaccacccccaccaagagccacuucgccaaccugaagggcaccaagaccagaggcaagcugugccccaagugccugaacugcaccgaccuggacguggcccugggcagacccaagugcaccggcaacauccccagcgccgaggugagcauccugcacgaggugagacccgugaccagcggcugcuuccccaucaugcacgacagaaccaagaucagacagcugcccaaccugcugagaggcuacgagcacaucagacugagcacccacaacgugaucaacgccgagaaggcccccggcggccccuacaagaucggcaccagcggcagcugccccaacgugaccaacggcaacggcuucuucgccaccauggccugggccgugcccaagaacgacaacaacaagaccgccaccaacagccugaccaucgaggugcccuacaucugcaccgagggcgaggaccagaucaccguguggggcuuccacagcgacaacgagauccagauggccaagcuguacggcgacagcaagccccagaaguucaccagcagcgccaacggcgugaccacccacuacgugagccagaucggcggcuuccccaaccagaccgaggacggcggccugccccagagcggcagaaucgugguggacuacauggugcagaagagcggcaagaccggcaccaucaccuaccagagaggcauccugcugccccagaagguguggugcgccagcggcagaagcaaggugaucaagggcagccugccccugaucggcgaggccgacugccugcacgagaaguacggcggccugaacaagagcaagcccuacuacaccggcgagcacgccaaggccaucggcaacugccccaucugggugaagaccccccugaagcuggccaacggcaccaaguacagaccccccgccaagcugcugaaggagagaggcuucuucggcgccaucgccggcuuccuggagggcggcugggagggcaugaucgccggcuggcacggcuacaccagccacggcgcccacggcguggccguggccgccgaccugaagagcacccaggaggccaucaacaagaucaccaagaaccugaacagccugagcgagcuggaggugaagaaccugcagagacugagcggcgccauggacgagcugcacaacgagauccuggagcuggacgagaagguggacgaccugagagccgacaccaucagcagccagaucgagcuggccgugcugcugagcaacgagggcaucaucaacagcgaggacgagcaccugcuggcccuggagagaaagcugaagaagaugcugggccccagcgccguggagaucggcaacggcugcuucgagaccaagcacaagugcaaccagaccugccuggacagaaucgccgccggcaccuucgacgccggcgaguucagccugcccaccuucgacagccugaacaucaccgccgccagccugaacgacgacggccuggacaaccacaccauccugcuguacuacagcaccgccgccagcagccuggccgugacccugaugaucgccaucuucgugguguacauggugagcagagacaacgugagcugcagcaucugccuguga

SEQ ID NO: 186474 - RNA, 1758 nt, Artificial Sequence
  derived and/or modified CDS sequence (opt4) from hemagglutinin__InfluenzaB__ABL76518
augaaggccaucaucgugcugcugaugguggugaccagcaacgccgacagaaucugcaccggcaucaccagcagcaacagcccccacguggugaagaccgccacccagggcgaggugaacgugaccggcgugaucccccugaccaccacccccaccaagagccacuucgccaaccugaagggcaccaagaccagaggcaagcugugccccaagugccugaacugcaccgaccuggacguggcccugggcagacccaagugcaccggcaacauccccagcgccgaggugagcauccugcacgaggugagacccgugaccagcggcugcuuccccaucaugcacgacagaaccaagaucagacagcugcccaaccugcugagaggcuacgagcacaucagacugagcacccacaacgugaucaacgccgagaaggcccccggcggccccuacaagaucggcaccagcggcagcugccccaacgugaccaacggcaacggcuucuucgccaccauggccugggccgugcccaagaacgacaacaacaagaccgccaccaacagccugaccaucgaggugcccuacaucugcaccgagggcgaggaccagaucaccguguggggcuuccacagcgacaacgagaaccagauggccaagcuguacggcgacagcaagccccagaaguucaccagcagcgccaacggcgugaccacccacuacgugagccagaucggcggcuuccccaaccagaccgaggacggcggccugccccagagcggcagaaucgugguggacuacauggugcagaagagcggcaagaccggcaccaucaccuaccagagaggcauccugcugccccagaagguguggugcgccagcggcagaagcaaggugaucaagggcagccugccccugaucggcgaggccgacugccugcacgagaaguacggcggccugaacaagagcaagcccuacuacaccggcgagcacgccaaggccaucggcaacugccccaucugggugaagaccccccugaagcuggccaacggcaccaaguacagaccccccgccaagcugcugaaggagagaggcuucuucggcgccaucgccggcuuccuggagggcggcugggagggcaugaucgccggcuggcacggcuacaccagccacggcgcccacggcguggccguggccgccgaccugaagagcacccaggaggccaucaacaagaucaccaagaaccugaacagccugagcgagcuggaggugaagaaccugcagagacugagcggcgccauggacgagcugcacaacgagauccuggagcuggacgagaagguggacgaccugagagccgacaccaucagcagccagaucgagcuggccgugcugcugagcaacgagggcaucaucaacagcgaggacgagcaccugcuggcccuggagagaaagcugaagaagaugcugggccccagcgccguggagaucggcaacggcugcuucgagaccaagcacaagugcaaccagaccugccuggacagaaucgccgccggcaccuucgacgccggcgaguucagccugcccaccuucgacagccugaacaucaccgccgccagccugaacgacgacggccuggacaaccacaccauccugcuguacuacagcaccgccgccagcagccuggccgugacccugaugaucgccaucuucgugguguacauggugagcagagacaacgugagcugcagcaucugccuguga

SEQ ID NO: 186475 - RNA, 1758 nt, Artificial Sequence
  derived and/or modified CDS sequence (opt4) from hemagglutinin__InfluenzaB__ABL76529
augaaggccaucaucgugcugcugaugguggugaccagcaacgccgacagaaucugcaccggcaucaccagcagcaacagcccccacguggugaagaccgccacccagggcgaggugaacgugaccggcgugaucccccugaccaccacccccaccaagagccacuucgccaaccugaagggcaccaagaccagaggcaagcugugccccaagugccugaacugcaccgaccuggacguggcccugggcagacccaagugcaccggcaacauccccagcgccgaggugagcauccugcacgaggugagacccgugaccagcggcugcuuccccaucaugcacgacagaaccaagaucagacagcugcccaaccugcugagaggcuacgagcacaucagacugagcacccacaacgugaucaacgccgagaaggcccccggcggccccuacaagaucggcaccagcggcagcugccccaacgugaccaacggcaacggcuucuucgugaccauggccugggccgugcccaagaacgacaacaacaagaccgccaccaacagccugaccaucgaggugcccuacaucugcaccgagggcgaggaccagaucaccguguggggcuuccacagcgacaacgagacccagauggccaagcuguacggcgacagcaagccccagaaguucaccagcagcgccaacggcgugaccacccacuacgugagccagaucggcggcuuccccaaccagaccgaggacggcggccugccccagagcggcagaaucgugguggacuacauggugcagaagagcggcaagaccggcaccaucaccuaccagagaggcauccugcugccccagaagguguggugcgccagcggcagaagcaaggugaucaagggcagccugccccugaucggcgaggccgacugccugcacgagaaguacggcggccugaacaagagcaagcccuacuacaccggcgagcacgccaaggccaucggcaacugccccaucugggugaagaccccccugaagcuggccaacggcaccaaguacagaccccccgccaagcugcugaaggagagaggcuucuucggcgccaucgccggcuuccuggagggcggcugggagggcaugaucgccggcuggcacggcuacaccagccacggcgcccacggcguggccguggccgccgaccugaagagcacccaggaggccaucaacaagaucaccaagaaccugaacagccugagcgagcuggaggugaagaaccugcagagacugagcggcgccauggacgagcugcacaacgagauccuggagcuggacgagaagguggacgaccugagagccgacaccaucagcagccagaucgagcuggccgugcugcugagcaacgagggcaucaucaacagcgaggacgagcaccugcuggcccuggagagaaagcugaagaagaugcugggccccagcgccguggagaucggcaacggcugcuucgagaccaagcacaagugcaaccagaccugccuggacagaaucgccgccggcaccuucgacgccggcgaguucagccugcccaccuucgacagccugaacaucaccgccgccagccugaacgacgacggccuggacaaccacaccauccugcuguacuacagcaccgccgccagcagccuggccgugacccugaugaucgccaucuucgugguguacauggugagcagagacaacgugagcugcagcaucugccuguga

SEQ ID NO: 186476 - RNA, 1758 nt, Artificial Sequence
  derived and/or modified CDS sequence (opt4) from hemagglutinin__InfluenzaB__ABL76540
augaaggccaucaucgugcugcugaugguggugaccagcaacgccgacagaaucugcaccggcaucaccagcagcaacagcccccacguggugaagaccgccacccagggcgaggugaacgugaccggcgugaucccccugaccaccacccccaccaagagccacuucgccaaccugaagggcaccaagaccagaggcaagcugugccccaagugccugaacugcaccgaccuggacguggcccugggcagacccaagugcaccggcaacauccccagcgccgaggugagcauccugcacgaggugaagcccgugaccagcggcugcuuccccaucaugcacgacagaaccaagaucagacagcugcccaaccugcugagaggcuacgagcacaucagacugagcacccacaacgugaucaacgccgagaaggcccccggcggccccuacaagaucggcaccagcggcagcugccccaacgugaccaacggcaacggcuucuucgccaccauggccugggccgugcccaagaacgacaacaacaagaccgccaccaacagccugaccaucgaggugcccuacaucugcaccgagggcgaggaccagaucaccguguggggcuuccacagcgacaacgagacccagauggccaagcuguacggcgacagcaagccccagaaguucaccagcagcgccaacggcgugaccacccacuacgugagccagaucggcggcuuccccaaccagaccgaggacggcggccugccccagagcggcagaaucgugguggacuacauggugcagaagagcggcaagaccggcaccaucaccuaccagagaggcauccugcugccccagaagguguggugcgccagcggcagaagcaaggugaucaagggcagccugccccugaucggcgaggccgacugccugcacgagaaguacggcggccugaacaagagcaagcccuacuacaccggcgagcacgccaaggccaucggcaacugccccaucugggugaagaccccccugaagcuggccaacggcaccaaguacagaccccccgccaagcugcugaaggagagaggcuucuucggcgccaucgccggcuuccuggagggcggcugggagggcaugaucgccggcuggcacggcuacaccagccacggcgcccacggcguggccguggccgccgaccugaagagcacccaggaggccaucaacaagaucaccaagaaccugaacagccugagcgagcuggaggugaagaaccugcagagacugagcggcgccauggacgagcugcacaacgagauccuggagcuggacgagaagguggacgaccugagagccgacaccaucagcagccagaucgagcuggccgugcugcugagcaacgagggcaucaucaacagcgaggacgagcaccugcuggcccuggagagaaagcugaagaagaugcugggccccagcgccguggagaucggcaacggcugcuucgagaccaagcacaagugcaaccagaccugccuggacagaaucgccgccggcaccuucgacgccggcgaguucagccugcccaccuucgacagccugaacaucaccgccgccagccugaacgacgacggccuggacaaccacaccauccugcuguacuacagcaccgccgccagcagccuggccgugacccugaugaucgccaucuucgugguguacauggugagcagagacaacgugagcugcagcaucugccuguga

SEQ ID NO: 186477 - RNA, 1758 nt, Artificial Sequence
  derived and/or modified CDS sequence (opt4) from hemagglutinin__InfluenzaB__ABL76551
augaaggccaucaucgugcugcugaugguggugaccagcaacgccgacagaaucugcaccggcaucaccagcagcaacagcccccacguggugaagaccgccacccagggcgaggugaacgugaccggcgugaucccccugaccaccacccccaccaagagccacuucgccaaccugaagggcaccaagaccagaggcaagcugugccccaagugccugaacugcaccgaccuggacguggcccugggcagacccaagugcaccggcaacauccccagcgccgaggugagcauccugcacgaggugagacccgugaccagcggcugcuuccccaucaugcacgacagaaccaagaucagacagcugcccaaccugcugagaggcuacgagcacaucagacugagcacccacaacgugaucaacgccgagaaggcccccggcggccccuacaagaucggcaccagcggcagcugccccaacgugaccaacggcaacggcuucuucgccaccauggccugggccgugcccaagaacgacaacaacaagaccgccaccaacagccugaccaucgaggugcccuacaucugcaccgagggcgaggaccagaucaccguguggggcuuccacagcgacaacgagacccagauggccaagcuguacggcgacagcaagccccagaaguucaccagcagcgccaacggcgugaccacccacuacgugagccagaucggcggcuuccccaaccagaccgaggacggcggccugccccagagcggcagaaucgugguggacuacauggugcagaagagcggcaagaccggcaccaucaccuaccagagaggcauccugcugccccagaagguguggugcgccagcggcagaagcaaggugaucaagggcagccugccccugaucggcgaggccgacugccugcacgagaaguacggcggccugaacaagagcaagcccuacuacaccggcgagcacgccaaggccaucggcaacugccccaucugggugaagaccccccugaagcuggccaacggcaccaaguacagaccccccgccaagcugcugaaggagagaggcuucuucggcgccaucgccggcuuccuggagggcggcugggagggcaugaucgccggcuggcacggcuacaccagccacggcgcccacggcguggccguggccgccgaccugaagagcacccaggaggccaucaacaagaucaccaagaaccugaacagccugagcgagcuggaggugaagaaccugcagagacugagcggcgccauggacgagcugcacaacgagauccuggagcuggacgagaagguggacgaccugagagccgacaccaucagcagccagaucgagcuggccgugcugcugagcaacgagggcaucaucaacagcgaggacgagcaccugcuggcccuggagagaaagcugaagaagaugcugggccccagcgccguggagaucggcaacggcugcuucgagaccaagcacaagugcaaccagaccugccuggacagaaucgccgccggcaccuucgacgccggcgaguucagccugcccaccuucgacagccugaacaucaccgccgccagccugaacgacgacggccuggacaaccacaccauccugcuguacuacagcaccgccgccagcagccuggccgugacccugaugauggccaucuucgugguguacauggugagcagagacaacgugagcugcagcaucugccuguga

SEQ ID NO: 186478 - RNA, 1758 nt, Artificial Sequence
  derived and/or modified CDS sequence (opt4) from hemagglutinin__InfluenzaB__ABL76562
augaaggccaucaucgugcugcugaugguggugaccagcaacgccgacagaaucugcaccagaaucaccagcagcaacagcccccacguggugaagaccgccacccagggcgaggugaacgugaccggcgugaucccccugaccaccacccccaccaagagccacuucgccaaccugaagggcaccaagaccagaggcaagcugugccccaagugccugaacugcaccgaccuggacguggcccugggcagacccaagugcaccggcaacauccccagcgccgaggugagcauccugcacgaggugagacccgugaccagcggcugcuuccccaucaugcacgacagaaccaagaucagacagcugcccaaccugcugagaggcuacgagcacaucagacugagcacccacaacgugaucaacgccgagaaggcccccggcggccccuacaagaucggcaccagcggcagcugccccaacgugaccaacggcaacggcuucuucgccaccauggccugggccgugcccaagaacgacaacaacaagaccgccaccaacagccugaccaucgaggugcccuacaucugcaccgagggcgaggaccagaucaccguguggggcuuccacagcgacaacgagacccagauggccaagcuguacggcgacagcaagccccagaaguucaccagcagcgccaacggcgugaccacccacuacgugagccagaucggcggcuuccccaaccagaccgaggacggcggccugccccagagcggcagaaucgugguggacuacauggugcagaagagcggcaagaccggcaccaucaccuaccagagaggcauccugcugccccagaagguguggugcgccagcggcagaagcaaggugaucaagggcagccugccccugaucggcgaggccgacugccugcacgagaaguacggcggccugaacaagagcaagcccuacuacaccggcgagcacgccaaggccaucggcaacugccccaucugggugaagaccccccugaagcuggccaacggcaccaaguacagaccccccgccaagcugcugaaggagagaggcuucuucggcgccaucgccggcuuccuggagggcggcugggagggcaugaucgccggcuggcacggcuacaccagccacggcgcccacggcguggccguggccgccgaccugaagagcacccaggaggccaucaacaagaucaccaagaaccugaacagccugagcgagcuggaggugaagaaccugcagagacugagcggcgccauggacgagcugcacaacgagauccuggagcuggacgagaagguggacgaccugagagccgacaccaucagcagccagaucgagcuggccgugcugcugagcaacgagggcaucaucaacagcgaggacgagcaccugcuggcccuggagagaaagcugaagaagaugcugggccccagcgccguggagaucggcaacggcugcuucgagaccaagcacaagugcaaccagaccugccuggacagaaucgccgccggcaccuucgacgugggcgaguucagccugcccaccuucgacagccugaacaucaccgccgccagccugaacgacgacggccuggacaaccacaccauccugcuguacuacagcaccgccgccagcagccuggccgugacccugaugaucgccaucuucgugguguacauggugagcagagacaacgugagcugcagcaucugccuguga

SEQ ID NO: 186479 - RNA, 1758 nt, Artificial Sequence
  derived and/or modified CDS sequence (opt4) from hemagglutinin__InfluenzaB__ABL76573
augaaggccaucaucgugcugcugaugguggugaccagcaacgccgacagaaucugcaccggcaucaccagcagcaacagcccccacguggugaagaccgccacccagggcgaggugaacgugaccggcgugaucccccugaccaccacccccaccaagagccacuucgccaaccugaagggcaccaagaccagaggcaagcugugccccaagugccugaacugcaccgaccuggacguggcccugggcagacccaagugcaccggcaacauccccagcgccgaggugagcauccugcacgaggugagacccgugaccagcggcugcuuccccaucaugcacgacagaaccaagaucagacagcugcccaaccugcugagaggcuacgagcacaucagacugagcacccacaacgugaucaacgccgagaaggcccccggcggccccuacaagaucggcaccagcggcagcugccccaacgugaccaacggcaacggcuucuucgccaccauggccugggccgugcccaagaacgacaacaacaagaccgccaccaacagccugaccaucgaggugcccuacaucugcaccgagggcgaggaccagaucaccguguggggcuuccacagcgacaacgagacccagauggccaagcuguacggcgacagcaagccccagaaguucaccagcagcgccaacggcgugaccacccacuacgugagccagaucggcggcuuccccaaccagaccgaggacggcggccugccccagagcggcagaaucgugguggacuacauggugcagaagagcggcaagaccggcaccaucaccuaccagagaggcauccugcugccccagaagguguggugcgccagcggcagaagcaaggugaucaagggcagccugccccugaucggcgaggccgacugccugcacgagaaguacggcggccugaacaagagcaagcccuacuacaccggcgagcacgccaaggccaucggcaacugccccaucugggugaagaccccccugaagcuggccaacggcaccaaguacagaccccccgccaagcugcugaaggagagaggcuucuucggcgccaucgccggcuuccuggagggcggcugggagggcaugaucgccggcuggcacggcuacaccagccacggcgcccacggcguggccguggccgccgaccugaagagcacccaggaggccaucaacaagaucaccaagaaccugaacagccugagcgagcuggaggugaagaaccugcagagacugagcggcgccauggacgagcugcacaacgagauccuggagcuggacgagaagguggacgaccugagagccgacaccaucagcagccagaucgagcuggccgugcugcugagcaacgagggcaucaucaacagcgaggacgagcaccugcuggcccuggagagaaagcugaagaagaugcugggccccagcgccguggagaucggcaacggcugcuucgagaccaagcacaagugcaaccagaccugccuggacagaaucgccgccggcaccuucgacgccggcgaguucagccugcccaccuucgacagccugaacaucaccgccgccagccugaacgacgacggccuggacaaccacaccauccugcuguacuacagcaccgccgccagcagccuggccgugacccugaugaucgccaucuucgugguguacauggugagcagagacaacgugagcugcagcaucugccuguga

SEQ ID NO: 186480 - RNA, 1758 nt, Artificial Sequence; identical to SEQ ID NO: 186479
  derived and/or modified CDS sequence (opt4) from hemagglutinin__InfluenzaB__ABL76584

SEQ ID NO: 186481 - RNA, 1758 nt, Artificial Sequence; identical to SEQ ID NO: 186479
  derived and/or modified CDS sequence (opt4) from hemagglutinin__InfluenzaB__ABL76595

SEQ ID NO: 186482 - RNA, 1758 nt, Artificial Sequence; identical to SEQ ID NO: 186479
  derived and/or modified CDS sequence (opt4) from hemagglutinin__InfluenzaB__ABL76606

SEQ ID NO: 186483 - RNA, 1758 nt, Artificial Sequence
  derived and/or modified CDS sequence (opt4) from hemagglutinin__InfluenzaB__ABL76617
augaaggccaucaucgugcugcugaugguggugaccagcaacgccgacagaaucugcaccggcaucaccagcagcaacagcccccacguggugaagaccgccacccagggcgaggugaacgugaccggcgugaucccccugaccaccacccccaccaagagccacuucgccaaccugaagggcaccgagaccagaggcaagcugugccccaagugccugaacugcaccgaccuggacguggcccugggcagacccaagugcaccggcaacauccccagcgccaaggugagcauccugcacgaggugagacccgugaccagcggcugcuuccccaucaugcacgacagaaccaagaucagacagcugcccaaccugcugagaggcuacgagcacaucagacugagcacccacaacgugaucaacgccgagaaggcccccggcggccccuacaagaucggcaccagcggcagcugccccaacgugaccaacggcaacggcuucuucgccaccauggccugggccgugcccaagaacgacaacaacaagaccgccaccaacagccugaccaucgaggugcccuacaucugcaccgagggcgaggaccagaucaccguguggggcuuccacagcgacaacgagacccagauggccaagcuguacggcgacagcaagccccagaaguucaccagcagcgccaacggcgugaccacccacuacgugagccagaucggcggcuuccccaaccagaccgaggacggcggccugccccagagcggcagaaucgugguggacuacauggugcagaagagcggcaagaccggcaccaucaccuaccagagaggcauccugcugccccagaagguguggugcgccagcggcagaagcaaggugaucaagggcagccugccccugaucggcgaggccgacugccugcacgagaaguacggcggccugaacaagagcaagcccuacuacaccggcgagcacgccaaggccaucggcaacugccccaucugggugaagaccccccugaagcuggccaacggcaccaaguacagaccccccgccaagcugcugaaggagagaggcuucuucggcgccaucgccggcuuccuggagggcggcugggagggcaugaucgccggcuggcacggcuacaccagccacggcgcccacggcguggccguggccgccgaccugaagagcacccaggaggccaucaacaagaucaccaagaaccugaacagccugagcgagcuggaggugaagaaccugcagagacugagcggcgccauggacgagcugcacaacgagauccuggagcuggacgagaagguggacgaccugagagccgacaccaucagcagccagaucgagcuggccgugcugcugagcaacgagggcaucaucaacagcgaggacgagcaccugcuggcccuggagagaaagcugaagaagaugcugggccccagcgccguggagaucggcaacggcugcuucgagaccaagcacaagugcaaccagaccugccuggacagaaucgccgccggcaccuucgacgccggcgaguucagccugcccaccuucgacagccugaacaucaccgccgccagccugaacgacgacggccuggacaaccacaccauccugcuguacuacagcaccgccgccagcagccuggccgugacccugaugaucgccaucuucgugguguacauggugagcagagacaacgugagcugcagcaucugccuguga

SEQ ID NO: 186484 - RNA, 1755 nt, Artificial Sequence
  derived and/or modified CDS sequence (opt4) from hemagglutinin__InfluenzaB__ABL76628
augaaggccaucaucgugcugcugaugguggugaccagcaacgccgacagaaucugcaccggcaucaccagcagcaacagcccccacguggugaagaccgccacccagggcgaggugaacgugaccggcgugaucccccugaccaccacccccaccaagagcuacuucgccaaccugaagggcaccagaaccagaggcaagcugugccccgacugccugaacugcaccgaccuggacguggcccugggcagacccaugugcgugggcaccacccccagcgccaaggccagcauccugcacgaggugagacccgugaccagcggcugcuuccccaucaugcacgacagaaccaagaucagacagcuggccaaccugcugagaggcuacgagaacaucagacugagcacccagaacgugaucgacgccgagaaggcccccggcggccccuacagacugggcaccagcggcagcugccccaacgccaccagcaagagcggcuucuucgccaccauggccugggccgugcccaaggacaacaacaagaacgccaccaacccccugaccguggaggugccccacaucugcaccgagggcgaggaccagaucaccguguggggcuuccacagcgacaacaagacccagaugaagaaccuguacggcgacagcaacccccagaaguucaccagcagcgccaacggcgugaccacccacuacgugagccagaucggcggcuuccccgaccagaccgaggacggcggccugccccagagcggcagaaucgugguggacuacaugaugcagaagcccggcaagaccggcaccaucguguaccagagaggcgugcugcugccccagaagguguggugcgccagcggcagaagcaaggugaucaagggcagccugccccugaucggcgaggccgacugccugcacgagaaguacggcggccugaacaagagcaagcccuacuacaccggcgagcacgccaaggccaucggcaacugccccaucugggugaagaccccccugaagcuggccaacggcaccaaguacagaccccccgccaagcugcugaaggagagaggcuucuucggcgccaucgccggcuuccuggagggcggcugggagggcaugaucgccggcuggcacggcuacaccagccacggcgcccacggcguggccguggccgccgaccugaagagcacccaggaggccaucaacaagaucaccaagaaccugaacagccugagcgagcuggaggugaagaaccugcagagacugagcggcgccauggacgagcugcacaacgagauccuggagcuggacgagaagguggacgaccugagagccgacaccaucagcagccagaucgagcuggccgugcugcugagcaacgagggcaucaucaacagcgaggacgagcaccugcuggcccuggagagaaagcugaagaagaugcugggccccagcgccguggacaucggcaacggcugcuucgagaccaagcacaagugcaaccagaccugccuggacagaaucgccgccggcaccuucaacgccggcgaguucagccugcccaccuucgacagccugaacaucaccgccgccagccugaacgacgacggccuggacaaccacaccauccugcuguacuacagcaccgccgccagcagccuggccgugacccugaugcuggccaucuucaucguguacauggugagcagagacaacgugagcugcagcaucugccuguga

SEQ ID NO: 186485 - RNA, 1755 nt, Artificial Sequence
  derived and/or modified CDS sequence (opt4) from hemagglutinin__InfluenzaB__ABL76639
augaaggccaucaucgugcugcugaugguggugaccagcaacgccgacagaaucugcaccggcaucaccagcagcaacagcccccacguggugaagaccgccacccagggcgaggugaacgugaccggcgugaucccccugaccaccacccccaccaagagcuacuucgccaaccugaagggcaccagaaccagaggcaagcugugccccgacugccugaacugcaccgaccuggacguggcccugggcagacccaugugcgugggcaccacccccagcgccaaggccagcauccugcacgaggugagacccgugaccagcggcugcuuccccaucaugcacgacagaaccaagaucagacagcuggccaaccugcugagaggcuacgagaacaucagacugagcacccagaacgugaucgacgccgagaaggcccccggcggccccuacagacugggcaccagcggcagcugccccaacgccaccagcaagagcggcuucuucgccaccauggccugggccgugcccaaggacaacaacaagaacgccaccaacccccugaccguggaggugcccuacaucugcaccgagggcgaggaccagaucaccguguggggcuuccacagcgacaacaagacccagaugaagaaccuguacggcgacagcaacccccagaaguucaccagcagcgccaacggcgugaccacccacuacgugagccagaucggcggcuuccccgaccagaccgaggacggcggccugccccagagcggcagaaucgugguggacuacaugaugcagaagcccggcaaggccggcaccaucguguaccagagaggcgugcugcugccccagaagguguggugcgccagcggcagaagcaaggugaucaagggcagccugccccugaucggcgaggccgacugccugcacgagaaguacggcggccugaacaagagcaagcccuacuacaccggcgagcacgccaaggccaucggcaacugccccaucugggugaagaccccccugaagcuggccaacggcaccaaguacagaccccccgccaagcugcugaaggagagaggcuucuucggcgccaucgccggcuuccuggagggcggcugggagggcaugaucgccggcuggcacggcuacaccagccacggcgcccacggcguggccguggccgccgaccugaagagcacccaggaggccaucaacaagaucaccaagaaccugaacagccugagcgagcuggaggugaagaaccugcagagacugagcggcgccauggacgagcugcacaacgagauccuggagcuggacgagaagguggacgaccugagagccgacaccaucagcagccagaucgagcuggccgugcugcugagcaacgagggcaucaucaacagcgaggacgagcaccugcuggcccuggagagaaagcugaagaagaugcugggccccagcgccguggacaucggcaacggcugcuucgagaccaagcacaagugcaaccagaccugccuggacagaaucgccgccggcaccuucaacgccggcgaguucagccugcccaccuucgacagccugaacaucaccgccgccagccugaacgacgacggccuggacaaccacaccauccugcuguacuacagcaccgccgccagcagccuggccgugacccugaugcuggccaucuucaucguguacauggugagcagagacaacgugagcugcagcaucugccuguga

SEQ ID NO: 186486 - RNA, 1755 nt, Artificial Sequence
  derived and/or modified CDS sequence (opt4) from hemagglutinin__InfluenzaB__ABL76683
augaaggccaucaucgugcugcugaugguggugaccagcaacgccgacagaaucugcaccggcaucaccagcagcaacagcccccacguggugaagaccgccacccagggcgaggugaacgugaccggcgugaucccccugaccaccacccccaccaagagcuacuucgccaaccugaagggcaccagaaccagaggcaagcugugccccgacugccugaacugcaccgaccuggacguggcccugggcagacccaugugcgugggcaccacccccagcgccaaggccagcauccugcacgaggugagacccgugaccagcggcugcuuccccaucaugcacgacagaaccaagaucagacagcuggccaaccugcugagaggcuacgagaacaucagacugagcacccagaacgugaucgacgccgagaaggcccccggcggccccuacagacugggcaccagcggcagcugccccaacgccaccagcaagagcggcuucuucgccaccauggccugggccgugcccaaggacaacaacaagaacgccaccaacccccugaccguggaggugcccuacaucugcaccgagggcgaggaccagaucaccguguggggcuuccacagcgacaacaagacccagaugaagaaccuguacggcgacagcaacccccagaaguucaccagcagcgccaacggcgugaccacccacuacgugagccagaucggcggcuuccccgaccagaccgaggacggcggccugccccagagcggcagaaucgugguggacuacaugaugcagaagcccggcaagaccggcaccaucguguaccagagaggcgugcugcugccccagaagguguggugcgccagcggcagaagcaaggugaucaagggcagccugccccugaucggcgaggccgacugccugcacgagaaguacggcggccugaacaagagcaagcccuacuacaccggcgagcacgccaaggccaucggcaacugccccaucugggugaagaccccccugaagcuggccaacggcaccaaguacagaccccccgccaagcugcugaaggagagaggcuucuucggcgccaucgccggcuuccuggagggcggcugggagggcaugaucgccggcuggcacggcuacaccagccacggcgcccacggcguggccguggccgccgaccugaagagcacccaggaggccaucaacaagaucaccaagaaccugaacagccugagcgagcuggaggugaagaaccugcagagacugagcggcgccauggacgagcugcacaacgagauccuggagcuggacgagaagguggacgaccugagagccgacaccaucagcagccagaucgagcuggccgugcugcugagcaacgagggcaucaucaacagcgaggacgagcaccugcuggcccuggagagaaagcugaagaagaugcugggccccagcgccguggacaucggcaacggcugcuucgagaccaagcacaagugcaaccagaccugccuggacagaaucgccgccggcaccuucaacgccggcgaguucagccugcccaccuucgacagccugaacaucaccgccgccagccugaacgacgacggccuggacaaccacaccauccugcuguacuacagcaccgccgccagcagccuggccgugacccugaugcuggccaucuucaucguguacauggugagcagagacaacgugagcugcagcaucugccuguga

SEQ ID NO: 186487 - RNA, 1752 nt, Artificial Sequence
  derived and/or modified CDS sequence (opt4) from hemagglutinin__InfluenzaB__ABL76694
augaaggccaucaucgugcugcugaugguggugaccagcaacgccgacagaaucugcaccggcaucaccagcagcaacagcccccacguggugaagaccgccacccagggcgaggugaacgugaccggcgugaucccccugaccaccacccccaccaagagccacuucgccaaccugaagggcaccaagaccagaggcaagcugugccccaacugccugaacugcaccgaccuggacguggcccugggcagacccaugugcgugggcaccacccccagcgccaaggccagcauccugcacgaggugagacccgugaccagcggcugcuuccccaucaugcacgacagaaccaagaucagacagcugcccaaccugcugagaggcuacgagaacaucagacugagcacccagaacgugaucaacgccgagagagcccccggcggccccuacagacugggcaccagcggcagcugccccaacgugaccagcagagacggcuucuucgccaccauggccugggccgugcccagagacaacaagaccgccaccaacccccugaccguggaggugcccuacaucugcaccaagggcgaggaccagaucaccguguggggcuuccacagcgacaacaagacccagaugaagaaccuguacggcgacagcaacccccagaaguucaccagcagcgccaacggcgugaccacccacuacgugagccagaucggcggcuuccccaaccagaccgaggacggcggccugccccagagcggcagaaucgugguggacuacauggugcagaagcccggcaagaccggcaccaucguguaccagagaggcgugcugcugccccagaagguguggugcgccagcggcagaagcaaggugaucaagggcagccugccccugaucggcgaggccgacugccugcacgagaaguacggcggccugaacaagagcaagcccuacuacaccggcgagcacgccaaggccaucggcaacugccccaucugggugaagaccccccugaagcuggccaacggcaccaaguacagaccccccgccaagcugcugaaggagagaggcuucuucggcgccaucgccggcuuccuggagggcggcugggagggcaugaucgccggcuggcacggcuacaccagccacggcgcccacggcguggccguggccgccgaccugaagagcacccaggaggccaucaacaagaucaccaagaaccugaacagccugagcgagcuggaggugaagaaccugcagagacugagcggcgccauggacgagcugcacaacgagauccuggagcuggacgagaagguggacgaccugagagccgacaccaucagcagccagaucgagcuggccgugcugcugagcaacgagggcaucaucaacagcgaggacgagcaccugcuggcccuggagagaaagcugaagaagaugcugggccccagcgccguggacaucggcaacggcugcuucgagaccaagcacaagugcaaccagaccugccuggacagaaucgccgccggcaccuucaacgccggcgaguucagccugcccaccuucgacagccugaacaucaccgccgccagccugaacgacgacggccuggacaaccacaccauccugcuguacuacagcaccgccgccagcagccuggccgugacccugaugaucgccaucuucaucguguacauggugagcagagacaacgugagcugcagcaucugccuguga

SEQ ID NO: 186488 - RNA, 1758 nt, Artificial Sequence
  derived and/or modified CDS sequence (opt4) from hemagglutinin__InfluenzaB__ABL76716
augaaggccaucaucgugcugcugaugguggugaccagcaacgccgacagaaucugcaccggcaucaccagcagcaacagcccccacguggugaagaccgccacccagggcgaggugaacgugaccggcgugaucccccugaccaccacccccaccaagagccacuucgccaaccugaagggcaccgagaccagaggcaagcugugccccaagugccugaacugcaccgaccuggacguggcccugggcagacccaagugcaccggcaacauccccagcgccagagugagcauccugcacgaggugagacccgugaccagcggcugcuuccccaucaugcacgacagaaccaagaucagacagcugcccaaccugcugagaggcuacgagcacaucagacugagcacccacaacgugaucaacgccgagaacgcccccggcggccccuacaagaucggcaccagcggcagcugccccaacgugaccaacggcaacggcuucuucgccaccauggccugggccgugcccaagaacgacaacaacaagaccgccaccaacagccugaccaucgaggugcccuacaucugcaccgagggcgaggaccagaucaccguguggggcuuccacagcgacaacgagacccagauggccaagcuguacggcgacagcaagccccagaaguucaccagcagcgccaacggcgugaccacccacuacgugagccagaucggcggcuuccccaaccagaccgaggacggcggccugccccagagcggcagaaucgugguggacuacauggugcagaagagcggcaagaccggcaccaucaccuaccagagaggcauccugcugccccagaagguguggugcgccagcggcagaagcaaggugaucaagggcagccugccccugaucggcgaggccgacugccugcacgagaaguacggcggccugaacaagagcaagcccuacuacaccggcgagcacgccaaggccaucggcaacugccccaucugggugaagaccccccugaagcuggugaacggcaccaaguacagaccccccgccaagcugcugaaggagagaggcuucuucggcgccaucgccggcuuccuggagggcggcugggagggcaugaucgccggcuggcacggcuacaccagccacggcgcccacggcguggccguggccgccgaccugaagagcacccaggaggccaucaacaagaucaccaagaaccugaacagccugagcgagcuggaggugaagaaccugcagagacugagcggcgccauggacgagcugcacaacgagauccuggagcuggacgagaagguggacgaccugagagccgacaccaucagcagccagaucgagcuggccgugcugcugagcaacgagggcaucaucaacagcgaggacgagcaccugcuggcccuggagagaaagcugaagaagaugcugggccccagcgccguggagaucggcaacggcugcuucgagaccaagcacaagugcaaccagaccugccuggacagaaucgccgccggcaccuucgacgccggcgaguucagccugcccaccuucgacagccugaacaucaccgccgccagccugaacgacgacggccuggacaaccacaccauccugcuguacuacagcaccgccgccagcagccuggccgugacccugaugaucgccaucuucgugguguacauggugagcagagacaacgugagcugcagcaucugccuguga

SEQ ID NO: 186489 - RNA, 1755 nt, Artificial Sequence
  derived and/or modified CDS sequence (opt4) from hemagglutinin__InfluenzaB__ABL76760
augaaggccaucaucgugcugcugaugguggugaccagcaacgccgacagaaucugcaccggcaucaccagcagcaacagcccccacguggugaagaccgccacccagggcgaggugaacgugaccggcgugaucccccugaccaccacccccaccaagagccacuucgccaaccugaagggcaccaagaccagaggcaagcugugccccaccugccugaacugcaccgaccuggacguggcccugggcagacccaugugcgugggcgugacccccagcgccaaggccagcauccugcacgaggugagacccgugaccagcggcugcuuccccaucaugcacgacagaaccaagaucagacagcugcccaaccugcugagaggcuacgagaagaucagacugagcacccagaacgugaucaacgccgagaaggcccccggcggccccuacagacugggcaccagcggcagcugccccaacgccaccagcagaagcggcuucuucgccaccauggccugggccgugcccagagacaacaacaagaccgccaccaacccccugaccaucgaggugccccacaucugcaccaaggaggaggaccagaucaccguguggggcuuccacagcgacaacaagacccagaugaagaaccuguacggcgacagcaacccccagaaguucaccagcagcgccaacggcgugaccacccacuacgugagccagaucggcggcuuccccgaccagaccgaggacggcggccugccccagagcggcagaaucgugguggacuacauggugcagaagcccggcaagaccggcaccaucguguaccagagaggcauccugcugccccagaagguguggugcgccagcggcagaagcaaggugaucaagggcagccugccccugaucggcgaggccgacugccugcacgagaaguacggcggccugaacaagagcaagcccuacuacaccggcgagcacgccaaggccaucggcaacugccccaucugggugaagaccccccugaagcuggccaacggcaccaaguacagaccccccgccaagcugcugaaggagagaggcuucuucggcgccaucgccggcuuccuggagggcggcugggagggcaugaucgccggcuggcacggcuacaccagccacggcgcccacggcguggccguggccgccgaccugaagagcacccaggaggccaucaacaagaucaccaagaaccugaacagccugagcgagcuggaggugaagaaccugcagagacugagcggcgccauggacgagcugcacaacgagauccuggagcuggacgagaagguggacgaccugagagccgacaccaucagcagccagaucgagcuggccgugcugcugagcaacgagggcaucaucaacagcgaggacgagcaccugcuggcccuggagagaaagcugaagaagaugcugggccccagcgccguggacaucggcaacggcugcuucgagaccaagcacaagugcaaccagaccugccuggacagaaucgccgccggcaccuucgacgccggcgaguucagccugcccaccuucgacagccugaacaucaccgccgccagccugaacgacgacggccuggacaaccacaccauccugcuguacuacagcaccgccgccagcagccuggccgugacccugaugaucgccaucuucaucguguacaugaucagcagagacaacgugagcugcagcaucugccuguga

SEQ ID NO: 186490 - RNA, 1755 nt, Artificial Sequence
  derived and/or modified CDS sequence (opt4) from hemagglutinin__InfluenzaB__ABL76771
augaaggccaucaucgugcugcugaugguggugaccagcaacgccgacagaaucugcaccggcaucaccagcagcaacagcccccacguggugaagaccgccacccagggcgaggugaacgugaccggcgugaucccccugaccaccacccccaccaagagccacuucgccaaccugaagggcaccaagaccagaggcaagcugugccccaccugccugaacugcaccgaccuggacguggcccugggcagacccaugugcgugggcgugacccccagcgccaaggccagcauccugcacgaggugagacccgugaccagcggcugcuuccccaucaugcacgacagaaccaagaucagacagcugcccaaccugcugagaggcuacgagaagaucagacugagcacccagaacgugaucaacgccgagaaggcccccggcggccccuacagacugggcaccagcggcagcugccccaacgccaccagcagaagcggcuucuucgccaccauggccugggccgugcccagagacaacaacaagaccgccaccaacccccugaccaucgaggugccccacaucugcaccaaggaggaggaccagaucaccguguggggcuuccacagcgacgacaagacccagaugaagaaccuguacggcgacagcaacccccagaaguucaccagcagcgccaacggcgugaccacccacuacgugagccagaucggcggcuuccccgaccagaccgaggacggcggccugccccagagcggcagaaucgugguggacuacauggugcagaagcccggcaagaccggcaccaucguguaccagagaggcauccugcugccccagaagguguggugcgccagcggcagaagcaaggugaucaagggcagccugccccugaucggcgaggccgacugccugcacgagaaguacggcggccugaacaagagcaagcccuacuacaccggcgagcacgccaaggccaucggcaacugccccaucugggugaagaccccccugaagcuggccaacggcaccaaguacagaccccccgccaagcugcugaaggagagaggcuucuucggcgccaucgccggcuuccuggagggcggcugggagggcaugaucgccggcuggcacggcuacaccagccacggcgcccacggcguggccguggccgccgaccugaagagcacccaggaggccaucaacaagaucaccaagaaccugaacagccugagcgagcuggaggugaagaaccugcagagacugagcggcgccauggacgagcugcacaacgagauccuggagcuggacgagaagguggacgaccugagagccgacaccaucagcagccagaucgagcuggccgugcugcugagcaacgagggcaucaucaacagcgaggacgagcaccugcuggcccuggagagaaagcugaagaagauccugggccccagcgccguggacaucggcaacggcugcuucgagaccaagcacaagugcaaccagaccugccuggacagaaucgccgccggcaccuucgacgccggcgaguucagccugcccaccuucgacagccugaacaucaccgccgccagccugaacgacgacggccuggacaaccacaccauccugcuguacuacagcaccgccgccagcagccuggccgugacccugaugaucgccaucuucaucguguacaugaucagcagagacaacgugagcugcagcaucugccuguga

SEQ ID NO: 186491 - RNA, 1755 nt, Artificial Sequence
  derived and/or modified CDS sequence (opt4) from hemagglutinin__InfluenzaB__ABL76782
augaaggccaucaucgugcugcugaugguggugaccagcaacgccgacagaaucugcaccggcaucaccagcagcaacagcccccacguggugaagaccgccacccagggcgaggugaacgugaccggcgugaucccccugaccaccacccccaccaagagccacuucgccaaccugaagggcaccaagaccagaggcaagcugugccccaccugccugaacugcaccgaccuggacguggcccugggcagccccaugugcgugggcaucacccccagcgccaaggccagcauccugcacgaggugagacccgugaccagcggcugcuuccccaucaugcacgacagaaccaagaucagacagcugcccaaccugcugagaggcuacgagaagaucagacugagcacccagaacgugaucaacaucgagaaggcccccggcggccccuacagacugggcaccagcggcagcugccccaacgccaccagcagaagcggcuucuucgccaccauggccugggccgugcccagagacaacaacaagaccgccaccaacccccugaccguggaggugccccacaucugcaccaaggaggaggaccagaucaccguguggggcuuccacagcgacaacaaggcccagaugaagaaccuguacggcgacagcaacccccagaaguucaccagcagcgccaacggcgugaccacccacuacgugagccagaucggcggcuuccccgaccagaccgaggacggcggccugccccagagcggcagaaucgugguggacuacauggugcagaagcccggcaagaccggcaccaucguguaccagagaggcauccugcugccccagaagguguggugcgccagcggcagaagcaaggugaucaagggcagccugccccugaucggcgaggccgacugccugcacgagaaguacggcggccugaacaagagcaagcccuacuacaccggcgagcacgccaaggccaucggcaacugccccaucugggugaagaccccccugaagcuggccaacggcaccaaguacagaccccccgccaagcugcugaaggagagaggcuucuucggcgccaucgccggcuuccuggagggcggcugggagggcaugaucgccggcuggcacggcuacaccagccacggcgcccacggcguggccguggccgccgaccugaagagcacccaggaggccaucaacaagaucaccaagaaccugaacagccugagcgagcuggaggugaagaaccugcagagacugagcggcgccauggacgagcugcacaacgagauccuggagcuggacgagaagguggacgaccugagagccgacaccaucagcagccagaucgagcuggccgugcugcugagcaacgagggcaucaucaacagcgaggacgagcaccugcuggcccuggagagaaagcugaagaagaugcugggccccagcgccguggacaucggcaacggcugcuucgagaccaagcacaagugcaaccagaccugccuggacagaaucgccgccggcaccuucaacgccggcgaguucagccugcccaccuucgacagccugaacaucaccgccgccagccugaacgacgacggccuggacaaccacaccauccugcuguacuacagcaccgccgccagcagccuggccgugacccugaugaucgccaucuucaucguguacaugaucagcagagacaacgugagcugcagcaucugccuguga

SEQ ID NO: 186492 - RNA, 1755 nt, Artificial Sequence; identical to SEQ ID NO: 186465
  derived and/or modified CDS sequence (opt4) from hemagglutinin__InfluenzaB__ABL76793

SEQ ID NO: 186493 - RNA, 1755 nt, Artificial Sequence; identical to SEQ ID NO: 186465
  derived and/or modified CDS sequence (opt4) from hemagglutinin__InfluenzaB__ABL76815

SEQ ID NO: 186494 - RNA, 1758 nt, Artificial Sequence
  derived and/or modified CDS sequence (opt4) from hemagglutinin__InfluenzaB__ABL76826
augaaggccaucaucgugcugcugaugguggugaccagcaacgccgacagaaucugcaccggcaucaccagcagcaacagcccccacguggugaagaccgccacccagggcgaggugaacgugaccggcgugaucccccugaccaccacccccaccaagagccacuucgccaaccugaagggcaccaagaccagaggcaagcugugccccgagugccugaacugcaccgaccuggacguggcccugggcagacccaagugcaccggcaacauccccagcgccaaggugagcauccugcacgaggugagacccgugaccagcggcugcuuccccaucaugcacgacagaaccaagaucagacagcugcccaaccugcugagaggcuacgagcacaucagacugagcacccacaacgugaucaacgccgagaaggcccccggcggccccuacaagaucggcaccagcggcagcugccccaacgugaccaacggcaacggcuucuucgccaccauggccugggccgugcccaagaacgacaacaacaagaccgccaccaacagccugaccaucgaggugcccuacaucugcaccgagggcgaggaccagaucaccguguggggcuuccacagcgacaacgagacccagauggccaagcuguacggcgacagcaagccccagaaguucaccagcagcgccaacggcgugaccacccacuacgugagccagaucggcggcuuccccaaccagaccgaggacggcggccugccccagagcggcagaaucgugguggacuacauggugcagaagagcggcaagaccggcaccaucaccuaccagagaggcauccugcugccccagaagguguggugcgccagcggcagaagcaaggugaucaagggcagccugccccugaucggcgaggccgacugccugcacgagaaguacggcggccugaacaagagcaagcccuacuacaccggcgagcacgccaaggccaucggcaacugccccaucugggugaagaccccccugaagcuggccaacggcaccaaguacagaccccccgccaagcugcugaaggagagaggcuucuucggcgccaucgccggcuuccuggagggcggcugggagggcaugaucgccggcuggcacggcuacaccagccacggcgcccacggcguggccguggccgccgaccugaagagcacccaggaggccaucaacaagaucaccaagaaccugaacagccugagcgagcuggaggugaagaaccugcagagacugagcggcgccauggacgagcugcacaacgagauccuggagcuggacgagaagguggacgaccugagagccgacaccaucagcagccagaucgagcuggccgugcugcugagcaacgagggcaucaucaacagcgaggacgagcaccugcuggcccuggagagaaagcugaagaagaugcugggccccagcgccguggagaucggcaacggcugcuucgagaccaagcacaagugcaaccagaccugccuggacagaaucgccgccggcaccuucgacgccggcgaguucagccugcccaccuucgacagccugaacaucaccgccgccagccugaacgacgacggccuggacaaccacaccauccugcuguacuacagcaccgccgccagcagccuggccgugacccugaugaucgccaucuucgugguguacauggugagcagagacaacgugagcugcagcaucugccuguga

SEQ ID NO: 186495 - RNA, 1758 nt, Artificial Sequence
  derived and/or modified CDS sequence (opt4) from hemagglutinin__InfluenzaB__ABL76837
augaaggccaucaucgugcugcugaugguggugaccagcaacgccgacagaaucugcaccggcaucaccagcagcaacagcccccacguggugaagaccgccacccagggcgaggugaacgugaccggcgugaucccccugaccaccacccccaccaagagccacuucgccaaccugaagggcaccaagaccagaggcaagcugugccccaagugccugaacugcaccgaccuggacguggcccugggcagacccaagugcaccggcaacauccccagcgccgaggugagcauccugcacgaggugagacccgugaccagcggcugcuuccccaucaugcacgacagaaccaaggugagacagcugcccaaccugcugagaggcuacgagcacaucagacugagcacccacaacgugaucaacgccgagaaggcccccggcggccccuacaagaucggcaccagcggcagcugccccaacgugaccaacggcaacggcuucuucgccaccauggccugggccgugcccaagaacgacaacaacaagaccgccaccaacagccugaccguggaggugcccuacaucugcaccgagggcgaggaccagaucaccguguggggcuuccacagcgacagcgagacccagauggccaagcuguacggcgacagcaagccccagaaguucaccagcagcagcaacggcgugaccacccacuacgugagccagaucggcggcuuccccaaccagaccgaggacggcggccugccccagagcggcagaaucgugguggacuacauggugcagaagagcggcaagaccggcaccaucaccuaccagagaggcauccugcugccccagaagguguggugcgccagcggcagaagcaaggugaucaagggcagccugccccugaucggcgaggccgacugccugcacgagagauacggcggccugaacaagagcaagcccuacuacaccggcgagcacgccaaggccaucggcaacugccccaucugggugaagaccccccugaagcuggccaacggcaccaaguacagaccccccgccaagcugcugaaggagagaggcuucuucggcgccaucgccggcuuccuggagggcggcugggagggcaugaucgccggcuggcacggcuacaccagccacggcgcccacggcguggccguggccgccgaccugaagagcacccaggaggccaucaacaagaucaccaagaaccugaacagccugagcgagcuggaggugaagaaccugcagagacugagcggcgccauggacgagcugcacaacgagauccuggagcuggacgagaagguggacgaccugagagccgacaccaucagcagccagaucgagcuggccgugcugcugagcaacgagggcaucaucaacagcgaggacgagcaccugcuggcccuggagagaaagcugaagaagaugcugggccccagcgccguggagaucggcaacggcugcuucgagaccaagcacaagugcaaccagaccugccuggacagaaucgccgccggcaccuucgacgccggcgaguucagccugcccaccuucgacagccugaacaucaccgccgccagccugaacgacgacggccuggacaaccacaccauccugcuguacuacagcaccgccgccagcagccuggccgugacccugaugaucgccaucuucgugguguacauggugagcagagacaacgugagcugcagcaucugccuguga

SEQ ID NO: 186496 - RNA, 1755 nt, Artificial Sequence
  derived and/or modified CDS sequence (opt4) from hemagglutinin__InfluenzaB__ABL76848
augaaggccaucaucgugcugcugaugguggugaccagcaacgccgacagaaucugcaccggcaucaccagcagcaacagcagccacguggugaagaccgccacccagggcgaggugaacgugaccggcgccaucccccugaccaccacccccaccaagagccacuucgccaaccugaagggcaccaagaccagaggcaagcugugccccaccugccugaacugcaccgaccuggacguggcccugggcagacccaugugcgugggcaucaccccccccgccaaggccagcauccugcacgaggugagacccgugaccagcggcugcuuccccaucaugcacgacagaaccaagaucagacagcugcccaaccugcugagaggcuacgagaagaucagacugagcacccagaacgugaucaacgccgagaaggcccccggcggccccuacagacugggcaccagcggcagcugccccaacgccaccagcaagagcggcuucuucgccaccauggccugggccgugcccagagacaacaacaagaccgccaccaacccccugaccguggaggugccccacaucugcaccaaggaggaggaccagaucaccguguggggcuuccacagcgacaacaagacccagaugaagaaccuguacggcgacagcaacccccagaaguucaccagcagcgccaacggcaucaccacccacuacgugagccagaucggcggcuuccccgaccagaccgaggacggcggccugccccagagcggcagaaucgugguggacuacauggugcagaagcccggcaagaccggcaccaucguguaccagagaggcauccugcugccccagaagguguggugcgccagcggcagaagcaaggugaucaagggcagccugccccugaucggcgaggccgacugccugcacgagaaguacggcggccugaacaagagcaagcccuacuacaccggcgagcacgccaaggccaucggcaacugccccaucugggugaagaccccccugaagcuggccaacggcaccaaguacagaccccccgccaagcugcugaaggagagaggcuucuucggcgccaucgccggcuuccuggagggcggcugggagggcaugaucgccggcuggcacggcuacaccagccacggcgcccacggcguggccguggccgccgaccugaagagcacccaggaggccaucaacaagaucaccaagaaccugaacagccugagcgagcuggaggugaagaaccugcagagacugagcggcgccauggacgagcugcacaacgagauccuggagcuggacgagaagguggacgaccugagagccgacaccaucagcagccagaucgagcuggccgugcugcugagcaacgagggcaucaucaacagcgaggacgagcaccugcuggcccuggagagaaagcugaagaagaugcugggccccagcgccguggacaucggcaacggcugcuucgagaccaagcacaagugcaaccagaccugccuggacagaaucgccgccggcaccuucaacgccggcgaguucagccugcccaccuucgacagccugaacaucaccgccgccagccugaacgacgacggccuggacaaccacaccauccugcuguacuacagcaccgccgccagcagccuggccgugacccugaugaucgccaucuucaucguguacaugaucagcagagacaacgugagcugcagcaucugccuguga

SEQ ID NO: 186497 - RNA, 1755 nt, Artificial Sequence; identical to SEQ ID NO: 186465
  derived and/or modified CDS sequence (opt4) from hemagglutinin__InfluenzaB__ABL76859

SEQ ID NO: 186498 - RNA, 1755 nt, Artificial Sequence
  derived and/or modified CDS sequence (opt4) from hemagglutinin__InfluenzaB__ABL76881
augaaggccaucaucgugcugcugaugguggugaccagcaacgccgacagaaucugcaccggcaucaccagcagcaacagcccccacguggugaagaccgccacccagggcgaggugaacgugaccggcgugaucccccugaccaccacccccaccaagagccacuucgccaaccugaagggcaccagaaccagaggcaagcugugccccgacugccugaacugcaccgaccuggacguggcccugggcagacccaugugcgugggcaccacccccagcgccaaggccagcauccugcacgaggugagacccgugaccagcggcugcuuccccaucaugcacgacagaaccaagaucagacagcugcccaaccugcugagaggcuacgagaacaucagacugagcacccagaacgugaucgacgccgagaaggccagcggcggccccuacagacugggcaccagcggcagcugccccaacgccaccagcaagagcggcuucuucgccaccauggccugggccgugcccaaggacaacaacaagaacgccaccaacccccugaccguggaggugcccuacaucugcaccgagggcgaggaccagaucaccguguggggcuuccacagcgacaacgagacccagaugaagaaccuguacggcgacagcaacccccagaaguucaccagcagcgccaacggcgugaccacccacuacgugagccagaucggcggcuuccccgaccagaaggaggacggcggccugccccagagcggcagaaucgugguggacuacauggugcagaagcccggcaagaccggcaccaucguguaccagagaggcgugcugcugccccagaagguguggugcgccagcggcagaagcaaggugaucaagggcagccugccccugaucggcgaggccgacugccugcacgagaaguacggcggccugaacaagagcaagcccuacuacaccggcgagcacgccaaggccaucggcaacugccccaucugggugaagaccccccugaagcuggccaacggcaccaaguacagaccccccgccaagcugcugaaggagagaggcuucuucggcgccaucgccggcuuccuggagggcggcugggagggcaugaucgccggcuggcacggcuacaccagccacggcgcccacggcguggccguggccgccgaccugaagagcacccaggaggccaucaacaagaucaccaagaaccugaacagccugagcgagcuggaggugaagaaccugcagagacugagcggcgccauggacgagcugcacaacgagauccuggagcuggacgagaagguggacgaccugagagccgacaccaucagcagccagaucgagcuggccgugcugcugagcaacgagggcaucaucaacagcgaggacgagcaccugcuggcccuggagagaaagcugaagaagaugcugggccccagcgccguggacaucggcaacggcugcuucgagaccaagcacaagugcaaccagaccugccuggacagaaucgccgccggcaccuucaacgccggcgaguucagccugcccaccuucgacagccugaacaucaccgccgccagccugaacgacgacggccuggacaaccacaccauccugcuguacuacagcaccgccgccagcagccuggccgugacccugaugcuggccaucuucaucguguacauggugagcagagacaacgugagcugcagcaucugccuguga

SEQ ID NO: 186499 - RNA, 1755 nt, Artificial Sequence
  derived and/or modified CDS sequence (opt4) from hemagglutinin__InfluenzaB__ABL76892
augaaggccaucaucgugcugcugaugguggugaccagcaacgccgacagaaucugcaccggcaucaccagcagcaacagcccccacguggugaagaccgccacccagggcgaggugaacgugaccggcgugaucccccugaccaccacccccaccaagagccacuucgccaaccugaagggcaccagaaccagaggcaagcugugccccgacugccugaacugcaccgaccuggacguggcccugggcagacccaugugcgugggcaccacccccagcgccaaggccagcauccugcacgaggugagacccgugaccagcggcugcuuccccaucaugcacgacagaaccaagaucagacagcugcccaaccugcugagaggcuacgagaacaucagacugagcacccagaacgugaucgacgccgagaaggcccccggcggccccuacagacugggcaccagcggcagcugccccaacgccaccagcaagagcggcuucuucgccaccauggccugggccgugcccaaggacaacaacaagaacgccaccaacccccugaccguggaggugcccuacgugugcaccgagggcgaggaccagaucaccguguggggcuuccacagcgacaacaagacccagaugaagaaccuguacggcgacagcaacccccagaaguucaccagcagcgccaacggcgugaccacccacuacgugagccagaucggcggcuuccccgaccagaccgaggacggcggccugccccagagcggcagaaucgugguggacuacauggugcagaagcccggcaagaccggcaccaucguguaccagagaggcgugcugcugccccagaagguguggugcgccagcggcagaagcaaggugaucaagggcagccugccccugaucggcgaggccgacugccugcacgagaaguacggcggccugaacaagagcaagcccuacuacaccggcgagcacgccaaggccaucggcaacugccccaucugggugaagaccccccugaagcuggccaacggcaccaaguacagaccccccgccaagcugcugaaggagagaggcuucuucggcgccaucgccggcuuccuggagggcggcugggagggcaugaucgccggcuggcacggcuacaccagccacggcgcccacggcguggccguggccgccgaccugaagagcacccaggaggccaucaacaagaucaccaagaaccugaacagccugagcgagcuggaggugaagaaccugcagagacugagcggcgccauggacgagcugcacaacgagauccuggagcuggacgagaagguggacgaccugagagccgacaccaucagcagccagaucgagcuggccgugcugcugagcaacgagggcaucaucaacagcgaggacgagcaccugcuggcccuggagagaaagcugaagaagaugcugggccccagcgccguggacaucggcaacggcugcuucgagaccaagcacaagugcaaccagaccugccuggacagaaucgccgccggcaccuucaacgccggcgaguucagccugcccaccuucgacagccugaacaucaccgccgccagccugaacgacgacggccuggacaaccacaccauccugcuguacuacagcaccgccgccagcagccuggccgugacccugaugcuggccaucuucaucguguacauggugagcagagacaacgugagcugcagcaucugccuguga

SEQ ID NO: 186500 - RNA, 1755 nt, Artificial Sequence
  derived and/or modified CDS sequence (opt4) from hemagglutinin__InfluenzaB__ABL76903
augaaggccaucaucgugcugcugaugguggugaccagcaacgccgacagaaucugcaccggcaucaccagcagcaacagcccccacguggugaagaccgccacccagggcgaggugaacgugaccggcgugaucccccugaccaccacccccaccaagagcuacuucgccaaccugaagggcaccagaaccagaggcaagcugugccccgacugccugaacugcaccgaccuggacguggcccugggcagacccaugugcgugggcaccacccccagcgccaaggccagcauccugcacgaggugagacccgugaccagcggcugcuuccccaucaugcacgacagaaccaagaucagacagcugcccaaccugcugagaggcuacgagaacaucagacugagcacccagagcgugaucgacgccgagaaggcccccggcggccccuacagacugggcaccagcggcagcugccccaacgccaccagcaagagcggcuucuucgccaccauggccugggccgugcccaaggacaacaacaagaacgccaccaacccccugaccguggaggugcccuacaucugcaccgagggcgaggaccagaucaccguguggggcuuccacagcgacgacaagacccagaugaagaaccuguacggcgacagcaacccccagaaguucaccagcagcgccaacggcgugaccacccacuacgugagccagaucggcggcuuccccgaccagaccgaggacggcggccugccccagagcggcagaaucgugguggacuacaugauccagaagcccggcaagaccggcaccaucguguaccagagaggcgugcugcugccccagaagguguggugcgccagcggcagaagcaaggugaucaagggcagccugccccugaucggcgaggccgacugccugcacgagaaguacggcggccugaacaagagcaagcccuacuacaccggcgagcacgccaaggccaucggcaacugccccaucugggugaagaccccccugaagcuggccaacggcaccaaguacagaccccccgccaagcugcugaaggagagaggcuucuucggcgccaucgccggcuuccuggagggcggcugggagggcaugaucgccggcuggcacggcuacaccagccacggcgcccacggcguggccguggccgccgaccugaagagcacccaggaggccaucaacaagaucaccaagaaccugaacagccugagcgagcuggaggugaagaaccugcagagacugagcggcgccauggacgagcugcacaacgagauccuggagcuggacgagaagguggacgaccugagagccgacaccaucagcgcccagaucgagcuggccgugcugcugagcaacgagggcaucaucaacagcgaggacgagcaccugcuggcccuggagagaaagcugaagaagaugcugggccccagcgccguggacaucggcaacggcugcuucgagaccaagcacaagugcaaccagaccugccuggacagaaucgccgccggcaccuucaacgccggcgaguucagccugcccaccuucgacagccugaacaucaccgccgccagccugaacgacgacggccuggacaaccacaccauccugcuguacuacagcaccgccgccagcagccuggccgugacccugaugcuggccaucuucaucguguacauggugagcagagacaacgugagcugcagcaucugccuguga

SEQ ID NO: 186501 - RNA, 1758 nt, Artificial Sequence
  derived and/or modified CDS sequence (opt4) from hemagglutinin__InfluenzaB__ABL76914
augaaggccaucaucgugcugcugaugguggugaccagcaacgccgacagaaucugcaccggcaucaccagcagcaacagcccccacguggugaagaccgccacccagggcgaggugaacgugaccggcgugaucccccugaccaccacccccaccaagagccacuucgccaaccugaagggcaccaagaccagaggcaagcugugccccaagugccugaacugcaccgaccuggacguggcccugggcagacccaagugcaccggcaacauccccagcgccgaggugagcauccugcacgaggugagacccgugaccagcggcugcuuccccaucaugcacgacagaaccaagaucagacagcugcccaaccugcugagaggcuacgagcacaucagacugagcacccacaacgugaucaacgccgagaaggcccccggcggccccuacaagaucggcaccagcggcagcugccccaacgugaccaacggcaacggcuucuucgccaccauggccugggccgugcccaagaacgacaacaacaagaccgccaccaacagccugaccaucgaggugcccuacaucugcaccgagggcgaggaccagaucaccguguggggcuuccacagcgacaacgaggcccagauggccaagcuguacggcgacagcaagccccagaaguucaccagcagcagcaacggcgugaccacccacuacgugagccagaucggcggcuuccccaaccagaccgaggacggcggccugccccagagcggcagaaucgugguggacuacauggugcagaagagcggcaagaccggcaccaucaccuaccagagaggcauccugcugccccagaagguguggugcgccagcggcagaagcaaggugaucaagggcagccugccccugaucggcgaggccgacugccugcacgagagauacggcggccugaacaagagcaagcccuacuacaccggcgagcacgccaaggccaucggcaacugccccaucugggugaagaccccccugaagcuggccaacggcaccaaguacagaccccccgccaagcugcugaaggagagaggcuucuucggcgccaucgccggcuuccuggagggcggcugggagggcaugaucgccggcuggcacggcuacaccagccacggcgcccacggcguggccguggccgccgaccugaagagcacccaggaggccaucaacaagaucaccaagaaccugaacagccugagcgagcuggaggugaagaaccugcagagacugagcggcgccauggacgagcugcacaacgagauccuggagcuggacgagaagguggacgaccugagagccgacaccaucagcagccagaucgagcuggccgugcugcugagcaacgagggcaucaucaacagcgaggacgagcaccugcuggcccuggagagaaagcugaagaagaugcugggccccagcgccguggagaucggcaacggcugcuucgagaccaagcacaagugcaaccagaccugccuggacagaaucgccgccggcaccuucgacgccggcgaguucagccugcccaccuucgacagccugaacaucaccgccgccagccugaacgacgacggccuggacaaccacaccauccugcuguacuacagcaccgccgccagcagccuggccgugacccugaugaucgccaucuucgugguguacauggugagcagagacaacgugagcugcagcaucugccuguga

SEQ ID NO: 186502 - RNA, 1755 nt, Artificial Sequence
  derived and/or modified CDS sequence (opt4) from hemagglutinin__InfluenzaB__ABL76936
augaaggccaucaucgugcugcugaugguggugaccagcaacgccgacagaaucugcaccggcaucaccagcagcaacagcccccacguggugaagaccgccacccagggcgaggugaacgugaccggcgugaucccccugaccaccacccccaccaagagccacuucgccaaccugaagggcaccaagaccagaggcaagcugugccccaccugccugaacugcaccgaccuggacguggcccugggcagacccaugugcgugggcaccacccccagcgccaaggccagcauccugcacgaggugagacccgugaccagcggcugcuuccccaucaugcacgacagaaccaagaucagacagcugcccaaccugcugagaggcuacgagaagaucagacugagcacccagaacgugaucaacgccgagaaggcccccggcggccccuacagacugggcaccagcggcagcugccccaacgccaccagcagaagcggcuucuucgccaccauggccugggccgugcccagagacaacaacaagaccgccaccaacccccugaccguggaggugcccuacaucugcaccaaggaggaggaccagaucaccguguggggcuuccacagcgacgacaagacccagaugaagaaccuguacggcgacagcaacccccagaaguucaccagcagcgccaacggcgugaccacccacuacgugagccagaucggcggcuuccccgaccagaccgaggacggcggccugccccagagcggcagaaucgugguggacuacauggugcagaagcccggcaagaccggcaccaucguguaccagagaggcgugcugcugccccagaagguguggugcgccagcggcagaagcaaggugaucaagggcagccugccccugaucggcgaggccgacugccugcacgagaaguacggcggccugaacaagagcaagcccuacuacaccggcgagcacgccaaggccaucggcaacugccccaucugggugaagaccccccugaagcuggccaacggcaccaaguacagaccccccgccaagcugcugaaggagagaggcuucuucggcgccaucgccggcuuccuggagggcggcugggagggcaugaucgccggcuggcacggcuacaccagccacggcgcccacggcguggccguggccgccgaccugaagagcacccaggaggccaucaacaagaucaccaagaaccugaacagccugagcgagcuggaggugaagaaccugcagagacugagcggcgccauggacgagcugcacaacgagauccuggagcuggacgagaagguggacgaccugagagccgacaccaucagcagccagaucgagcuggccgugcugcugagcaacgagggcaucaucaacagcgaggacgagcaccugcuggcccuggagagaaagcugaagaagaugcugggccccagcgccguggacaucggcaacggcugcuucgagaccaagcacaagugcaaccagaccugccuggacagaaucgccgccggcaccuucaacgccggcgaguucagccugcccaccuucgacagccugaacaucaccgccgccagccugaacgacgacggccuggacaaccacaccauccugcuguacuacagcaccgccgccagcagccuggccgugacccugaugaucgccaucuucaucguguacauggugagcagagacaacgugagcugcagcaucugccuguga

SEQ ID NO: 186503 - RNA, 1755 nt, Artificial Sequence
  derived and/or modified CDS sequence (opt4) from hemagglutinin__InfluenzaB__ABL76947
augaaggccaucaucgugcugcugaugguggugaccagcaacgccgacagaaucugcaccggcaucaccagcagcaacagcccccacguggugaagaccgccacccagggcgaggugaacgugaccggcgccaucccccugaccaccacccccaccaagagccacuucgccaaccugaagggcaccaagaccagaggcaagcugugccccaccugccugaacugcaccgaccuggacguggcccugggcagacccaugugcgugggcaucacccccagcgccaaggccagcauccugcacgaggugagacccgugaccagcggcugcuuccccaucaugcacgacagaaccaagaucagacagcugcccaaccugcugagaggcuacgagaagaucagacugagcacccagaacgugaucaacgccgagaaggcccccggcggccccuacagacugggcaccagcggcagcugccccaacgccaccagcagaagcggcuucuucgccaccauggccugggccgugcccagagacaacaacaagaccgccaccaacccccugaccguggaggugccccacaucugcaccaaggaggaggaccagaucaccguguggggcuuccacagcgacgacaagacccagaugaagaaccuguacggcgacagcaacccccagaaguucaccagcagcaccaacggcaucaccacccacuacgugagccagaucggcggcuuccccgaccagaccgaggacggcggccugccccagagcggcagaaucgugguggacuacauggugcagaagcccggcaagaccggcaccaucguguaccagagaggcauccugcugccccagaagguguggugcgccagcggcagaagcaaggugaucaagggcagccugccccugaucggcgaggccgacugccugcacgagaaguacggcggccugaacaagagcaagcccuacuacaccggcgagcacgccaaggccaucggcaacugccccaucugggugaagaccccccugaagcuggccaacggcaccaaguacagaccccccgccaagcugcugaaggagagaggcuucuucggcgccaucgccggcuuccuggagggcggcugggagggcaugaucgccggcuggcacggcuacaccagccacggcgcccacggcguggccguggccgccgaccugaagagcacccaggaggccaucaacaagaucaccaagaaccugaacagccugagcgagcuggaggugaagaaccugcagagacugagcggcgccauggacgagcugcacaacgagauccuggagcuggacgagaagguggacgaccugagagccgacaccaucagcagccagaucgagcuggccgugcugcugagcaacgagggcaucaucaacagcgaggacgagcaccugcuggcccuggagagaaagcugaagaagaugcugggccccagcgccguggacaucggcaacggcugcuucgagaccaagcacaagugcaaccagaccugccuggacagaaucgccgccggcaccuucaacgccggcgaguucagccugcccaccuucgacagccugaacaucaccgccgccagccugaacgacgacggccuggacaaccacaccauccugcuguacuacagcaccgccgccagcagccuggccgugacccugaugaucgccaucuucaucguguacaugaucagcagagacaacgugagcugcagcaucugccuguga

SEQ ID NO: 186504 - RNA, 1758 nt, Artificial Sequence
  derived and/or modified CDS sequence (opt4) from hemagglutinin__InfluenzaB__ABL76958
augaaggccaucaucgugcugcugaugguggugaccagcaacgccgacagaaucugcaccggcaucaccagcagcaacagcccccacguggugaagaccgccacccagggcgaggugaacgugaccggcgugaucccccugaccaccacccccaccaagagccacuucgccaaccugaagggcaccaagaccagaggcaagcugugccccaagugccugaacugcaccgaccuggacguggcccugggcagacccaagugcaccggcaacauccccagcgccaaggugagcauccugcacgaggugagacccgugaccagcggcugcuuccccaucaugcacgacagaaccaagaucagacagcugcccaaccugcugagaggcuacgagcacaucagacugagcacccacaacgugaucaacgccgagaaggcccccggcggccccuacaagaucggcaccagcggcagcugccccaacgugaccaacggcaacggcuucuucgccaccauggccugggccgugcccaagaacgacaacaacaagaccgccaccaacagccugaccaucgaggugcccuacaucugcaccgagggcgaggaccagaucaccguguggggcuuccacagcgacaacgaggcccagauggccaagcuguacggcgacagcaagccccagaaguucaccagcagcgccaacggcgugaccacccacuacgugagccagaucggcggcuuccccaaccagaccgaggacggcggccugccccagagcggcagaaucgugguggacuacauggugcagaagagcggcaagaccggcaccaucaccuaccagagaggcauccugcugccccagaagguguggugcgccagcggcagaagcaaggugaucaagggcagccugccccugaucggcgaggccgacugccugcacgagaaguacggcggccugaacaagagcaagcccuacuacaccggcgagcacgccaaggccaucggcaacugccccaucugggugaagaccccccugaagcuggccaacggcaccaaguacagaccccccgccaagcugcugaaggagagaggcuucuucggcgccaucgccggcuuccuggagggcggcugggagggcaugaucgccggcuggcacggcuacaccagccacggcgcccacggcguggccguggccgccgaccugaagagcacccaggaggccaucaacaagaucaccaagaaccugaacagccugagcgagcuggaggugaagaaccugcagagacugagcggcgccauggacgagcugcacaacgagauccuggagcuggacgagaagguggacgaccugagagccgacaccaucagcagccagaucgagcuggccgugcugcugagcaacgagggcaucaucaacagcgaggacgagcaccugcuggcccuggagagaaagcugaagaagaugcugggccccagcgccguggagaucggcaacggcugcuucgagaccaagcacaagugcaaccagaccugccuggacagaaucgccgccggcaccuucaacgccggcgaguucagccugcccaccuucgacagccugaacaucaccgccgccagccugaacgacgacggccuggacaaccacaccauccugcuguacuacagcaccgccgccagcagccuggccgugacccugaugaucgccaucuucgugguguacauggugagcagagacaacaucagcugcagcaucugccuguga

SEQ ID NO: 186505 - RNA, 1758 nt, Artificial Sequence
  derived and/or modified CDS sequence (opt4) from hemagglutinin__InfluenzaB__ABL76969
augaaggccaucaucgugcugcugaugguggugaccagcaacgccgacagaaucugcaccggcaucaccagcagcaacagcccccacguggugaagaccgccacccagggcgaggugaacgugaccggcgugaucccccugaccaccacccccaccaagagccacuucgccaaccugaagggcaccagaaccagaggcaagcugugccccaagugccugaacugcaccgaccuggacguggcccugggcagacccaagugcaccggcaacauccccagcgccaaggugagcauccugcacgaggugagacccgugaccagcggcugcuuccccaucaugcacgacagaaccaagaucagacagcugcccaaccugcugagaggcuacgagcacaucagacugagcauccacaacgugaucaacgccgagaaggcccccggcggccccuacaagaucggcaccagcggcagcugccccaacgugaccaacggcaacggcuucuucgccaccauggccugggccgugcccaagaacgacaacaacaagaccgccaccaacagccugaccaucgaggugcccuacaucugcaccgagggcgaggaccagaucaccguguggggcuuccacagcgacaacgaggcccagauggccaagcuguacggcgacagcaagccccagaaguucaccagcagcgccaacggcgugaccacccacuacgugagccagaucggcggcuuccccaaccagaccgaggacggcggccugccccagagcggcagaaucgugguggacuacauggugcagaagagcggcaagaccggcaccaucaccuaccagagaggcauccugcugccccagaagguguggugcgccagcggcagaagcaaggugaucaagggcagccugccccugaucggcgaggccgacugccugcacgagaaguacggcggccugaacaagagcaagcccuacuacaccggcgagcacgccaaggccaucggcaacugccccaucugggugaagaccccccugaagcuggccaacggcaccaaguacagaccccccgccaagcugcugaaggagagaggcuucuucggcgccaucgccggcuuccuggagggcggcugggagggcaugaucgccggcuggcacggcuacaccagccacggcgcccacggcguggccguggccgccgaccugaagagcacccaggaggccaucaacaagaucaccaagaaccugaacagccugagcgagcuggaggugaagaaccugcagagacugagcggcgccauggacgagcugcacaacgagauccuggagcuggacgagaagguggacgaccugagagccgacaccaucagcagccagaucgagcuggccgugcugcugagcaacgagggcaucaucaacagcgaggacgagcaccugcuggcccuggagagaaagcugaagaagaugcugggccccagcgccguggagaucggcaacggcugcuucgagaccaagcacaagugcaaccagaccugccuggacagaaucgccgccggcaccuucgacgccggcgaguucagccugcccaccuucgacagccugaacaucaccgccgccagccugaacgacgacggccuggacaaccacaccauccugcuguacuacagcaccgccgccagcagccuggccgugacccugaugaucgccaucuucgugguguacauggugagcagagacaacgugagcugcagcaucugccuguga

SEQ ID NO: 186506 - RNA, 1755 nt, Artificial Sequence
  derived and/or modified CDS sequence (opt4) from hemagglutinin__InfluenzaB__ABL76980
augaaggccaucaucgugcugcugaugguggugaccagcaacgccgacagaaucugcaccggcaucaccagcagcaacagcccccacguggugaagaccgccacccagggcgaggugaacgugaccggcgugaucccccugaccaccacccccaccaagagccacuucgccaaccugaagggcaccaagaccagaggcaagcugugccccaccugccugaacugcaccgaccuggacguggcccugggcagacccaugugcgugggcaucacccccagcgccaaggccagcauccugcacgaggugagacccgugaccagcggcugcuuccccaucaugcacgacagaaccaagaucagacagcugcccaaccugcugagaggcuacgagaagaucagacugagcacccagaacgugaucaacgccgagaaggcccccggcggccccuacagacugggcaccagcggcagcugccccaacgccaccagcaagagcggcuucuucgccaccauggccugggccgugcccagagacaacaacaagaccgccaccaacccccugaccguggaggugcccuacaucugcaccaaggaggaggaccagaucaccguguggggcuuccacagcgacaacaagacccagaugaagaaccuguacggcgacagcgacccccagaaguucaccagcagcgccaacggcgugaccacccacuacgugagccagaucggcggcuuccccgaccagaccgaggacggcggccugccccagagcggcagaaucgugguggacuacauggugcagaagcccggcaagaccggcaccaucguguaccagagaggcauccugcugccccagaagguguggugcgccagcggcagaagcaaggugaucaagggcagccugccccugaucggcgaggccgacugccugcacgagaaguacggcggccugaacaagagcaagcccuacuacaccggcgagcacgccaaggccaucggcaacugccccaucugggugaagaccccccugaagcuggccaacggcaccaaguacagaccccccgccaagcugcugaaggagagaggcuucuucggcgccaucgccggcuuccuggagggcggcugggagggcaugaucgccggcuggcacggcuacaccagccacggcgcccacggcguggccguggccgccgaccugaagagcacccaggaggccaucaacaagaucaccaagaaccugaacagccugagcgagcuggaggugaagaaccugcagagacugagcggcgccauggacgagcugcacaacgagauccuggagcuggacgagaagguggacgaccugagagccgacaccaucagcagccagaucgagcuggccgugcugcugagcaacgagggcaucaucaacagcgaggacgagcaccugcuggcccuggagagaaagcugaagaagaugcugggccccagcgccguggacaucggcaacggcugcuucgagaccaagcacaagugcaaccagaccugccuggacagaaucgccgccggcaccuucaacgccggcgaguucagccugcccaccuucgacagccugaacaucaccgccgccagccugaacgacgacggccuggacaaccacaccauccugcuguacuacagcaccgccgccagcagccuggccgugacccugaugaucgccaucuucaucguguacaugaucagcagagacaacgugagcugcagcaucugccuguga

SEQ ID NO: 186507 - RNA, 1752 nt, Artificial Sequence
  derived and/or modified CDS sequence (opt4) from hemagglutinin__InfluenzaB__ABL76991
augaaggccaucaucgugcugcugaugguggugaccagcaacgccgacagaaucugcaccggcaucaccagcagcaacagcccccacguggugaagaccgccacccagggcgaggugaacgugaccggcgugaucccccugaccaccacccccaccaagagccacuucgccaaccugaagggcaccaagaccagaggcaagcugugccccaacugccugaacugcaccgaccuggacguggcccugggcagacccaugugcaucggcaucacccccagcgccaaggccagcauccugcacgaggugagacccgugaccagcggcugcuuccccaucaugcacgacagaaccaagaucagacagcugcccaaccugcugagaggcuacgagcacaucagacugagcacccacaacgugaucaacgccgagagagcccccggcggccccuacagacugggcaccagcggcagcugccccaacgugaccagcagaagcggcuucuucgccaccauggccugggccgugcccagagacaacaagaccgccaccaacccccugaccguggaggugcccuacaucugcaccaagggcgaggaccagaucaccguguggggcuuccacagcgacaacaagauccagaugaagaaccuguacggcgacagcaacccccagaaguucaccagcagcgccaacggcaucaccacccacuacgugagccagaucggcggcuuccccaaccagaccgaggacggcggccugccccagagcggcagaaucgugguggacuacauggugcagaagcccggcaagaccggcaccaucguguaccagagaggcgugcugcugccccagaagguguggugcgccagcggcagaagcaaggugaucaagggcagccugccccugaucggcgaggccgacugccugcacgagaaguacggcggccugaacaagagcaagcccuacuacaccggcgagcacgccaaggccaucggcaacugccccaucugggugaagaccccccugaagcuggccaacggcaccaaguacagaccccccgccaagcugcugaaggagaagggcuucuucggcgccaucgccggcuuccuggagggcggcugggagggcaugaucgccggcuggcacggcuacaccagccacggcgcccacggcguggccguggccgccgaccugaagagcacccaggaggccaucaacaagaucaccaagaaccugaacagccugagcgagcuggaggugaagaaccugcagagacugagcggcgccauggacgagcugcacaacgagauccuggagcuggacgagaagguggacgaccugagagccgacaccaucagcagccagaucgagcuggccgugcugcugagcaacgagggcaucaucaacagcgaggacgagcaccugcuggcccuggagagaaagcugaagaagaugcugggccccagcgccguggacaucggcaacggcugcuucgagaccaagcacaagugcaaccagaccugccuggacagaaucgccgccggcaccuucaacgccggcgaguucagccugcccaccuucgacagccugaacaucaccgccgccagccugaacgacgacggccuggacaaccacaccauccugcuguacuacagcaccgccgccagcagccuggccgugacccugaugaucgccaucuucaucguguacauggugagcagagacaacgugagcugcagcaucugccuguga

SEQ ID NO: 186508 - RNA, 1755 nt, Artificial Sequence
  derived and/or modified CDS sequence (opt4) from hemagglutinin__InfluenzaB__ABL77002
augaaggccaucaucgugcugcugaugguggugaccagcaacgccgacagaaucugcaccggcaucaccagcagcaacagcccccacguggugaagaccgccacccagggcgaggugaacgugaccggcgugaucccccugaccaccacccccaccaagagccacuucgccaaccugaagggcaccaagaccagaggcaagcugugccccaccugccugaacugcaccgaccuggacguggcccugggcagacccaugugcgugggcgugacccccagcgccaaggccagcauccugcacgaggugagacccgugaccagcggcugcuuccccaucaugcacgacagaaccaagaucagacagcugcccaaccugcugagaggcuacgagaagaucagacugagcacccagaacgugaucaacgccgagaaggcccccggcggccccuacagacugggcaccagcggcagcugccccaacgccaccagcagaagcggcuucuucgccaccauggccugggccgugcccagagacaacaacaagaccgccaccaacccccugaccaucgaggugccccacaucugcaccaaggaggaggaccagaucaccaucuggggcuuccacagcgacgacaagacccagaugaagaaccuguacggcgacagcaacccccagaaguucaccagcagcgccaacggcgugaccacccacuacgugagccagaucggcggcuuccccgaccagaccgaggacggcggccugccccagagcggcagaaucgugguggacuacauggugcagaagcccggcaagaccggcaccaucguguaccagagaggcauccugcugccccagaagguguggugcgccagcggcagaagcaaggugaucaagggcagccugccccugaucggcgaggccgacugccugcacgagaaguacggcggccugaacaagagcaagcccuacuacaccggcgagcacgccaaggccaucggcaacugccccaucugggugaagaccccccugaagcuggccaacggcaccaaguacagaccccccgccaagcugcugaaggagagaggcuucuucggcgccaucgccggcuuccuggagggcggcugggagggcaugaucgccggcuggcacggcuacaccagccacggcgcccacggcguggccguggccgccgaccugaagagcacccaggaggccaucaacaagaucaccaagaaccugaacagccugagcgagcuggaggugaagaaccugcagagacugagcggcgccauggacgagcugcacaacgagauccuggagcuggacgagaagguggacgaccugagagccgacaccaucagcagccagaucgagcuggccgugcugcugagcaacgagggcaucaucaacagcgaggacgagcaccugcuggcccuggagagaaagcugaagaagaugcugggccccagcgccguggacaucggcaacggcugcuucgagaccaagcacaagugcaaccagaccugccuggacagaaucgccgccggcaccuucgacgccggcgaguucagccugcccaccuucgacagccugaacaucaccgccgccagccugaacgacgacggccuggacaaccacaccauccugcuguacuacagcaccgccgccagcagccuggccgugacccugaugaucgccaucuucaucguguacaugaucagcagagacaacgugagcugcagcaucugccuguga

SEQ ID NO: 186509 - RNA, 1755 nt, Artificial Sequence
  derived and/or modified CDS sequence (opt4) from hemagglutinin__InfluenzaB__ABL77013
augaaggccaucaucgugcugcugaugguggugaccagcaacgccgacagaaucugcaccggcaucaccagcagcaacagcccccacguggugaagaccgccacccagggcgaggugaacgugaccggcgugaucccccugaccaccacccccaccaagagcuacuucgccaaccugaagggcaccaagaccagaggcaagcugugccccaccugccugaacugcaccgaccuggacguggcccugggcagacccaugugcgugggcaucacccccagcgccaaggccagcauccugcacgaggugagacccgugaccagcggcugcuuccccaucaugcacgacagaaccaagaucagacagcugcccaaccugcugagaggcuacgagaagaucagacugagcacccagaacgugaucaacgccgagaaggcccccggcggccccuacagacugggcaccagcggcagcugccccaacgccaccagcaagagcggcuucuucgccaccauggccugggccgugcccagagacaacaacaagaccgccaccaacccccugaccguggaggugcccuacaucugcaccaaggaggaggaccagaucaccguguggggcuuccacagcgacaacaagaaccagaugaagaaccuguacggcgacagcgacccccagaaguucaccagcagcgccaacggcgugaccacccacuacgugagccagaucggcggcuuccccgaccagaccgaggacggcggccugccccagagcggcagaaucgugguggacuacauggugcagaagcccggcaagaccggcaccaucguguaccagagaggcauccugcugccccagaagguguggugcgccagcggcagaagcaaggugaucaagggcagccugccccugaucggcgaggccgacugccugcacgagaaguacggcggccugaacaagagcaagcccuacuacaccggcgagcacgccaaggccaucggcaacugccccaucugggugaagaccccccugaagcuggccaacggcaccaaguacagaccccccgccaagcugcugaaggagagaggcuucuucggcgccaucgccggcuuccuggagggcggcugggagggcaugaucgccggcuggcacggcuacaccagccacggcgcccacggcguggccguggccgccgaccugaagagcacccaggaggccaucaacaagaucaccaagaaccugaacagccugagcgagcuggaggugaagaaccugcagagacugagcggcgccauggacgagcugcacaacgagauccuggagcuggacgagaagguggacgaccugagagccgacaccaucagcagccagaucgagcuggccgugcugcugagcaacgagggcaucaucaacagcgaggacgagcaccugcuggcccuggagagaaagcugaagaagaugcugggccccagcgccguggacaucggcaacggcugcuucgagaccaagcacaagugcaaccagaccugccuggacagaaucgccgccggcaccuucaacgccggcgaguucagccugcccaccuucgacagccugaacaucaccgccgccagccugaacgacgacggccuggacaaccacaccauccugcuguacuacagcaccgccgccagcagccuggccgugacccugaugaucgccaucuucaucguguacaugaucagcagagacaacgugagcugcagcaucugccuguga

SEQ ID NO: 186510 - RNA, 1755 nt, Artificial Sequence
  derived and/or modified CDS sequence (opt4) from hemagglutinin__InfluenzaB__ABL77024
augaaggccaucaucgugcugcugaugguggugaccagcaacgccgacagaaucugcaccggcaucaccagcagcaacagcccccacguggugaagaccgccacccagggcgaggugaacgugaccggcgccaucccccugaccaccacccccaccaagagccacuucgccaaccugaagggcaccaagaccagaggcaagcugugccccaccugccugaacugcaccgaccuggacguggcccugggcagacccaugugcgugggcaucacccccagcgccaaggccagcauccugcacgaggugagacccgugaccagcggcugcuuccccaucaugcacgacagaaccaagaucagacagcugcccaaccugcugagaggcuacgagaagaucagacugagcacccagaacgugaucaacgccgagaaggcccccggcggccccuacagacugggcaccagcggcagcugccccaacgccaccagcaagagcggcuucuucgccaccauggccugggccgugcccagagacaacaacaagaccgccaccaacccccugaccguggaggugccccacaucugcaccaaggaggaggaccagaucaccguguggggcuuccacagcgacgacaagacccagaugaagaaccuguacggcgacagcaacccccagaaguucaccagcagcgccaacggcaucaccacccacuacgugagccagaucggcggcuuccccgaccagaccgaggacggcggccugccccagagcggcagaaucgugguggacuacauggugcagaagcccggcaagaccggcaccaucguguaccagagaggcauccugcugccccagaagguguggugcgccagcggcagaagcaaggugaucaagggcagccugccccugaucggcgaggccgacugccugcacgagaaguacggcggccugaacaagagcaagcccuacuacaccggcgagcacgccaaggccaucggcaacugccccaucugggugaagaccccccugaagcuggccaacggcaccaaguacagaccccccgccaagcugcugaaggagagaggcuucuucggcgccaucgccggcuuccuggagggcggcugggagggcaugaucgccggcuggcacggcuacaccagccacggcgcccacggcguggccguggccgccgaccugaagagcacccaggaggccaucaacaagaucaccaagaaccugaacagccugagcgagcuggaggugaagaaccugcagagacugagcggcgccauggacgagcugcacaacgagauccuggagcuggacgagaagguggacgaccugagagccgacaccaucagcagccagaucgagcuggccgugcugcugagcaacgagggcaucaucaacagcgaggacgagcaccugcuggcccuggagagaaagcugaagaagaugcugggccccagcgccguggacaucggcaacggcugcuucgagaccaagcacaagugcaaccagaccugccuggacagaaucgccgccggcaccuucaacgccggcgaguucagccugcccaccuucgacagccugaacaucaccgccgccagccugaacgacgacggccuggacaaccacaccauccugcuguacuacagcaccgccgccagcagccuggccgugacccugaugaucgccaucuucaucguguacaugaucagcagagacaacgugagcugcagcaucugccuguga

SEQ ID NO: 186511 - RNA, 1755 nt, Artificial Sequence
  derived and/or modified CDS sequence (opt4) from hemagglutinin__InfluenzaB__ABL77035
augaaggccaucaucgugcugcugaugguggugaccagcaacgccgacagaaucugcaccggcaucaccagcagcaacagcccccacguggugaagaccgccacccagggcgaggugaacgugaccggcgccaucccccugaccaccacccccaccaagagccacuucgccaaccugaagggcaccaagaccagaggcaagcugugccccaccugccugaacugcaccgaccuggacguggcccugggcagacccaugugcgugggcaucacccccagcgccaaggccagcauccugcacgaggugagacccgugaccagcggcugcuuccccaucaugcacgacagaaccaagaucagacagcugcccaaccugcugagaggcuacgagaagaucagacugagcacccagaacgugaucaacgccgagaaggcccccggcggccccuacagacugggcaccagcggcagcugccccaacgccaccagcagaagcggcuucuucgccaccauggccugggccgugcccagagacaacaacaagaccgccaccaacccccugaccguggaggugccccacaucugcaccaaggaggaggaccagaucaccguguggggcuuccacagcgacgacaagacccagaugaagaaccuguacggcgacagcaacccccagaaguucaccagcagcgccaacggcgugaccacccacuacgugagccagaucggcggcuuccccgaccagaccgaggacggcggccugccccagagcggcagaaucgugguggacuacauggugcagaagcccggcaagaccggcaccaucguguaccagagaggcauccugcugccccagaagguguggugcgccagcggcagaagcaaggugaucaagggcagccugccccugaucggcgaggccgacugccugcacgagaaguacggcggccugaacaagagcaagcccuacuacaccggcgagcacgccaaggccaucggcaacugccccaucugggugaagaccccccugaagcuggccaacggcaccaaguacagaccccccgccaagcugcugaaggagagaggcuucuucggcgccaucgccggcuuccuggagggcggcugggagggcaugaucgccggcuggcacggcuacaccagccacggcgcccacggcguggccguggccgccgaccugaagagcacccaggaggccaucaacaagaucaccaagaaccugaacagccugagcgagcuggaggugaagaaccugcagagacugagcggcgccauggacgagcugcacaacgagauccuggagcuggacgagaagguggacgaccugagagccgacaccaucagcagccagaucgagcuggccgugcugcugagcaacgagggcaucaucaacagcgaggacgagcaccugcuggcccuggagagaaagcugaagaagaugcugggccccagcgccguggacaucggcaacggcugcuucgagaccaagcacaagugcaaccagaccugccuggacagaaucgccgccggcaccuucaacgccggcgaguucagccugcccaccuucgacagccugaacaucaccgccgccagccugaacgacgacggccuggacaaccacaccauccugcuguacuacagcaccgccgccagcagccuggccgugacccugaugaucgccaucuucaucguguacaugaucagcagagacaacgugagcugcagcaucugccuguga

SEQ ID NO: 186512 - RNA, 1755 nt, Artificial Sequence
  derived and/or modified CDS sequence (opt4) from hemagglutinin__InfluenzaB__ABL77046
augaaggccaucaucgugcugcugaugguggugaccagcaacgccgacagaaucugcaccggcaucaccagcagcaacagcccccacguggugaagaccgccacccagggcgaggugaacgugaccggcgccaucccccugaccaccacccccaccaagagccacuucgccaaccugaagggcaccaagaccagaggcaagcugugccccaccugccugaacugcaccgaccuggacguggcccugggcagacccaugugcgugggcaucacccccagcgccaaggccagcauccugcacgaggugagacccgugaccagcggcugcuuccccaucaugcacgacagaaccaagaucagacagcugcccaaccugcugagaggcuacgagaagaucagacugagcacccagaacgugaucaacgccgagaaggcccccggcggccccuacagacugggcaccagcggcagcugccccaacgccaccagcaagagcggcuucuucgccaccauggccugggccgugcccagagacaacaacaagaccgccaccaacccccugaccguggaggugccccacaucugcaccaaggaggaggaccagaucaccguguggggcuuccacagcgacgacaagacccagaugaagaaccuguacggcgacagcaacccccagaaguucaccagcagcgccaacggcaucaccacccacuacgugagccagaucggcggcuuccccgaccagaccgaggacggcggccugccccagagcggcagaaucgugguggacuacauggugcagaagcccggcaagaccggcaccaucguguaccagagaggcauccugcugccccagaagguguggugcgccagcggcagaagcaaggugaucaagggcagccugccccugaucggcgaggccgacugccugcacgagaaguacggcggccugaacaagagcaagcccuacuacaccggcgagcacgccaaggccaucggcaacugccccaucugggugaagaccccccugaagcuggccaacggcaccaaguacagaccccccgccaagcugcugaaggagagaggcuucuucggcgccaucgccggcuuccuggagggcggcugggagggcaugaucgccggcuggcacggcuacaccagccacggcgcccacggcguggccguggccgccgaccugaagagcacccaggaggccaucaacaagaucaccaagaaccugaacagccugagcgagcuggaggugaagaaccugcagagacugagcggcgccauggacgagcugcacaacgagauccuggagcuggacgagaagguggacgaccugagagccgacaccaucagcagccagaucgagcuggccgugcugcugagcaacgagggcaucaucaacagcgaggacgagcaccugcuggcccuggagagaaagcugaagaagaugcugggccccagcgccaucgacaucggcaacggcugcuucgagaccaagcacaagugcaaccagaccugccuggacagaaucgccgccggcaccuucaacgccggcgaguucagccugcccaccuucgacagccugaacaucaccgccgccagccugaacgacgacggccuggacaaccacaccauccugcuguacuacagcaccgccgccagcagccuggccgugacccugaugaucgccaucuucaucguguacaugaucagcagagacaacgugagcugcagcaucugccuguga

SEQ ID NO: 186513 - RNA, 1755 nt, Artificial Sequence
  derived and/or modified CDS sequence (opt4) from hemagglutinin__InfluenzaB__ABL77057
augaaggccaucaucgugcugcugaugguggugaccagcaaggccgacagaaucugcaccggcaucaccagcagcaacagcccccacguggugaagaccgccacccagggcgaggugaacgugaccggcgccaucccccugaccaccacccccaccaagagccacuucgccaaccugaagggcaccaagaccagaggcaagcugugccccaccugccugaacugcaccgaccuggacguggcccugggcagacccaugugcgugggcaucacccccagcgccaaggccagcauccugcacgaggugaagcccgugaccagcggcugcuuccccaucaugcacgacagaaccaagaucagacagcugcccaaccugcugagaggcuacgagaagaucagacugagcacccagaacgugaucaacgccgagaaggcccccggcggccccuacagacugggcaccagcggcagcugccccaacgccaccagcaagagcggcuucuucgccaccauggccugggccgugcccagagacaacaacaagaccgccaccaacccccugaccguggaggugccccacaucugcaccaaggaggaggaccagaucaccguguggggcuuccacagcgacaacaagccccagaugaagaaccuguacggcgacagcaacccccagaaguucaccagcagcgccaacggcaucaccacccacuacgugagccagaucggcggcuuccccgagcagaccgaggacggcggccugccccagagcggcagaaucgugguggacuacauggugcagaagcccggcaagaccggcaccaucguguaccagagaggcauccugcugccccagaagguguggugcgccagcggcagaagcaaggugaucaagggcagccugccccugaucggcgaggccgacugccugcacgagaaguacggcggccugaacaagagcaagcccuacuacaccggcgagcacgccaaggccaucggcaacugccccaucugggugaagaccccccugaagcuggccaacggcaccaaguacagaccccccgccaagcugcugaaggagagaggcuucuucggcgccaucgccggcuuccuggagggcggcugggagggcaugaucgccggcuggcacggcuacaccagccacggcgcccacggcguggccguggccgccgaccugaagagcacccaggaggccaucaacaagaucaccaagaaccugaacagccugagcgagcuggaggugaagaaccugcagagacugagcggcgccauggacgagcugcacaacgagauccuggagcuggacgagaagguggacgaccugagagccgacaccaucagcagccagaucgagcuggccgugcugcugagcaacgagggcaucaucaacagcgaggacgagcaccugcuggcccuggagagaaagcugaagaagaugcugggccccagcgccguggacaucggcaacggcugcuucgagaccaagcacaagugcaaccagaccugccuggacagaaucgccgccggcaccuucaacgccggcgaguucagccugcccaccuucgacagccugaacaucaccgccgccagccugaacgacgacggccuggacaaccacaccauccugcuguacuacagcaccgccgccagcagccuggccgugacccugaugaucgccaucuucaucguguacaugaucagcagagacaacgugagcugcagcaucugccuguga

SEQ ID NO: 186514 - RNA, 1758 nt, Artificial Sequence
  derived and/or modified CDS sequence (opt4) from hemagglutinin__InfluenzaB__ABL77068
augaaggccaucaucgugcugcugaugguggugaccagcaacgccgacagaaucugcaccggcaucaccagcagcaacagcccccacguggugaagaccgccacccagggcgaggugaacgugaccggcgugaucccccugaccaccacccccaccaagagccacuucgccaaccugaagggcaccaagaccagaggcaagcugugccccaagugccugaacugcaccgaccuggacguggcccugggcagacccaagugcaccggcaacauccccagcgccaaggugagcauccugcacgaggugagacccgugaccagcggcugcuuccccaucaugcacgacagaaccaagaucagacagcugcccaaccugcugagaggcuacgagagaaucagacugagcaaccacaacgugaucaacgccgagaaggcccccggcggccccuacaagaucggcaccagcggcagcugccccaacgugaccaacggcaacggcuucuucgccaccauggccugggccgugcccaagaacgagaacaacaagaccgccaccaacagccugaccaucgaggugcccuacaucugcaccgagggcgaggaccagaucaccguguggggcuuccacagcgacaacgagaaccagauggccaagcuguacggcgacagcaagccccagaaguucaccagcagcgccaacggcgugaccacccacuacgugagccagaucggcggcuuccccaaccagaccgaggacggcggccugccccagagcggcagaaucgugguggacuacauggugcagaagagcggcaagaccggcaccaucaccuaccagagaggcauccugcugccccagaagguguggugcgccagcggcagaagcaaggugaucaagggcagccugccccugaucggcgaggccgacugccugcacgagaaguacggcggccugaacaagagcaagcccuacuacaccggcgagcacgccaaggccaucggcaacugccccaucugggugaagaccccccugaagcuggccaacggcaccaaguacagaccccccgccaagcugcugaaggagagaggcuucuucggcgccaucgccggcuuccuggagggcggcugggagggcaugaucgccggcuggcacggcuacaccagccacggcgcccacggcguggccguggccgccgaccugaagagcacccaggaggccaucaacaagaucaccaagaaccugaacagccugagcgagcuggaggugaagaaccugcagagacugagcggcgccauggacgagcugcacaacgagauccuggagcuggacgagaagguggacgaccugagagccgacaccaucagcagccagaucgagcuggccgugcugcugagcaacgagggcaucaucaacagcgaggacgagcaccugcuggcccuggagagaaagcugaagaagaugcugggccccagcgccguggagaucggcaacggcugcuucgagaccaagcacaagugcaaccagaccugccuggacagaaucgccgccggcaccuucaacgccggcgaguucagccugcccaccuucgacagccugaacaucaccgccgccagccugaacgacgacggccuggacaaccacaccauccugcuguacuacagcaccgccgccagcagccuggccgugacccugaugaucgccaucuucgugguguacauggugagcagagacaacgugagcugcagcaucugccuguga

SEQ ID NO: 186515 - RNA, 1758 nt, Artificial Sequence
  derived and/or modified CDS sequence (opt4) from hemagglutinin__InfluenzaB__ABL77090
augaaggccaucaucgugcugcugaugguggugaccagcaacgccgacagaaucugcaccggcaucaccagcagcaacagcccccacguggugaagaccgccacccagggcgaggugaacgugaccggcgugaucccccugaccaccacccugaccaagagccacuucgccaaccugaagggcaccaagaccagaggcaagcugugccccaagugccugaacugcaccgaccuggacguggcccugggcagacccaagugcaccggcaacauccccagcgccaaggugagcauccugcacgaggugagacccgugaccagcggcugcuuccccaucaugcacgacagaaccaagaucagacagcugcccaaccugcugagaggcuacgagagaaucagacugagcaaccacaacgugaucaacgccgagaaggcccccggcggccccuacaagaucggcaccagcggcagcugccccaacgugaccaacggcaacggcuucuucgccaccauggccugggccgugcccaagaacgagaacaacaagaccgccaccaacagccugaccaucgaggugcccuacaucugcaccgagggcgaggaccagaucaccguguggggcuuccacagcgacaacgagauccagauggugaagcuguacggcgacagcaagccccagaaguucaccagcagcgccaacggcgugaccacccacuacgugagccagaucggcggcuuccccaaccagaucgaggacggcggccugccccagagcggcagaaucgugguggacuacauggugcagaagagcggcaagaccggcaccaucaccuaccagagaggcauccugcugccccagaagguguggugcgccagcggcagaagcaagaucaucaagggcagccugccccugaucggcgaggccgacugccugcacgagaaguacggcggccugaacaagagcaagcccuacuacaccggcgagcacgccaaggccaucggcaacugccccaucugggugaagaccccccugaagcuggccaacggcaccaaguacagaccccccgccaagcugcugaaggagagaggcuucuucggcgccaucgccggcuuccuggagggcggcugggagggcaugaucgccggcuggcacggcuacaccagccacggcgcccacggcguggccguggccgccgaccugaagagcacccaggaggccaucaacaagaucaccaagaaccugaacagccugagcgagcuggaggugaagaaccugcagagacugagcggcgccauggacgagcugcacaacgagauccuggagcuggacgagaagguggacgaccugagagccgacaccaucagcagccagaucgagcuggccgugcugcugagcaacgagggcaucaucaacagcgaggacgagcaccugcuggcccuggagagaaagcugaagaagaugcugggccccagcgccguggagaucggcaacggcugcuucgagaccaagcacaagugcaaccagaccugccuggacagaaucgccgccggcaccuucaacgccggcgaguucagccugcccaccuucgacagccugaacaucaccgccgccagccugaacgacgacggccuggacaaccacaccauccugcuguacuacagcaccgccgccagcagccuggccgugacccugaugaucgccaucuucgugguguacauggugagcagagacaacgugagcugcagcaucugccuguga

SEQ ID NO: 186516 - RNA, 1755 nt, Artificial Sequence
  derived and/or modified CDS sequence (opt4) from hemagglutinin__InfluenzaB__ABL77101
augaaggccaucaucgugcugcugaugguggugaccagcaaggccgacagaaucugcaccggcaucaccagcagcaacagcccccacguggugaagaccgccacccagggcgaggugaacgugaccggcgccaucccccugaccaccacccccaccaagagccacuucgccaaccugaagggcaccaagaccagaggcaagcugugccccaccugccugaacugcaccgaccuggacguggcccugggcagacccaugugcgugggcaucacccccagcgccaaggccagcauccugcacgaggugaagcccgugaccagcggcugcuuccccaucaugcacgacagaaccaagaucagacagcugcccaaccugcugagaggcuacgagaagaucagacugagcacccagaacgugaucaacgccgagaaggcccccggcggccccuacagacugggcaccagcggcagcugccccaacgccaccagcaagagcggcuucuucgccaccauggccugggccgugcccagagacaacaacaagaccgccaccaacccccugaccguggaggugccccacaucugcaccaaggaggaggaccagaucaccguguggggcuuccacagcgacgacaagacccagaugaagaaccuguacggcgacagcaacccccagaaguucaccagcagcgccaacggcaucaccacccacuacgugagccagaucggcggcuuccccgagcagaccgaggacggcggccugccccagagcggcagaaucgugguggacuacauggugcagaagcccggcaagaccggcaccaucguguaccagagaggcauccugcugccccagaagguguggugcgccagcggcagaagcaaggugaucaagggcagccugccccugaucggcgaggccgacugccugcacgagaaguacggcggccugaacaagagcaagcccuacuacaccggcgagcacgccaaggccaucggcaacugccccaucugggugaagaccccccugaagcuggccaacggcaccaaguacagaccccccgccaagcugcugaaggagagaggcuucuucggcgccaucgccggcuuccuggagggcggcugggagggcaugaucgccggcuggcacggcuacaccagccacggcgcccacggcguggccguggccgccgaccugaagagcacccaggaggccaucaacaagaucaccaagaaccugaacagccugagcgagcuggaggugaagaaccugcagagacugagcggcgccauggacgagcugcacaacgagauccuggagcuggacgagaagguggacgaccugagagccgacaccaucagcagccagaucgagcuggccgugcugcugagcaacgagggcaucaucaacagcgaggacgagcaccugcuggcccuggagagaaagcugaagaagaugcugggccccagcgccguggacaucggcaacggcugcuucgagaccaagcacaagugcaaccagaccugccuggacagaaucgccgccggcaccuucaacgccggcgaguucagccugcccaccuucgacagccugaacaucaccgccgccagccugaacgacgacggccuggacaaccacaccauccugcuguacuacagcaccgccgccagcagccuggccgugacccugaugaucgccaucuucaucguguacaugaucagcagagacaacgugagcugcagcaucugccuguga

SEQ ID NO: 186517 - RNA, 1758 nt, Artificial Sequence
  derived and/or modified CDS sequence (opt4) from hemagglutinin__InfluenzaB__ABL77134
augaaggccaucaucgugcugcugaugguggugaccagcaacgccgacagaaucugcaccggcaucaccagcagcaacagcccccacguggugaagaccgccacccagggcgaggugaacgugaccggcgugaucccccugaccaccacccccaccaagagccacuucgccaaccugaagggcaccaagaccagaggcaagcugugccccaagugccugaacugcaccgaccuggacguggcccugggcagacccaagugcaccggcaacauccccagcgccaaggugagcauccugcacgaggugagacccgugaccagcggcugcuuccccaucaugcacgacagaaccaagaucagacagcugcccaaccugcugagaggcuacgagagaaucagacugagcaaccacaacgugaucaacgccgagaaggcccccggcggccccuacaagaucggcaccagcggcagcugccccaacgugaccaacggcaacggcuucuucgccaccauggccugggccgugcccaagaacgagaacaacaagaccgccaccaacagccugaccaucgaggugcccuacaucugcaccgagggcgaggaccagaucaccguguggggcuuccacagcgacaacgaggcccagauggccaagcuguacggcgacagcaagccccagaaguucaccagcagcgccaacggcgugaccacccacuacgugagccagaucggcggcuuccccaaccagaccgaggacggcggccugccccagagcggcagaaucgugguggacuacauggugcagaagagcggcaagaccggcaccaucaccuaccagagaggcauccugcugccccagaagguguggugcgccagcggcagaagcaaggugaucaagggcagccugccccugaucggcgaggccgacugccugcacgagaaguacggcggccugaacaagagcaagcccuacuacaccggcgagcacgccaaggccaucggcaacugccccaucugggugaagaccccccugaagcuggccaacggcaccaaguacagaccccccgccaagcugcugaaggagagaggcuucuucggcgccaucgccggcuuccuggagggcggcugggagggcaugaucgccggcuggcacggcuacaccagccacggcgcccacggcguggccguggccgccgaccugaagagcacccaggaggccaucaacaagaucaccaagaaccugaacagccugagcgagcuggaggugaagaaccugcagagacugagcggcgccauggacgagcugcacaacgagauccuggagcuggacgagaagguggacgaccugagagccgacaccaucagcagccagaucgagcuggccgugcugcugagcaacgagggcaucaucaacagcgaggacgagcaccugcuggcccuggagagaaagcugaagaagaugcugggccccagcgccguggagaucggcaacggcugcuucgagaccaagcacaagugcaaccagaccugccuggacagaaucgccgccggcaccuucaacgccggcgaguucagccugcccaccuucgacagccugaacaucaccgccgccagccugaacgacgacggccuggacaaccacaccauccugcuguacuacgccaccgccgccagcagccuggccgugacccugaugaucgccaucuucgugguguacauggugagcagagacaacgugagcugcagcaucugccuguga

SEQ ID NO: 186518 - RNA, 1758 nt, Artificial Sequence
  derived and/or modified CDS sequence (opt4) from hemagglutinin__InfluenzaB__ABL77145
augaaggccaucaucgugcugcugaugguggugaccagcaacgccgacagaaucugcaccggcaucaccagcagcaacagcccccacguggugaagaccgccacccagggcgaggugaacgugaccggcgugaucccccugaccaccacccccaccaagagccacuucgccaaccugaagggcaccaagaccagaggcaagcugugccccaagugccugaacugcaccgaccuggacguggcccugggcagacccaagugcaccggcaacauccccagcgccaaggugagcauccugcacgaggugagacccgugaccagcggcugcuuccccaucaugcacgacagaaccaagaucagacagcugcccaaccugcugagaggcuacgagagaaucagacugagcaaccacaacgugaucaacgccgaggaggcccccggcggccccuacaagaucggcaccagcggcagcugccccaacgugaccaacggcaacggcuucuucgccaccauggccugggccgugcccaagaacgagaacaacaagaccgccaccaacagccugaccaucgaggugcccuacaucugcaccgagggcgaggaccagaucaccguguggggcuuccacagcgacagcgagacccagauggccaagcuguacggcgacagcaagccccagaaguucaccagcagcgccaacggcgugaccacccacuacgugagccagaucggcggcuuccccaaccagaccgaggacggcggccugccccagagcggcagaaucgugguggacuacauggugcagaagagcggcaagaccggcaccaucaccuaccagagaggcauccugcugccccagaagguguggugcgccagcggcagaagcaaggugaucaagggcagccugccccugaucggcgaggccgacugccugcacgagaaguacggcggccugaacaagagcaagcccuacuacaccggcgagcacgccaaggccaucggcaacugccccaucugggugaagaccccccugaagcuggccaacggcaccaaguacagaccccccgccaagcugcugaaggagagaggcuucuucggcgccaucgccggcuuccuggagggcggcugggagggcaugaucgccggcuggcacggcuacaccagccacggcgcccacggcguggccguggccgccgaccugaagagcacccaggaggccaucaacaagaucaccaagaaccugaacagccugagcgagcuggaggugaagaaccugcagagacugagcggcgccauggacgagcugcacaacgagauccuggagcuggacgagaagguggacgaccugagagccgacaccaucagcagccagaucgagcuggccgugcugcugagcaacgagggcaucaucaacagcgaggacgagcaccugcuggcccuggagagaaagcugaagaagaugcugggccccagcgccguggagaucggcaacggcugcuucgagaccaagcacaagugcaaccagaccugccuggacagaaucgccgccggcaccuucaacgccggcgaguucagccugcccaccuucgacagccugaacaucaccgccgccagccugaacgacgacggccuggacaaccacaccauccugcuguacuacagcaccgccgccagcagccuggccgugacccugaugaucgccaucuucgugguguacauggugagcagagacaacgugagcugcagcaucugccuguga

SEQ ID NO: 186519 - RNA, 1755 nt, Artificial Sequence
  derived and/or modified CDS sequence (opt4) from hemagglutinin__InfluenzaB__ABL77156
augaaggccaucaucgugcugcugaugguggugaccagcaacgccgacagaaucugcaccggcaucaccagcagcaacagcccccacguggugaagaccgccacccagggcgaggugaacgugaccggcgugaucccccugaccaccacccccaccaagagcuacuucgccaaccugaagggcaccagaaccagaggcaagcugugccccgacugccugaacugcaccgaccuggacguggcccugggcagacccaugugcgugggcaccacccccagcgccaaggccagcauccugcacgaggugagacccgugaccagcggcugcuuccccaucaugcacgacagaaccaagaucagacagcugcccaaccugcugagaggcuacgagaacaucagacugagcacccagaacgugaucgacgccgagaaggcccccggcggccccuacagacugggcaccagcggcagcugccccaacgccaccagcaagagcggcuucuucgccaccauggccugggccgugcccaaggacaacaacaagaacgccaccaacccccugaccguggaggugcccuacgugugcaccgagggcgaggaccagaucaccguguggggcuuccacagcgacgacaagacccagaugaagaaccuguacggcgacagcaacccccagaaguucaccagcagcgccaacggcgugaccacccacuacgugagccagaucggcggcuuccccgaccagaccgaggacggcggccugccccagagcggcagaaucgugguggacuacauggugcagaagcccggcaagaccggcaccaucguguaccagagaggcgugcugcugccccagaagguguggugcgccagcggcagaagcaaggugaucaagggcagccugccccugaucggcgaggccgacugccugcacgagaaguacggcggccugaacaagagcaagcccuacuacaccggcgagcacgccaaggccaucggcaacugccccaucugggugaagaccccccugaagcuggccaacggcaccaaguacagaccccccgccaagcugcugaaggagagaggcuucuucggcgccaucgccggcuuccuggagggcggcugggagggcaugaucgccggcuggcacggcuacaccagccacggcgcccacggcguggccguggccgccgaccugaagagcacccaggaggccaucaacaagaucaccaagaaccugaacagccugagcgagcuggaggugaagaaccugcagagacugagcggcgccauggacgagcugcacaacgagauccuggagcuggacgagaagguggacgaccugagagccgacaccaucagcagccagaucgagcuggccgugcugcugagcaacgagggcaucaucaacagcgaggacgagcaccugcuggcccuggagagaaagcugaagaagaugcugggccccagcgccguggacaucggcaacggcugcuucgagaccaagcacaagugcaaccagaccugccuggacagaaucgccgccggcaccuucaacgccggcgaguucagccugcccaccuucgacagccugaacaucaccgccgccagccugaacgacgacggccuggacaaccacaccauccugcuguacuacagcaccgccgccagcagccuggccgugacccugaugcuggccaucuucaucguguacauggugagcagagacaacgugagcugcagcaucugccuguga

SEQ ID NO: 186520 - RNA, 1758 nt, Artificial Sequence
  derived and/or modified CDS sequence (opt4) from hemagglutinin__InfluenzaB__ABL77178
augaaggccaucaucgugcugcugaugguggugaccagcaacgccgacagaaucugcaccggcaucaccagcagcaacagcccccacguggugaagaccgccacccagggcgaggugaacgugaccggcgugaucccccugaccaccacccccaccaagagccacuucgccaaccugaagggcaccaagaccagaggcaagcugugccccaagugccugaacugcaccgaccuggacguggcccugggcagacccaagugcaccggcaacauccccagcgccaaggugagcauccugcacgaggugagacccgugaccagcggcugcuuccccaucaugcacgacagaaccaagaucagacagcugcccaaccugcugagaggcuacgagagaaucagacugagcaaccacaacgugaucaacgccgagaaggcccccggcggccccuacaagaucggcaccagcggcagcugccccaacgugaccaacggcaacggcuucuucgccaccauggccugggccgugcccaagaacgagaacaacaagaccgccaccaacagccugaccaucgaggugcccuacaucugcaccgagggcgaggaccagaucaccguguggggcuuccacagcgacagcgagacccagauggccaagcuguacggcgacagcaagccccagaaguucaccagcagcgccaacggcgugaccacccacuacgugagccagaucggcggcuuccccaaccagaccgaggacggcggccugccccagagcggcagaaucgugguggacuacauggugcagaagagcggcaagaccggcaccaucaccuaccagagaggcauccugcugccccagaagguguggugcgccagcggcagaagcaaggugaucaagggcagccugccccugaucggcgaggccgacugccugcacgagaaguacggcggccugaacaagagcaagcccuacuacaccggcgagcacgccaaggccaucggcaacugccccaucugggugaagaccccccugaagcuggccaacggcaccaaguacagaccccccgccaagcugcugaaggagagaggcuucuucggcgccaucgccggcuuccuggagggcggcugggagggcaugaucgccggcuggcacggcuacaccagccacggcgcccacggcguggccguggccgccgaccugaagagcacccaggaggccaucaacaagaucaccaagaaccugaacagccugagcgagcuggaggugaagaaccugcagagacugagcggcgccauggacgagcugcacaacgagauccuggagcuggacgagaagguggacgaccugagagccgacaccaucagcagccagaucgagcuggccgugcugcugagcaacgagggcaucaucaacagcgaggacgagcaccugcuggcccuggagagaaagcugaagaagaugcugggccccagcgccguggagaucggcaacggcugcuucgagaccaagcacaagugcaaccagaccugccuggacagaaucgccgccggcaccuucaacgccggcgaguucagccugcccaccuucgacagccugaacaucaccgccgccagccugaacgacgacggccuggacaaccacaccauccugcuguacuacagcaccgccgccagcagccuggccgugacccugaugaucgccaucuucgugguguacauggugagcagagacaacgugagcugcagcaucugccuguga

SEQ ID NO: 186521 - RNA, 1755 nt, Artificial Sequence
  derived and/or modified CDS sequence (opt4) from hemagglutinin__InfluenzaB__ABL77189
augaaggccaucaucgugcugcugaugguggugaccagcaacgccgacagaaucugcaccggcaucaccagcagcaacagcccccacguggugaagaccgccacccagggcgaggugaacgugaccggcgugaucccccugaccaccacccccaccaagagcuacuucgccaaccugaagggcaccagaaccagaggcaagcugugccccgacugccugaacugcaccgaccuggacguggcccugggcauccccaugugcgugggcaccacccccagcgccaaggccagcauccugcacgaggugagacccgugaccagcggcugcuuccccaucaugcacgacagaaccaagaucagacagcugcccaaccugcugagaggcuacgagaacaucagacugagcacccagaacgugaucgacgccgagaaggcccccggcggccccuacagacugggcaccagcggcagcugccccaacgccaccagcaagagcggcuucuucgccaccauggccugggccgugcccaaggacaacaacaagaacgccaccaacccccugaccguggaggugcccuacgugugcaccgagggcgaggaccagaucaccguguggggcuuccacagcgacaacaagauccagaugaagaaccuguacggcgacagcaacccccagaaguucaccagcagcgccaacggcgugaccacccacuacgugagccagaucggcggcuuccccgaccagaccgaggacggcggccugccccagagcggcagaaucgugguggacuacauggugcagaagcccggcaagaccggcaccaucguguaccagagaggcgugcugcugccccagaagguguggugcgccagcggcagaagcaaggugaucaagggcagccugccccugaucggcgaggccgacugccugcacgagaaguacggcggccugaacaagagcaagcccuacuacaccggcgagcacgccaaggccaucggcaacugccccaucugggugaagaccccccugaagcuggccaacggcaccaaguacagaccccccgccaagcugcugaaggagagaggcuucuucggcgccaucgccggcuuccuggagggcggcugggagggcaugaucgccggcuggcacggcuacaccagccacggcgcccacggcguggccguggccgccgaccugaagagcacccaggaggccaucaacaagaucaccaagaaccugaacagccugagcgagcuggaggugaagaaccugcagagacugagcggcgccauggacgagcugcacaacgagauccuggagcuggacgagaagguggacgaccugagagccgacaccaucagcagccagaucgagcuggccgugcugcugagcaacgagggcaucaucaacagcgaggacgagcaccugcuggcccuggagagaaagcugaagaagaugcugggccccagcgccguggacaucggcaacggcugcuucgagaccaagcacaagugcaaccagaccugccuggacagaaucgccgccggcaccuucaacgccggcgaguucagccugcccaccuucgacagccugaacaucaccgccgccagccugaacgacgacggccuggacaaccacaccauccugcuguacuacagcaccgccgccagcagccuggccgugacccugaugcuggccaucuucaucguguacauggugagcagagacaacgugagcugcagcaucugccuguga

SEQ ID NO: 186522 - RNA, 1758 nt, Artificial Sequence
  derived and/or modified CDS sequence (opt4) from hemagglutinin__InfluenzaB__ABL77200
augaaggccaucaucgugcugcugaugguggugaccagcaacgccgacagaaucugcaccggcaucaccagcagcaacagcccccacguggugaagaccgccacccagggcgaggugaacgugaccggcgugaucccccugaccaccacccccaccaagagccacuucgccaaccugaagggcaccaagaccagaggcaagcugugccccaagugccugaacugcaccgaccuggacguggcccugggcagacccaagugcaugggcaacauccccagcgccaaggugagcauccugcacgaggugagacccgugaccagcggcugcuuccccaucaugcacgacagaaccaagaucagacagcugcccaaccugcugagaggcuacgagcacaucagacugagcacccacaacgugaucaacgccgagaaggcccccggcggccccuacaagaucggcaccagcggcagcugccccaacgugaccaacggcaacggcuucuucgccaccauggccugggccgugcccaagaacgacaacaacaagaccgccaccaacagccugaccaucgaggugcccuacaucugcaccgagggcgaggaccagaucaccguguggggcuuccacagcgacaacgagacccagauggccaagcuguacggcgacagcaagccccagaaguucaccagcagcgccaacggcgugaccacccacuacgugagccagaucggcggcuuccccaaccagaccgaggacggcggccugccccagagcggcagaaucgugguggacuacauggugcagaagagcggcaaggccggcaccaucaccuaccagagaggcauccugcugccccagaagguguggugcgccagcggcagaagcaaggugaucaagggcagccugccccugaucggcgaggccgacugccugcacgagaaguacggcggccugaacaagagcaagcccuacuacaccggcgagcacgccaaggccaucggcaacugccccaucugggugaagaccccccugaagcuggccaacggcaccaaguacagaccccccgccaagcugcugaaggagagaggcuucuucggcgccaucgccggcuuccuggagggcggcugggagggcaugaucgccggcuggcacggcuacaccagccacggcgcccacggcguggccguggccgccgaccugaagagcacccaggaggccaucaacaagaucaccaagaaccugaacagccugagcgagcuggaggugaagaaccugcagagacugagcggcgccauggacgagcugcacaacgagauccuggagcuggacggcaagguggacgaccugagagccgacaccaucagcagccagaucgagcuggccgugcugcugagcaacgagggcaucaucaacagcgaggacgagcaccugcuggcccuggagagaaagcugaagaagaugcugggccccagcgccguggagaucggcaacggcugcuucgagaccaagcacaagugcaaccagaccugccuggacagaaucgccgccggcaccuucgacgccggcgaguucagccugcccaccuucgacagccugaacaucaccgccgccagccugaacgacgacggccuggacaaccacaccauccugcuguacuacagcaccgccgccagcagccuggccgugacccugaugaucgccaucuucgugguguacauggugagcagagacaacgugagcugcagcaucugccuguga

SEQ ID NO: 186523 - RNA, 1755 nt, Artificial Sequence
  derived and/or modified CDS sequence (opt4) from hemagglutinin__InfluenzaB__ABL77222
augaaggccaucaucgugcugcugaugguggugaccagcaacgccgacagaaucugcaccggcaucaccagcagcaacagcccccacguggugaagaccgccacccagggcgaggugaacgugaccggcgugaucccccugaccaccacccccaccaagagcuacuucgccaaccugaagggcaccagaaccagaggcaagcugugccccgacugccugaacugcaccgaccuggacguggcccugggcagacccaugugcgugggcaccacccccagcgccaaggccagcauccugcacgaggugagacccgugaccagcggcugcuuccccaucaugcacgacagaaccaagaucagacagcuggccaaccugcugagaggcuacgagaacaucagacugagcacccagaacgugaucgacgccgagaaggcccccggcggccccuacagacugggcaccagcggcagcugccccaacgccaccagcaagagcggcuucuucgccaccauggccugggccgugcccaaggacaacaacaagaacgccaccaacccccugaccguggaggugcccuacaucugcaccgagggcgaggaccagaucaccguguggggcuuccacagcgacagcaagacccagaugaagaaccuguacggcgacagcaacccccagaaguucaccagcagcgccaacggcgugaccacccacuacgugagccagaucggcggcuuccccgaccagaccgaggacggcggccugccccagagcggcagaaucgugguggacuacaugaugcagaagcccggcaagaccggcaccaucguguaccagagaggcgugcugcugccccagaagguguggugcgccagcggcagaagcaaggugaucaagggcagccugccccugaucggcgaggccgacugccugcacgagaaguacggcggccugaacaagagcaagcccuacuacaccggcgagcacgccaaggccaucggcaacugccccaucugggugaagaccccccugaagcuggccaacggcaccaaguacagaccccccgccaagcugcugaaggagagaggcuucuucggcgccaucgccggcuuccuggagggcggcugggagggcaugaucgccggcuggcacggcuacaccagccacggcgcccacggcguggccguggccgccgaccugaagagcacccaggaggccaucaacaagaucaccaagaaccugaacagccugagcgagcuggaggugaagaaccugcagagacugagcggcgccauggacgagcugcacaacgagauccuggagcuggacgagaagguggacgaccugagagccgacaccaucagcagccagaucgagcuggccgugcugcugagcaacgagggcaucaucaacagcgaggacgagcaccugcuggcccuggagagaaagcugaagaagaugcugggccccagcgccguggacaucggcaacggcugcuucgagaccaagcacaagugcaaccagaccugccuggacagaaucgccgccggcaccuucaacgccggcgaguucagccugcccaccuucgacagccugaacaucaccgccgccagccugaacgacgacggccuggacaaccacaccauccugcuguacuacagcaccgccgccagcagccuggccgugacccugaugcuggccaucuucaucguguacauggugagcagagacaacgugagcugcagcaucugccuguga

SEQ ID NO: 186524 - RNA, 1758 nt, Artificial Sequence
  derived and/or modified CDS sequence (opt4) from hemagglutinin__InfluenzaB__ABL77233
augaaggccaucaucgugcugcugaugguggugaccagcaacgccgacagaaucugcaccggcaucaccagcagcaacagcccccacguggugaagaccgccacccagggcgaggugaacgugaccggcgugaucccccugaccaccacccccaccaagagccacuucgccaaccugaagggcaccaagaccagaggcaagcugugccccaagugccugaacugcaccgaccuggacguggcccugggcagacccaagugcaccggcaacauccccagcgccgaggugagcauccugcacgaggugagacccgugaccagcggcugcuuccccaucaugcacgacagaaccaagaucagacagcugcccaaccugcugagaggcuacgagcacaucagacugagcacccacaacgugaucaacgccgagaaggcccccggcggccccuacaagaucggcaccagcggcagcugccccaacgugaccaacggcaacggcuucuucgccaccauggccugggccgugcccaagaacgacaacaacaagaccgccaccaacagccugaccaucgaggugcccuacaucugcaccgagggcgaggaccagaucaccaucuggggcuuccacagcgacaacgaggcccagauggccaagcuguacggcgacagcaagccccagaaguucaccagcagcgccaacggcgugaccacccacuacgugagccagaucggcggcuuccccaaccagaccgaggacggcggccugccccagagcggcagaaucgugguggacuacauggugcagaagagcagaaagaccggcaccaucaccuaccagagaggcauccugcugccccagaagguguggugcgccagcggcagaagcaaggugaucaagggcagccugccccugaucggcgaggccgacugccugcacgagaaguacggcggccugaacaagagcaagcccuacuacaccggcgagcacgccaaggccaucggcaacugccccaucugggugaagaccccccugaagcuggccaacggcaccaaguacagaccccccgccaagcugcugaaggagagaggcuucuucggcgccaucgccggcuuccuggagggcggcugggagggcaugaucgccggcuggcacggcuacaccagccacggcgcccacggcguggccguggccgccgaccugaagagcacccaggaggccaucaacaagaucaccaagaaccugaacagccugagcgagcuggaggugaagaaccugcagagacugagcggcgccauggacgagcugcacaacgagauccuggagcuggacgagaagguggacgaccugagagccgacaccaucagcagccagaucgagcuggccgugcugcugagcaacgagggcaucaucaacagcgaggacgagcaccugcuggcccuggagagaaagcugaagaagaugcugggccccagcgccguggagaucggcaacggcugcuucgagaccaagcacaagugcaaccagaccugccuggacagaaucgccgccggcaccuucgacgccggcgaguucagccugcccaccuucgacagccugaacaucaccgccgccagccugaacgacgacggccuggacaaccacaccauccugcuguacuacagcaccgccgccagcagccuggccgugacccugaugaucgccaucuucgugguguacauggugagcagagacaacgugagcugcagcaucugccuguga

SEQ ID NO: 186525 - RNA, 1758 nt, Artificial Sequence
  derived and/or modified CDS sequence (opt4) from hemagglutinin__InfluenzaB__ABL77244
augaaggccaucaucgugcugcugaugguggugaccagcaacgccgacagaaucugcaccggcaucaccagcagcaacagcccccacguggugaagaccgccacccagggcgaggugaacgugaccggcgugaucccccugaccaccacccccaccaagagccacuucgccaaccugaagggcaccaagaccagaggcaagcugugccccaagugccugaacugcaccgaccuggacguggcccugggcagacccaagugcaccggcaccauccccagcgccaaggccagcauccugcacgaggugaagcccgugaccagcggcugcuuccccaucaugcacgacagaaccaagaucagacagcugcccaaccugcugagaggcuacgagcacaucagacugagcacccacaacgugaucaacgccgagaccgcccccggcggccccuacaaggugggcaccagcggcagcugccccaacgugaccaacggcaacggcuucuucgccaccauggccugggccgugcccaagaacgacaacaacaagaccgccaccaacccccugaccguggaggugcccuacaucugcaccgagggcgaggaccagaucaccguguggggcuuccacagcgacaacgaggcccagauggugaagcuguacggcgacagcaagccccagaaguucaccagcagcgccaacggcgugaccacccacuacgugagccagaucggcggcuuccccaaccaggccgaggacggcggccugccccagagcggcagaaucgugguggacuacauggugcagaagagcggcaagaccggcaccaucaccuaccagagaggcauccugcugccccagaagguguggugcgccagcggcagaagcaaggugaucaagggcagccugccccugaucggcgaggccgacugccugcacgagaaguacggcggccugaacaagagcaagcccuacuacaccggcgagcacgccaaggccaucggcaacugccccaucugggugaagaccccccugaagcuggccaacggcaccaaguacagaccccccgccaagcugcugaaggagaagggcuucuucggcgccaucgccggcuuccuggagggcggcugggagggcaugaucgccggcuggcacggcuacaccagccacggcgcccacggcguggccguggccgccgaccugaagagcacccaggaggccaucaacaagaucaccaagaaccugaacagccugagcgagcuggaggugaagaaccugcagagacugagcggcgccauggacgagcugcacaacaagauccuggagcuggacgagaagguggacgaccugagagccgacaccaucagcagccagaucgagcuggccgugcugcugagcaacgagggcaucaucaacagcgaggacgagcaccugcuggcccuggagagaaagcugaagaagaugcugggccccagcgccguggagaucggcaacggcugcuucgagaccaagcacaagugcaaccagaccugccuggacagaaucgccgccggcaccuucaacgccggcgaguucagccugcccaccuucgacagccugaacaucaccgccgccagccugaacgacgacggccuggacaaccacaccauccugcuguacuacagcaccgccgccagcagccuggccgugacccugaugaucgccaucuucaucguguacauggugagcagagacaacgugagcugcagcaucugccuguga

SEQ ID NO: 186526 - RNA, 1752 nt, Artificial Sequence
  derived and/or modified CDS sequence (opt4) from hemagglutinin__InfluenzaB__ABL77255
augaaggccaucaucgugcugcugaugguggugaccagcaacgccgacagaaucugcaccggcaucaccagcagcaacagcccccacguggugaagaccgccacccagggcgaggugaacgugaccggcgugaucccccugaccaccacccccaccaagagccacuucgccaaccugaagggcaccaagaccagaggcaagcugugccccaacugccugaacugcaccgaccuggacguggcccugggcagacccaugugcaugggcaccauccccagcgccaaggccagcauccugcacgaggugagacccgugaccagcggcugcuuccccaucaugcacgacagaaccaagaucagacagcugcccaaccugcugagaggcuacgagaacaucagacugagcacccacaacgugaucaacgccgagagagcccccggcggccccuacagacugggcaccagcggcagcugccccaacgugaccagcagaaacggcuucuucgccaccauggccugggccgugcccagagacaacaagaccgccaccaacccccugaccguggaggugcccuacaucugcaccaagggcgaggaccagaucaccguguggggcuuccacagcgacgacaagacccagaugaagaaccuguacggcgacagcaacccccagaaguucaccagcagcgccaacggcgugaccacccacuacgugagccagaucggcgacuuccccaaccagaccgaggacggcggccugccccagagcggcagaaucgugguggacuacauggugcagaagcccggcaagaccggcaccaucguguaccagagaggcgugcugcugccccagaagguguggugcgccagcggcagaagcaaggugaucaagggcagccugccccugaucggcgaggccgacugccugcacgagaaguacggcggccugaacaagagcaagcccuacuacaccggcgagcacgccaaggccaucggcaacugccccaucugggugaagaccccccugaagcuggccaacggcaccaaguacagaccccccgccaagcugcugaaggagagaggcuucuucggcgccaucgccggcuuccuggagggcggcugggagggcaugaucgccggcuggcacggcuacaccagccacggcgcccacggcguggccguggccgccgaccugaagagcacccaggaggccaucaacaagaucaccaagaaccugaacagccugagcgagcuggaggugaagaaccugcagagacugagcggcgccauggacgagcugcacaacgagauccuggagcuggacgagaagguggacgaccugagagccgacaccaucagcagccagaucgagcuggccgugcugcugagcaacgagggcaucaucaacagcgaggacgagcaccugcuggcccuggagagaaagcugaagaagaugcugggccccagcgccguggacaucggcaacggcugcuucgagaccaagcacaagugcaaccagaccugccuggacagaaucgccgccggcaccuucaacgccggcgaguucagccugcccaccuucgacagccugaacaucaccgccgccagccugaacgacgacggccuggacaaccacaccauccugcuguacuacagcaccgccgccagcagccuggccgugacccugaugaucgccaucuucaucguguacauggugagcagagacaacgugagcugcagcaucugccuguga

SEQ ID NO: 186527 - RNA, 1752 nt, Artificial Sequence
  derived and/or modified CDS sequence (opt4) from hemagglutinin__InfluenzaB__ABL77266
augaaggccaucaucgugcugcugaugguggugaccagcaacgccgacagaaucugcaccggcaucaccagcagcaacagcccccacguggugaagaccgccacccagggcgaggugaacgugaccggcgugaucccccugaccaccacccccaccaagagccacuucgccaaccugaagggcaccaagaccagaggcaagcugugccccaacugccugaacugcaccgaccuggacguggcccugggcagacccaugugcgugggcaccacccccagcgccaaggccagcauccugcacgaggugagacccgugaccagcggcugcuuccccaucaugcacgacagaaccaagaucagacagcugcccaaccugcugagaggcuacgagaacaucagacugagcacccagaacgugaucaacgccgagagagcccccggcggccccuacagacugggcaccagcggcagcugccccaacgugaccagcagagacggcuucuucgccaccauggccugggccgugcccagagacaacaagaccgccaccaacccccugaccguggaggugcccuacaucugcaccaagggcgaggaccagaucaccguguggggcuuccacagcgacagcaagacccagaugaagaaccuguacggcgacagcaacccccagaaguucaccagcagcgccaacggcgugaccacccacuacgugagccagaucggcggcuuccccaaccagaccgaggacggcggccugccccagagcggcagaaucgugguggacuacauggugcagaagcccggcaagaccggcaccaucguguaccagagaggcgugcugcugccccagaagguguggugcgccagcggcagaagcaaggugaucaagggcagccugccccugaucggcgaggccgacugccugcacgagaaguacggcggccugaacaagagcaagcccuacuacaccggcgagcacgccaaggccaucggcaacugccccaucugggugaagaccccccugaagcuggccaacggcaccaaguacagaccccccgccaagcugcugaaggagagaggcuucuucggcgccaucgccggcuuccuggagggcggcugggagggcaugaucgccggcuggcacggcuacaccagccacggcgcccacggcguggccguggccgccgaccugaagagcacccaggaggccaucaacaagaucaccaagaaccugaacagccugagcgagcuggaggugaagaaccugcagagacugagcggcgccauggacgagcugcacaacgagauccuggagcuggacgagaagguggacgaccugagagccgacaccaucagcagccagaucgagcuggccgugcugcugagcaacgagggcaucaucaacagcgaggacgagcaccugcuggcccuggagagaaagcugaagaagaugcugggccccagcgccguggacaucggcaacggcugcuucgagaccaagcacaagugcaaccagaccugccuggacagaaucgccgccggcaccuucaacgccggcgaguucagccugcccaccuucgacagccugaacaucaccgccgccagccugaacgacgacggccuggacaaccacaccauccugcuguacuacagcaccgccgccagcagccuggccgugacccugaugaucgccaucuucaucguguacauggugagcagagacaacgugagcugcagcaucugccuguga

SEQ ID NO: 186528 - RNA, 1752 nt, Artificial Sequence
  derived and/or modified CDS sequence (opt4) from hemagglutinin__InfluenzaB__ABL77277
augaaggccaucaucgugcugcugaugguggugaccagcaacgccgacagaaucugcaccggcaucaccagcagcaacagcccccacguggugaagaccgccacccagggcgaggugaacgugaccggcgugaucccccugaccaccacccccaccaagagccacuucgccaaccugaagggcaccaagaccagaggcaagcugugccccaacugccugaacugcaccgaccuggacguggcccugggcagacccaugugcgugggcaacacccccagcgccaaggccagcauccugcacgaggugagacccgugaccagcggcugcuuccccaucaugcacgacagaaccaagaucagacagcugcccaaccugcugagaggcuacgagaacaucagacugagcacccagaacgugaucaacgccgagagagcccccggcggccccuacagacugggcaccagcggcagcugccccaacgugaccaacagagacggcuucuucgccaccauggccugggccgugcccagagacaacaagaccgccaccaacccccugaccguggaggugcccuacaucugcaccaagggcgaggaccagaucaccguguggggcuuccacagcgacaacaagauccagaugaagaaccuguacggcgacagcaacccccagaaguucaccagcagcgccaacggcgugaccacccacuacgugagccagaucggcggcuuccccaaccagaccgaggacggcggccugccccagagcggcagaaucgugguggacuacauggugcagaagcccggcaagaccggcaccaucguguaccagagaggcgugcugcugccccagaagguguggugcgccagcggcagaagcaaggugaucaagggcagccugccccugaucggcgaggccgacugccugcacgagaaguacggcggccugaacaagagcaagcccuacuacaccggcgagcacgccaaggccaucggcaacugccccaucugggugaagaccccccugaagcuggccaacggcaccaaguacagaccccccgccaagcugcugaaggagagaggcuucuucggcgccaucgccggcuuccuggagggcggcugggagggcaugaucgccggcuggcacggcuacaccagccacggcgcccacggcguggccguggccgccgaccugaagagcacccaggaggccaucaacaagaucaccaagaaccugaacagccugagcgagcuggaggugaagaaccugcagagacugagcggcgccauggacgagcugcacaacgagauccuggagcuggacgagaagguggacgaccugagagccgacaccaucagcagccagaucgagcuggccgugcugcugagcaacgagggcaucaucaacagcgaggacgagcaccugcuggcccuggagagaaagcugaagaagaugcugggccccagcgccguggacaucggcaacggcugcuucgagaccaagcacaagugcaaccagaccugccuggacagaaucgccgccggcaccuucaacgccggcgaguucagccugcccaccuucgacagccugaacaucaccgccgccagccugaacgacgacggccuggacaaccacaccauccugcuguacuacagcaccgccgccagcagccuggccgugacccugaugaucgccaucuucaucguguacauggugagcagagacaacgugagcugcagcaucugccuguga

SEQ ID NO: 186529 - RNA, 1752 nt, Artificial Sequence
  derived and/or modified CDS sequence (opt4) from hemagglutinin__InfluenzaB__ABL77288
augaaggccaucaucgugcugcugaugguggugaccagcaacgccgacagaaucugcaccggcaucaccagcagcaacagcccccacguggugaagaccgccacccagggcgaggugaacgugaccggcgugaucccccugaccaccacccccaccaagagccacuucgccaaccugaagggcaccaagaccagaggcaagcugugccccaacugccugaacugcaccgaccuggacguggcccugggcagacccaugugcgugggcaccacccccagcgccaaggccagcauccugcacgaggugagacccgugaccagcggcugcuuccccaucaugcacgacagaaccaagaucagacagcugcccaaccugcugagaggcuacgagcacaucagacugagcacccagaacgugaucaacgccgagaaggcccccggcggccccuacaagcugggcaccagcggcagcugccccaacgccaccagcagaagcggcuucuucgccaccauggccugggccgugcccagagacaacaagaccgccaccaacccccugaccguggaggugcccuacaucugcaccaagggcgaggaccagaucaccguguggggcuuccacagcgacaccaagacccagaugaagaaccuguacggcgacagcaacccccagaaguucaccagcagcgccaacggcgugaccacccacuacgugagccagaucggcggcuuccccgaccagaccgaggacggcggccugccccagagcggcagaaucgugguggacuacauggugcagaagcccggcaagaccggcaccaucguguaccagagaggcgugcugcugccccagaagguguggugcgccagcggcagaagcaaggugaucaagggcagccugccccugaucggcgaggccgacugccugcacgagaaguacggcggccugaacaagagcaagcccuacuacaccggcgagcacgccaaggccaucggcaacugccccaucugggugaagaccccccugaagcuggccaacggcaccaaguacagaccccccgccaagcugcugaaggagagaggcuucuucggcgccaucgccggcuuccuggagggcggcugggagggcaugaucgccggcuggcacggcuacaccagccacggcgcccacggcguggccguggccgccgaccugaagagcacccaggaggccaucaacaagaucaccaagaaccugaacagccugagcgagcuggaggugaagaaccugcagagacugagcggcgccauggacgagcugcacaacgagauccuggagcuggacgagaagguggacgaccugagagccgacaccaucagcagccagaucgagcuggccgugcugcugagcaacgagggcaucaucaacagcgaggacgagcaccugcuggcccuggagagaaagcugaagaagaugcugggccccagcgccguggacaucggcaacggcugcuucgagaccaagcacaagugcaaccagaccugccuggacagaaucgccgccggcaccuucaacgccggcgaguucagccugcccaccuucgacagccugaacaucaccgccgccagccugaacgacgacggccuggacaaccacaccauccugcuguacuacagcaccgccgccagcagccuggccgugacccugaugaucgccaucuucaucguguacauggugagcagagacaacgugagcugcagcaucugccuguga

SEQ ID NO: 186530 - RNA, 1752 nt, Artificial Sequence
  derived and/or modified CDS sequence (opt4) from hemagglutinin__InfluenzaB__ABL77299
augaaggccaucaucgugcugcugaugguggugaccagcaacgccgacagaaucugcaccggcaucaccagcagcaacagcccccacguggugaagaccgccacccagggcgaggugaacgugaccggcgugaucccccugaccaccacccccaccaagagccacuucgccaaccugaagggcaccaagaccagaggcaagcugugccccaacugccugaacugcaccgaccuggacguggcccugggcagacccaugugcaucggcaacauccccagcgccaaggccagcauccugcacgaggugagacccgugaccagcggcugcuuccccaucaugcacgacagaaccaagaucagacagcugcccaaccugcugagaggcuacgagcacaucagacugagcacccacaacgugaucaacgccgagagagcccccggcggccccuacagacugggcaccagcggcagcugccccaacgugaccagcagaagcggcuucuucgccaccauggccugggccgugcccagagacaacaagaccgccaccaacccccugaccguggaggugcccuacaucugcaccaagggcgaggaccagaucaccguguggggcuuccacagcgacaacgagacccagaugaagaaccuguacggcgacagcaacccccagaaguucaccagcagcgccaacggcaucaccacccacuacgugagccagaucggcggcuuccccaaccagaccgaggacggcggccugccccagagcggcagaaucgugguggacuacauggugcagaagcccggcaagaccggcaccaucguguaccagagaggcgugcugcugccccagaagguguggugcgccagcggcagaagcaaggugaucaagggcagccugccccugaucggcgaggccgacugccugcacgagaaguacggcggccugaacaagagcaagcccuacuacaccggcgagcacgccaaggccaucggcaacugccccaucugggugaagaccccccugaagcuggccaacggcaccaaguacagaccccccgccaagcugcugaaggagagaggcuucuucggcgccaucgccggcuuccuggagggcggcugggagggcaugaucgccggcuggcacggcuacaccagccacggcgcccacggcguggccguggccgccgaccugaagagcacccaggaggccaucaacaagaucaccaagaaccugaacagccugagcgagcuggaggugaagaaccugcagagacugagcggcgccauggacgagcugcacaacgagauccuggagcuggacgagaagguggacgaccugagagccgacaccaucagcagccagaucgagcuggccgugcugcugagcaacgagggcaucaucaacagcgaggacgagcaccugcuggcccuggagagaaagcugaagaagaugcugggccccagcgccguggacaucggcaacggcugcuucgagaccaagcacaagugcaaccagaccugccuggacagaaucgccgccggcaccuucaacgccggcgaguucagccugcccaccuucgacagccugaacaucaccgccgccagccugaacgacgacggccuggacaaccacaccauccugcuguacuacagcaccgccgccagcagccuggccgugacccugaugaucgccaucuucaucguguacauggugagcagagacaacgugagcugcagcaucugccuguga

SEQ ID NO: 186531 - RNA, 1752 nt, Artificial Sequence
  derived and/or modified CDS sequence (opt4) from hemagglutinin__InfluenzaB__ABL77310
augaaggccaucaucgugcugcugaugguggugaccagcaacgccgacagaaucugcaccggcaucaccagcagcaacagcccccacguggugaagaccgccacccagggcgaggugaacgugaccggcgugaucccccugaccaccacccccaccaagagccacuucgccaaccugaagggcaccaagaccagaggcaagcugugccccaacugccugaacugcaccgaccuggacguggcccugggcagacccaugugcaucggcaccauccccagcgccaaggccagcauccugcacgaggugagacccgugaccagcggcugcuuccccaucaugcacgacagaaccaagaucagacagcugcccaaccugcugagaggcuacgagcacaucagacugagcacccacaacgugaucaacgccgagagagcccccggcggccccuacagacugggcaccagcggcagcugccccaacgugaccagcagaagcggcuucuucgccaccauggccugggccgugcccagagacaacaagaccgccaccaacccccugaccguggaggugcccuacaucugcaccaagggcgaggaccagaucaccguguggggcuuccacagcgacaacaagaaccagaugaagaaccuguacggcgacagcaacccccagaaguucaccagcagcgccaacggcgugaccacccacuacgugagccagaucggcggcuuccccaaccagaccgaggacggcggccugccccagagcggcagaaucgugguggacuacauggugcagaagcccggcaagaccggcaccaucguguaccagagaggcgugcugcugccccagaagguguggugcgugagcggcagaagcaaggugaucaagggcagccugccccugaucggcgaggccgacugccugcacgagaaguacggcggccugaacaagagcaagcccuacuacaccggcgagcacgccaaggccaucggcaacugccccaucugggugaagaccccccugaagcuggccaacggcaccaaguacagaccccccgccaagcugcugaaggagagaggcuucuucggcgccaucgccggcuuccuggagggcggcugggagggcaugaucgccggcuggcacggcuacaccagccacggcgcccacggcguggccguggccgccgaccugaagagcacccaggaggccaucaacaagaucaccaagaaccugaacagccugagcgagcuggaggugaagaaccugcagagacugagcggcgccauggacgagcugcacaacgagauccuggagcuggacgagaagguggacgaccugagagccgacaccaucagcagccagaucgagcuggccgugcugcugagcaacgagggcaucaucaacagcgaggacgagcaccugcuggcccuggagagaaagcugaagaagaugcugggccccagcgccguggacaucggcaacggcugcuucgagaccaagcacaagugcaaccagaccugccuggacagaaucgccgccggcaccuucaacgccggcgaguucagccugcccaccuucgacagccugaacaucaccgccgccagccugaacgacgacggccuggacaaccacaccauccugcuguacuacagcaccgccgccagcagccuggccgugacccugaugaucgccaucuucaucguguacauggugagcagagacaacgugagcugcagcaucugccuguga

SEQ ID NO: 186532 - RNA, 1758 nt, Artificial Sequence
  derived and/or modified CDS sequence (opt4) from hemagglutinin__InfluenzaB__ABL77321
augaaggccaucaucgugcugcugaugguggugaccagcaacgccgacagaaucugcaccggcaucaccagcagcaacagcccccacguggugaagaccgccacccagggcgaggugaacgugaccggcgugaucccccugaccaccacccccaccaagagccacuucgccaaccugaagggcaccaagaccagaggcaagcugugccccaagugccugaacugcaccgaccuggacguggcccugggcagacccaagugcaccggcaccauccccagcgccaaggugagcauccugcacgaggugaagcccgugaccagcggcugcuuccccaucaugcacgacagaaccaagaucagacagcugcccaaccugcugagaggcuacgagcacaucagacugagcacccacaacgugaucaacgccgagaaggcccccggcggccccuacaagaucggcaccagcggcagcugccccaacaucaccaacggcaacggcuucuucgccaccauggccugggccgugcccaagaacgacaacaacaagaccgccaccaacagccugaccguggaggugcccuacaucugcaccgagggcgaggaccagaucaccguguggggcuuccacagcgacaacgagacccagauggccaagcuguacggcgacagcaagccccagaaguucaccagcagcgccaacggcgugaccacccacuacgugagccagaucggcggcuuccccaaccaggccgaggacggcggccugccccagagcggcagaaucgugguggacuacauggugcagaagagcggcaagaccggcaccaucaccuaccagagaggcauccugcugccccagaagguguggugcgccagcggcagaagcaaggugaucaagggcagccugccccugaucggcgaggccgacugccugcacgagaaguacggcggccugaacaagagcaagcccuacuacaccggcgagcacgccaaggccaucggcaacugccccaucugggugaagaccccccugaaccuggccaacggcaccaaguacagaccccccgccaagcugcugaaggagagaggcuucuucggcgccaucgccggcuuccuggagggcggcugggagggcaugaucgccggcuggcacggcuacaccagccacggcgcccacggcguggccguggccgccgaccugaagagcacccaggaggccaucaacaagaucaccaagaaccugaacagccugagcgagcuggaggugaagaaccugcagagacugagcggcgccauggacgagcugcacaacgagauccuggagcuggacgagaagguggacgaccugagagccgacaccaucagcagccagaucgagcuggccgugcugcugagcaacgagggcaucaucaacagcgaggacgagcaccugcuggcccuggagagaaagcugaagaagaugcugggccccagcgccguggagaucggcaacggcugcuucgagaccaagcacaagugcaaccagaccugccuggacagaaucgccgccggcaccuucaacgccggcgaguucagccugcccaccuucgacagccugaacaucaccgccgccagccugaacgacgacggccuggacaaccacaccauccugcuguacuacagcaccgccgccagcagccuggccgugacccugaugaucgccaucuucaucguguacauggugagcagagacaacgugagcugcagcaucugccuguga

SEQ ID NO: 186533 - RNA, 1755 nt, Artificial Sequence
  derived and/or modified CDS sequence (opt4) from hemagglutinin__InfluenzaB__ABL77332
augaaggccaucaucgugcugcugaugguggugaccagcaacgccgacagaaucugcaccggcaucaccagcagcaacagcccccacguggugaagaccgccacccagggcgaggugaacgugaccggcgugaucccccugaccaccacccccaccaagagccacuucgccaaccugaagggcaccaagaccagaggcaagcugugccccaacugccugaacugcaccgaccuggacguggcccugggcagacccaugugcgugggcaccacccccagcgccaaggccagcauccugcacgaggugagacccgugaccagcggcugcuuccccaucaugcacgacagaaccaagaucagacagcugcccaaccugcugagaggcuacgagaacaucagacugagcacccagaacgugaucaacgccgagaaggcccccggcggccccuacaagcugggcaccagcggcagcugccccaacgccaccagcagaagcggcuucuucgccaccauggccugggccgugcccagagacaacaacaagaccgccaccaacccccugaccguggaggugcccuacaucugcaccaagggcgaggaccagaucaccguguggggcuuccacagcgacgacaagacccagaugaagaaccuguacggcgacagcaacccccagaaguucaccagcagcgccaacggcgugaccacccacuacgugagccagaucggcggcuuccccgaccagaccgaggacggcggccugccccagagcggcagaaucgugguggacuacauggugcagaagcccggcaagaccggcaccaucguguaccagagaggcgugcugcugccccagaagguguggugcgccagcggcagaagcaaggugaucaagggcagccugccccugaucggcgaggccgacugccugcacgagaaguacggcggccugaacaagagcaagcccuacuacaccggcgagcacgccaaggccaucggcaacugccccaucugggugaagaccccccugaagcuggccaacggcaccaaguacagaccccccgccaagcugcugaaggagagaggcuucuucggcgccaucgccggcuuccuggagggcggcugggagggcaugaucgccggcuggcacggcuacaccagccacggcgcccacggcguggccguggccgccgaccugaagagcacccaggaggccaucaacaagaucaccaagaaccugaacagccugagcgagcuggaggugaagaaccugcagagacugagcggcgccauggacgagcugcacaacgagauccuggagcuggacgagaagguggacgaccugagagccgacaccaucagcagccagaucgagcuggccgugcugcugagcaacgagggcaucaucaacagcgaggacgagcaccugcuggcccuggagagaaagcugaagaagaugcugggccccagcgccguggacaucggcaacggcugcuucgagaccaagcacaagugcaaccagaccugccuggacagaaucgccgccggcaccuucaacgccggcgaguucagccugcccaccuucgacagccugaacaucaccgccgccagccugaacgacgacggccuggacaaccacgccauccugcuguacuacagcaccgccgccagcagccuggccgugacccugaugaucgccaucuucaucguguacauggugagcagagacaacgugagcugcagcaucugccuguga

SEQ ID NO: 186534 - RNA, 1755 nt, Artificial Sequence
  derived and/or modified CDS sequence (opt4) from hemagglutinin__InfluenzaB__ABL77343
augaaggccaucaucgugcugcugaugguggugaccagcaacgccgacagaaucugcaccggcaucaccagcagcaacagcccccacguggugaagaccgccacccagggcgaggugaacgugaccggcgugaucccccugaccaccacccccaccaagagccacuucgccaaccugaagggcaccaagaccagaggcaagcugugccccaacugccugaacugcaccgaccuggacguggcccugggcagacccaugugcgugggcaccacccccagcgccaaggccagcauccugcacgaggugagacccgugaccagcggcugcuuccccaucaugcacgacagaaccaagaucagacagcugcccaaccugcugagaggcuacgagaacaucagacugagcacccagaacgugaucaacgccgagaaggcccccggcggccccuacagacugggcaccagcggcagcugccccaacgccaccagcagaagcggcuucuucgccaccauggccugggccgugcccagagacaacaacaagaccgccaccaacccccugaccguggaggugcccuacaucugcaccaagggcgaggaccagaucaccguguggggcuuccacagcgacaacaagauccagaugaagaaccuguacggcgacagcaacccccagaaguucaccagcagcgccaacggcgugaccacccacuacgugagccagaucggcggcuuccccgaccagaccgaggacggcggccugccccagagcggcagaaucgugguggacuacauggugcagaagcccggcaagaccggcaccaucguguaccagagaggcgugcugcugccccagaagguguggugcgccagcggcagaagcaagguggugaagggcagccugccccugaucggcgaggccgacugccugcacgagaaguacggcggccugaacaagagcaagcccuacuacaccggcgagcacgccaaggccaucggcaacugccccaucugggugaagaccccccugaagcuggccaacggcaccaaguacagaccccccgccaagcugcugaaggagagaggcuucuucggcgccaucgccggcuuccuggagggcggcugggagggcaugaucgccggcuggcacggcuacaccagccacggcgcccacggcguggccguggccgccgaccugaagagcacccaggaggccaucaacaagaucaccaagaaccugaacagccugagcgagcuggaggugaagaaccugcagagacugagcggcgccauggacgagcugcacaacgagauccuggagcuggacgagaagguggacgaccugagagccgacaccaucagcagccagaucgagcuggccgugcugcugagcaacgagggcaucaucaacagcgaggacgagcaccugcuggcccuggagagaaagcugaagaagaugcugggccccagcgccguggacaucggcaacggcugcuucgagaccaagcacaagugcaaccagaccugccuggacagaaucgccgccggcaccuucaacgccggcgaguucagccugcccaccuucgacagccugaacaucaccgccgccagccugaacgacgacggccuggacaaccacaccauccugcuguacuacagcaccgccgccagcagccuggccgugacccugaugaucgccaucuucaucguguacauggugagcagagacaacgugagcugcagcaucugccuguga

SEQ ID NO: 186535 - RNA, 1755 nt, Artificial Sequence
  derived and/or modified CDS sequence (opt4) from hemagglutinin__InfluenzaB__ABL77365
augaaggccaucaucgugcugcugaugguggugaccagcaacgccgacagaaucugcaccggcaucaccagcagcaacagcccccacguggugaagaccgccacccagggcgaggugaacgugaccggcgugaucccccugaccaccacccccaccaagagccacuucgccaaccugaagggcaccaagaccagaggcaagcugugccccaacugccugaacugcaccgaccuggacguggcccugggcagacccaugugcgugggcaccacccccagcgccaaggccagcauccugcacgaggugagacccgugaccagcggcugcuuccccaucaugcacgacagaaccaagaucagacagcugcccaaccugcugagaggcuacgagaacaucagacugagcacccagaacgugaucaacgccgagaaggcccccggcggccccuacagacugggcaccagcggcagcugccccaacgccaccagcagaagcggcuucuucgccaccauggccugggccgugcccagagacaacaacaagaccgccaccaacccccugaccguggaggugcccuacgugugcaccgagggcgaggaccagaucaccguguggggcuuccacagcgacaacaagacccagaugaagaaccuguacggcgacagcaacccccagaaguucaccagcagcgccaacggcgugaccacccacuacgugagccagaucggcggcuuccccgaccaggccgaggacggcggccugccccagagcggcagaaucgugguggacuacauggugcagaagcccggcaagaccggcaccaucguguaccagagaggcgugcugcugccccagaagguguggugcgccagcggcagaagcaaggugaucaagggcagccugccccugaucggcgaggccgacugccugcacgagaaguacggcggccugaacaagagcaagcccuacuacaccggcgagcacgccaaggccaucggcaacugccccaucugggugaagaccccccugaagcuggccaacggcaccaaguacagaccccccgccaagcugcugaaggagagaggcuucuucggcgccaucgccggcuuccuggagggcggcugggagggcaugaucgccggcuggcacggcuacaccagccacggcgcccacggcguggccguggccgccgaccugaagagcacccaggaggccaucaacaagaucaccaagaaccugaacagccugagcgagcuggaggugaagaaccugcagagacugagcggcgccauggacgagcugcacaacgagauccuggagcuggacgagaagguggacgaccugagagccgacaccaucagcagccagaucgagcuggccgugcugcugagcaacgagggcaucaucaacagcgaggacgagcaccugcuggcccuggagagaaagcugaagaagaugcugggccccagcgccguggacaucggcaacggcugcuucgagaccaagcacaagugcaaccagaccugccuggacagaaucgccgccggcaccuucaacgccggcgaguucagccugcccaccuucgacagccugaacaucaccgccgccagccugaacgacgacggccuggacaaccacaccauccugcuguacuacagcaccgccgccagcagccuggccgugacccugaugaucgccaucuucaucguguacauggugagcagagacaacgugagcugcagcaucugccuguga

SEQ ID NO: 186536 - RNA, 1755 nt, Artificial Sequence
  derived and/or modified CDS sequence (opt4) from hemagglutinin__InfluenzaB__ABL84340
augaaggccaucaucgugcugcugaugguggugaccagcaacgccgacagaaucugcaccggcaucaccagcagcaacagcccccacguggugaagaccgccacccagggcgaggugaacgugaccggcgugaucccccugaccaccacccccaccaagagccacuucgccaaccugaagggcaccaagaccagaggcaagcugugccccaccugccugaacugcaccgaccuggacguggcccugggcagacccaugugcgugggcaucacccccagcgccaaggccagcauccugcacgaggugagacccgugaccagcggcugcuuccccaucaugcacgacagaaccaagaucagacagcugcccaaccugcugagaggcuacgagaagaucagacugagcacccagaacgugaucaacgccgagaaggcccccggcggccccuacagacugggcaccagcggcagcugccccaacaccaccagcaagagcggcuucuucgccaccauggccugggccgugcccagagacaacaacaagaccgccaccaacccccugaccguggaggugccccacaucugcaccaaggaggaggaccagaucaccguguggggcuuccacagcgacaacaagacccagaugaagaaccuguacggcgacagcaacccccagaaguucaccagcagcgccaacggcgugaccacccacuacgugagccagaucggcggcuuccccgaccagaccgaggacggcggccugccccagagcggcagaaucgugguggacuacauggugcagaagcccggcaagaccggcaccaucguguaccagagaggcauccugcugccccagaagguguggugcgccagcggcagaagcaaggugaucaagggcagccugccccugaucggcgaggccgacugccugcacgagaaguacggcggccugaacaagagcaagcccuacuacaccggcgagcacgccaaggccaucggcaacugccccaucugggugaagaccccccugaagcuggccaacggcaccaaguacagaccccccgccaagcugcugaaggagagaggcuucuucggcgccaucgccggcuuccuggagggcggcugggagggcaugaucgccggcuggcacggcuacaccagccacggcgcccacggcguggccguggccgccgaccugaagagcacccaggaggccaucaacaagaucaccaagaaccugaacagccugagcgagcuggaggugaagaaccugcagagacugagcggcgccauggacgagcugcacaacgagauccuggagcuggacgagaagguggacgaccugagagccgacaccaucagcagccagaucgagcuggccgugcugcugagcaacgagggcaucaucaacagcgaggacgagcaccugcuggcccuggagagaaagcugaagaagaugcugggccccagcgccguggacaucggcaacggcugcuucgagaccaagcacaagugcaaccagaccugccuggacagaaucgccgccggcaccuucaacgccggcgaguucagccugcccaccuucgacagccugaacaucaccgccgccagccugaacggcgacggccuggacaaccacaccauccugcuguacuacagcaccgccgccagcagccuggccgugacccugaugaucgccaucuucaucguguacaugaucagcagagacaacgugagcugcagcaucugccuguga

SEQ ID NO: 186537 - RNA, 1755 nt, Artificial Sequence; identical to SEQ ID NO: 186458
  derived and/or modified CDS sequence (opt4) from hemagglutinin__InfluenzaB__ABN50382

SEQ ID NO: 186538 - RNA, 1755 nt, Artificial Sequence; identical to SEQ ID NO: 186458
  derived and/or modified CDS sequence (opt4) from hemagglutinin__InfluenzaB__ABN50393

SEQ ID NO: 186539 - RNA, 1755 nt, Artificial Sequence
  derived and/or modified CDS sequence (opt4) from hemagglutinin__InfluenzaB__ABN50404
augaaggccaucaucgugcugcugaugguggugaccagcaacgccgacagaaucugcaccggcaucaccagcagcaacagcccccacguggugaagaccgccacccagggcgaggugaacgugaccggcgugaucccccugaccaccacccccaccaagagccacuucgccaaccugaagggcaccaagaccagaggcaagcugugccccaccugccugaacugcaccgaccuggacguggcccugggcagacccaugugcgugggcgugacccccagcgccaaggccagcauccugcacgaggugagacccgugaccagcggcugcuuccccaucaugcacgacagaaccaagaucagacagcugcccaaccugcugagaggcuacgagaagaucagacugagcacccagaacgugaucaacgccgagaaggcccccggcggccccuacagacugggcaccagcggcagcugccccaacgccaccagcagaagcggcuucuucgccaccauggccugggccgugcccagagacaacaacaagaccgccaccaacccccugaccguggaggugccccacaucugcaccaaggaggaggaccagaucaccguguggggcuuccacagcgacaacaagacccagaugaagaaccuguacggcgacagcaacccccagaaguucaccagcagcgccaacggcgugaccacccacuacgugagccagaucggcggcuuccccgaccagaccgaggacggcggccugccccagagcggcagaaucgugguggacuacauggugcagaagcccggcaagaccggcaccaucguguaccagagaggcauccugcugccccagaagguguggugcgccagcggcagaagcaaggugaucaagggcagccugccccugaucggcgaggccgacugccugcacgagaaguacggcggccugaacaagagcaagcccuacuacaccggcgagcacgccaaggccaucggcaacugccccaucugggugaagaccccccugaagcuggccaacggcaccaaguacagaccccccgccaagcugcugaaggagagaggcuucuucggcgccaucgccggcuuccuggagggcggcugggagggcaugaucgccggcuggcacggcuacaccagccacggcgcccacggcguggccguggccgccgaccugaagagcacccaggaggccaucaacaagaucaccaagaaccugaacagccugagcgagcuggaggugaagaaccugcagagacugagcggcgccauggacgagcugcacaacgagauccuggagcuggacgagaagguggacgaccugagagccgacaccaucagcagccagaucgagcuggccgugcugcugagcaacgagggcaucaucaacagcgaggacgagcaccugcuggcccuggagagaaagcugaagaagaugcugggccccagcgccguggacaucggcaacggcugcuucgagaccaagcacaagugcaaccagaccugccuggacagaaucgccgccggcaccuucaacgccggcgaguucagccugcccaccuucgacagccugaacaucaccgccgccagccugaacgacgacggccuggacaaccacaccauccugcuguacuacagcaccgccgccagcagccuggccgugacccugaugaucgccaucuucaucguguacaugaucagcagagacaacgugagcugcagcaucugccuguga

SEQ ID NO: 186540 - RNA, 1755 nt, Artificial Sequence; identical to SEQ ID NO: 186467
  derived and/or modified CDS sequence (opt4) from hemagglutinin__InfluenzaB__ABN50415

SEQ ID NO: 186541 - RNA, 1755 nt, Artificial Sequence; identical to SEQ ID NO: 186467
  derived and/or modified CDS sequence (opt4) from hemagglutinin__InfluenzaB__ABN50426

SEQ ID NO: 186542 - RNA, 1755 nt, Artificial Sequence
  derived and/or modified CDS sequence (opt4) from hemagglutinin__InfluenzaB__ABN50437
augaaggccaucaucgugcugcugaugguggugaccagcaacgccgacagaaucugcaccggcaucaccagcagcaacagcccccacguggugaagaccgccacccagggcgaggugaacgugaccggcgugaucccccugaccaccacccccaccaagagcuacuucgccaaccugaagggcaccagaaccagaggcaagcugugccccgacugccugaacugcaccgaccuggacguggcccugggcagacccaugugcgugggcaccacccccagcgccaaggccagcauccugcacgaggugagacccgugaccagcggcugcuuccccaucaugcacgacagaaccaagaucagacagcugcccaaccugcugagaggcuacgagaacaucagacugagcacccagaacgugaucgacgccgagaaggcccccggcggccccuacagacugggcaccagcggcagcugccccaacgccaccagcaagagcggcuucuucgccaccauggccugggccgugcccaaggacaacaacaagaacgccaccaacccccugaccguggaggugcccuacaucugcaccgagggcgaggaccagaucaccguguggggcuuccacagcgacaacaagacccagaugaagaaccuguacggcgaccccaacccccagaaguucaccagcagcgccaacggcgugaccacccacuacgugagccagaucggcggcuuccccgaccagaccgaggacggcggccugccccagagcggcagaaucgugguggacuacaugaugcagaagcccggcaagaccggcaccaucguguaccagagaggcgugcugcugccccagaagguguggugcgccagcggcaagagcaaggugaucaagggcagccugccccugaucggcgaggccgacugccugcacgagaaguacggcggccugaacaagagcaagcccuacuacaccggcgagcacgccaaggccaucggcaacugccccaucugggugaagaccccccugaagcuggccaacggcaccaaguacagaccccccgccaagcugcugaaggagagaggcuucuucggcgccaucgccggcuuccuggagggcggcugggagggcaugaucgccggcuggcacggcuacaccagccacggcgcccacggcguggccguggccgccgaccugaagagcacccaggaggccaucaacaagaucaccaagaaccugaacagccugagcgagcuggaggugaagaaccugcagagacugagcggcgccauggacgagcugcacaacgagauccuggagcuggacgagaagguggacgaccugagagccgacaccaucagcagccagaucgagcuggccgugcugcugagcaacgagggcaucaucaacagcgaggacgagcaccugcuggcccuggagagaaagcugaagaagaugcugggccccagcgccguggacaucggcaacggcugcuucgagaccaagcacaagugcaaccagaccugccuggacagaaucgccgccggcaccuucaacgccggcgaguucagccugcccaccuucgacagccugaacaucaccgccgccagccugaacgacgacggccuggacaaccacaccauccugcuguacuacagcaccgccgccagcagccuggccgugacccugaugcuggccaucuucaucguguacauggugagcagagacaacgugagcugcagcaucugccuguga

SEQ ID NO: 186543 - RNA, 1758 nt, Artificial Sequence
  derived and/or modified CDS sequence (opt4) from hemagglutinin__InfluenzaB__ABN50459
augaaggcccugaucgugcugcugaugguggugaccagcaacgccgacagaaucugcaccggcaucaccagcagcaacagcccccacguggugaagaccgccacccagggcgaggugaacgugaccggcgugaucccccugaccaccacccccaccaagagccacuucgccaaccugaagggcaccaagaccagaggcaagcugugccccaagugccugaacugcaccgaccuggacguggcccugggcagacccaagugcaccggcaacauccccagcgccgaggugagcauccugcacgaggugagacccgugaccagcggcugcuuccccaucaugcacgacagaaccaagaucagacagcugcccaaccugcugagaggcuacgagcacaucagacugagcacccacaacgugaucaacgccgagaaggcccccggcggccccuacaagaucggcaccagcggcagcugccccaacgugaccaacggcaacggcuucuucgccaccauggccugggccgugcccaagaacgacaacaacaagaccgccaccaacagccugaccaucgaggugcccuacaucugcaccgagggcgaggaccagaucaccaucuggggcuuccacagcgacaacgagauccagauggccaagcuguacggcgacagcaagccccagaaguucaccagcagcgccaacggcgugaccacccacuacgugagccagaucggcggcuuccccaaccagaccgaggacggcggccugccccagagcggcagaaucgugguggacuacauggugcagaagagcggcaagaccggcaccaucaccuaccagagaggcauccugcugccccagaagguguggugcgccagcggcagaagcaaggugaucaagggcagccugccccugaucggcgaggccgacugccugcacgagaaguacggcggccugaacaagagcaagcccuacuacaccggcgagcacgccaaggccaucggcaacugccccaucugggugaagaccccccugaagcuggccaacggcaccaaguacagaccccccgccaagcugcugaaggagagaggcuucuucggcgccaucgccggcuuccuggagggcggcugggagggcaugaucgccggcuggcacggcuacaccagccacggcgcccacggcguggccguggccgccgaccugaagagcacccaggaggccaucaacaagaucaccaagaaccugaacagccugagcgagcuggaggugaagaaccugcagagacugagcggcgccauggacgagcugcacaacgagauccuggagcuggacgagaagguggacgaccugagagccgacaccaucagcagccagaucgagcuggccgugcugcugagcaacgagggcaucaucaacagcgaggacgagcaccugcuggcccuggagagaaagcugaagaagaugcugggccccagcgccguggagaucggcaacggcugcuucgagaccaagcacaagugcaaccagaccugccuggacagaaucgccgccggcaccuucgacgccggcgaguucagccugcccaccuucgacagccugaacaucaccgccgccagccugaacgacgacggccuggacaaccacaccauccugcuguacuacagcaccgccgccagcagccuggccgugacccugaugaucgccaucuucgugguguacauggugagcagagacaacgugagcugcagcaucugccuguga

SEQ ID NO: 186544 - RNA, 1758 nt, Artificial Sequence
  derived and/or modified CDS sequence (opt4) from hemagglutinin__InfluenzaB__ABN50470
augaaggccaucaucgugcugcugaugguggugaccagcaacgccgacagaaucugcaccggcaucaccagcagcaacagcccccacguggugaagaccgccacccagggcgaggugaacgugaccggcgugaucccccugaccaccacccccaccaagagccacuucgccaaccugaagggcaccaagaccagaggcaagcugugccccaagugccugaacugcaccgaccuggacguggcccugggcagacccaagugcaccggcaacauccccagcgccaaggugagcauccugcacgaggugagacccgugaccagcggcugcuuccccaucaugcacgacagaaccaagaucagacagcugcccaaccugcugagaggcuacgagagaaucagacugagcaaccacaacgugaucaacgccgagaaggcccccggcggccccuacaagaucggcaccagcggcagcugccccaacgugaccaacggcaacggcuucuucgccaccauggccugggccgugcccaagaacgagaacaacaagaccgccaccaacagccugaccaucgaggugcccuacaucugcaccgagggcgaggaccagaucaccguguggggcuuccacagcgacaacgagauccagauggccaagcuguacggcgacagcaagccccagaaguucaccagcagcgccaacggcgugaccacccacuacgugagccagaucggcggcuuccccaaccagaccgaggacggcggccugccccagagcggcagaaucgugguggacuacauggugcagaagagcggcaagaccggcaccaucaccuaccagagaggcauccugcugccccagaagguguggugcgccagcggcagaagcaaggugaucaagggcagccugccccugaucggcgaggccgacugccugcacgagaaguacggcggccugaacaagagcaagcccuacuacaccggcgagcacgccaaggccaucggcaacugccccaucugggugaagaccccccugaagcuggccaacggcaccaaguacagaccccccgccaagcugcugaaggagagaggcuucuucggcgccaucgccggcuuccuggagggcggcugggagggcaugaucgccggcuggcacggcuacaccagccacggcgcccacggcguggccguggccgccgaccugaagagcacccaggaggccaucaacaagaucaccaagaaccugaacagccugagcgagcuggaggugaagaaccugcagagacugagcggcgccauggacgagcugcacaacgagauccuggagcuggacgagaagguggacgaccugagagccgacaccaucagcagccagaucgagcuggccgugcugcugagcaacgagggcaucaucaacagcgaggacgagcaccugcuggcccuggagagaaagcugaagaagaugcugggccccagcgccguggagaucggcaacggcugcuucgagaccaagcacaagugcaaccagaccugccuggacagaaucgccgccggcaccuucaacgccggcgaguucagccugcccaccuucgacagccugaacaucaccgccgccagccugaacgacgacggccuggacaaccacaccauccugcuguacuacagcaccgccgccagcagccuggccgugacccugaugaucgccaucuucgugguguacauggugagcagagacaacgugagcugcagcaucugccuguga

SEQ ID NO: 186545 - RNA, 1755 nt, Artificial Sequence
  derived and/or modified CDS sequence (opt4) from hemagglutinin__InfluenzaB__ABN50481
augaaggccaucaucgugcugcugcugguggugaccagcaacgccgacagaaucugcaccggcaucaccagcagcaacagcccccacguggugaagaccgccacccagggcgaggugaacgugaccggcgccaucccccugaccaccacccccaccaagagccacuucgccaaccugaagggcaccaagaccagaggcaagcugugccccaccugcuucaacugcaccgaccuggacguggcccugggcagacccaugugcgugggcaucacccccagcgccaaggccagcauccugcacgaggugagacccgugaccagcggcugcuuccccaucaugcacgacagaaccaagaucagacagcugcccaaccugcugagaggcuacgagaagaucagacugagcacccagaacgugaucgacgccgagaaggcccccggcggccccuacagacugggcaccagcggcagcugccccaacgccaccagcaagagcggcuucuucgccaccauggccugggccgugcccagagacaacaacaagaccgccaccaacccccugaccguggaggugccccacaucugcaccaaggaggaggaccagaucaccguguggggcuuccacagcgacaacaagacccagaugaagaaccuguacggcgacagcaacccccagaaguucaccagcagcgccaacggcaucaccacccacuacgugagccagaucggcggcuuccccgaccagaccgaggacggcggccugccccagagcggcagaaucgugguggacuacauggugcagaagcccggcaagaccggcaccaucguguaccagagaggcauccugcugccccagaagguguggugcgccagcggcagaagcaaggugaucaagggcagccugccccugaucggcgaggccgacugccugcacgagaaguacggcggccugaacaagagcaagcccuacuacaccggcgagcacgccaaggccaucggcaacugccccaucugggugaagaccccccugaagcuggccaacggcaccaaguacagaccccccgccaagcugcugaaggagagaggcuucuucggcgccaucgccggcuuccuggagggcggcugggagggcaugaucgccggcuggcacggcuacaccagccacggcgcccacggcguggccguggccgccgaccugaagagcacccaggaggccaucaacaagaucaccaagaaccugaacagccugagcgagcuggaggugaagaaccugcagagacugagcggcgccauggacgagcugcacaacgagauccuggagcuggacgagaagguggacgaccugagagccgacaccaucagcagccagaucgagcuggccgugcugcugagcaacgagggcaucaucaacagcgaggacgagcaccugcuggcccuggagagaaagcugaagaagaugcugggccccagcgccguggacaucggcaacggcugcuucgagaccaagcacaagugcaaccagaccugccuggacagaaucgccgccggcaccuucaacgccggcgaguucagccugcccaccuucgacagccugaacaucaccgccgccagccugaacgacgacggccuggacaaccacaccauccugcuguacuacagcaccgccgccagcagccuggccgugacccugaugaucgccaucuucaucguguacaugaucagcagagacaacgugagcugcagcaucugccuguga

SEQ ID NO: 186546 - RNA, 1755 nt, Artificial Sequence
  derived and/or modified CDS sequence (opt4) from hemagglutinin__InfluenzaB__ABN50503
augaaggccaucaucgugcugcugaugguggugaccagcaacgccgacagaaucugcaccggcaucaccagcagcaacagcccccacguggugaagaccgccacccagggcgaggugaacgugaccggcgugaucccccugaccaccacccccaccaagagccacuucgccaaccugaagggcaccaagaccagaggcaagcugugccccaccugccugaacugcaccgaccuggacguggcccugggcagacccaugugcgugggcgugacccccagcgccaaggccagcauccugcacgaggugagacccgugaccagcggcugcuuccccaucaugcacgacagaaccaagaucagacagcugcccaaccugcugagaggcuacgagaagaucagacugagcacccagaacgugaucaacgccgagaaggcccccggcggccccuacagacugggcaccagcggcagcugccccaacgccaccagcagaagcggcuucuucgccaccauggccugggccgugcccaaggacaacaacaagaccgccaccaacccccugaccguggaggugccccacaucugcaccaaggaggaggaccagaucaccguguggggcuuccacagcgacgacaagacccagaugaagaaccuguacggcgacagcaacccccagaaguucaccagcagcgccaacggcgugaccacccacuacgugagccagaucggcggcuuccccgaccagaccgaggacggcggccugccccagagcggcagaaucgugguggacuacauggugcagaagcccggcaagaccggcaccaucguguaccagagaggcauccugcugccccagaagguguggugcgccagcggcagaagcaaggugaucaagggcagccugccccugaucggcgaggccgacugccugcacgagaaguacggcggccugaacaagagcaagcccuacuacaccggcgagcacgccaaggccaucggcaacugccccaucugggugaagaccccccugaagcuggccaacggcaccaaguacagaccccccgccaagcugcugaaggagagaggcuucuucggcgccaucgccggcuuccuggagggcggcugggagggcaugaucgccggcuggcacggcuacaccagccacggcgcccacggcguggccguggccgccgaccugaagagcacccaggaggccaucaacaagaucaccaagaaccugaacagccugagcgagcuggaggugaagaaccugcagagacugagcggcgccauggacgagcugcacaacgagauccuggagcuggacgagaagguggacgaccugagagccgacaccaucagcagccagaucgagcuggccgugcugcugagcaacgagggcaucaucaacagcgaggacgagcaccugcuggcccuggagagaaagcugaagaagaugcugggccccagcgccguggacaucggcaacggcugcuucgagaccaagcacaagugcaaccagaccugccuggacagaaucgccgccggcaccuucaacgccggcgaguucagccugcccaccuucgacagccugaacaucaccgccgccagccugaacgacgacggccuggacaaccacaccauccugcuguacuacagcaccgccgccagcagccuggccgugacccugaugaucgccaucuucaucguguacaugaucagcagagacaacgugagcugcagcaucugccuguga

SEQ ID NO: 186547 - RNA, 1755 nt, Artificial Sequence
  derived and/or modified CDS sequence (opt4) from hemagglutinin__InfluenzaB__ABN50514
augaaggccaucaucgugcugcugaugguggccaccagcaacgccgacagaaucugcaccggcaucaccagcagcaacagcccccacguggugaagaccgccacccagggcgaggugaacgugaccggcgugaucccccugaccaccacccccaccaagagcuacuucgccaaccugaagggcaccagaaccagaggcaagcugugccccgacugccugaacugcaccgaccuggacguggcccugggcagacccaugugcgugggcaccacccccagcgccaaggccagcauccugcacgaggugagacccgugaccagcggcugcuuccccaucaugcacgacagaaccaagaucagacagcugcccaaccugcugagaggcuacgagaacaucagacugagcacccagaacgugaucgacgccgagaaggcccccggcggccccuacagacugggcaccagcggcagcugccccaacgccaccagcaagagcggcuucuucgccaccauggccugggccgugcccaaggacaacaacaagaacgccaccaacccccugaccguggaggugcccuacgugugcaccgagggcgaggaccagaucaccguguggggcuuccacagcgacaacaagccccagaugaagaaccuguacggcgacagcaacccccagaaguucaccagcagcgccaacggcgugaccacccacuacgugagccagaucggcggcuuccccgaccagaccgaggacggcggccugccccagagcggcagaaucgugguggacuacauggugcagaagcccggcaagaccggcaccaucguguaccagagaggcgugcugcugccccagaagguguggugcgccagcggcagaagcaaggugaucaagggcagccugccccugaucggcgaggccgacugccugcacgagaaguacggcggccugaacaagagcaagcccuacuacaccggcgagcacgccaaggccaucggcaacugccccaucugggugaagaccccccugaagcuggccaacggcaccaaguacagaccccccgccaagcugcugaaggagagaggcuucuucggcgccaucgccggcuuccuggagggcggcugggagggcaugaucgccggcuggcacggcuacaccagccacggcgcccacggcguggccguggccgccgaccugaagagcacccaggaggccaucaacaagaucaccaagaaccugaacagccugagcgagcuggaggugaagaaccugcagagacugagcggcgccauggacgagcugcacgacgagauccuggagcuggacgagaagguggacgaccugagagccgacaccaucagcagccagaucgagcuggccgugcugcugagcaacgagggcaucaucaacagcgaggacgagcaccugcuggcccuggagagaaagcugaagaagaugcugggccccagcgccguggacaucggcaacggcugcuucgagaccaagcacaagugcaaccagaccugccuggacagaaucgccgccggcaccuucaacgccggcgaguucagccugcccaccuucgacagccugaacaucaccgccgccagccugaacgacgacggccuggacaaccacaccauccugcuguacuacagcaccgccgccagcagccuggccgugacccugaugcuggccaucuucaucguguacauggugagcagagacaacgugagcugcagcaucugccuguga

SEQ ID NO: 186548 - RNA, 1755 nt, Artificial Sequence
  derived and/or modified CDS sequence (opt4) from hemagglutinin__InfluenzaB__ABN50525
augaaggccaucaucgugcugcugaugguggugaccagcaacgccgacagaaucugcaccggcaucaccagcagcaacagcccccacguggugaagaccgccacccagggcgaggugaacgugaccggcgugaucccccugaccaccacccccaccaagagcuacuucgccaaccugaagggcaccagaaccagaggcaagcugugccccgacugccugaacugcaccgaccuggacguggcccugggcagacccaugugcgugggcaccacccccagcgccaaggccagcauccugcacgaggugagacccgugaccagcggcugcuuccccaucaugcacgacagaaccaagaucagacagcugcccaaccugcugagaggcuacgagaacaucagacugagcacccagaacgugaucgacgccgagaaggcccccggcggccccuacagacugggcaccagcggcagcugccccaacgccaccagcaagagcggcuucuucagcaccauggccugggccgugcccaaggacaacaacaagaacgccaccaacccccugaccguggaggugcccuacgugugcaccgagggcgaggaccagaucaccguguggggcuuccacagcgacaacaagacccagaugaagaaccuguacggcgacagcaacccccagaaguucaccagcagcgccaacggcgugaccacccacuacgugagccagaucggcggcuuccccgaccagaccgaggacggcggccugccccagagcggcagaaucgugguggacuacauggugcagaagcccggcaagaccggcaccaucguguaccagagaggcgugcugcugccccagaagguguggugcgccagcggcagaagcaaggugaucaagggcagccugccccugaucggcgaggccgacugccugcacgagaaguacggcggccugaacaagagcaagcccuacuacaccggcgagcacgccaaggccaucggcaacugccccaucugggugaagaccccccugaagcuggccaacggcaccaaguacagaccccccgccaagcugcugaaggagagaggcuucuucggcgccaucgccggcuuccuggagggcggcugggagggcaugaucgccggcuggcacggcuacaccagccacggcgcccacggcguggccguggccgccgaccugaagagcacccaggaggccaucaacaagaucaccaagaaccugaacagccugagcgagcuggaggugaagaaccugcagagacugagcggcgccauggacgagcugcacaacgagauccuggagcuggacgagaagguggacgaccugagagccgacaccaucagcagccagaucgagcuggccgugcugcugagcaacgagggcaucaucaacagcgaggacgagcaccugcuggcccuggagagaaagcugaagaagaugcugggccccagcgccguggacaucggcaacggcugcuucgagaccaagcacaagugcaaccagaccugccuggacagaaucgccgccggcaccuucaacgccggcgaguucagccugcccaccuucgacagccugaacaucaccgccgccagccugaacgacgacggccuggacaaccacaccauccugcuguacuacagcaccgccgccagcagccuggccgugacccugaugcuggccaucuucaucguguacauggugagcagagacaacgugagcugcagcaucugccuguga

SEQ ID NO: 186549 - RNA, 1758 nt, Artificial Sequence
  derived and/or modified CDS sequence (opt4) from hemagglutinin__InfluenzaB__ABN50536
augaaggccaucaucgugcugcugaugguggugaccagcaacgccgacagaaucugcaccggcaucaccagcagcaacagcccccacguggugaagaccgccacccagggcgaggugaacgugaccggcgugaucccccugaccaccacccccaccaagagccacuucgccaaccugaagggcaccaagaccagaggcaagcugugccccaagugccugaacugcaccgaccuggacguggcccugggcagacccaagugcaccggcaacauccccagcgccaaggugagcauccugcacgaggugagacccgugaccagcggcugcuuccccaucaugcacgacagaaccaagaucagacagcugcccaaccugcugagaggcuacgagagaaucagacugagcaaccacaacgugaucaacgccgaggaggcccccggcggccccuacaagaucggcaccagcggcagcugccccaacgugaccaacggcaacggcuucuucgccaccauggccugggccgugcccaagaacgagaacaacaagaccgccaccaacagccugaccaucgaggugcccuacaucugcaccgagggcgaggaccagaucaccguguggggcuuccacagcgacaacgagauccagauggccaagcuguacggcgacagcaagccccagaaguucaccagcagcgccaacggcgugaccacccacuacgugagccagaucggcggcuuccccaaccagaccgaggacggcggccugccccagagcggcagaaucgugguggacuacauggugcagaagagcggcaagaccggcaccaucaccuaccagagaggcauccugcugccccagaagguguggugcgccagcggcagaagcaaggugaucaagggcagccugccccugaucggcgaggccgacugccugcacgagaaguacggcggccugaacaagagcaagcccuacuacaccggcgagcacgccaaggccaucggcaacugccccaucugggugaagaccccccugaagcuggccaacggcaccaaguacagaccccccgccaagcugcugaaggagagaggcuucuucggcgccaucgccggcuuccuggagggcggcugggagggcaugaucgccggcuggcacggcuacaccagccacggcgcccacggcguggccguggccgccgaccugaagagcacccaggaggccaucaacaagaucaccaagaaccugaacagccugagcgagcuggaggugaagaaccugcagagacugagcggcgccauggacgagcugcacaacgagauccuggagcuggacgagaagguggacgaccugagagccgacaccaucagcagccagaucgagcuggccgugcugcugagcaacgagggcaucaucaacagcgaggacgagcaccugcuggcccuggagagaaagcugaagaagaugcugggccccagcgccguggagaucggcaacggcugcuucgagaccaagcacaagugcaaccagaccugccuggacagaaucgccgccggcaccuucaacgccggcgaguucagccugcccaccuucgacagccugaacaucaccgccgccagccugaacgacgacggccuggacaaccacaccauccugcuguacuacagcaccgccgccagcagccuggccgugacccugaugaucgccaucuucgugguguacauggugagcagagacaacgugagcugcagcaucugccuguga

SEQ ID NO: 186550 - RNA, 1758 nt, Artificial Sequence
  derived and/or modified CDS sequence (opt4) from hemagglutinin__InfluenzaB__ABN50547
augaaggccaucaucgugcugcugaugguggugaccagcaacgccgacagaaucugcaccggcaucaccagcagcaacagcccccacguggugaagaccgccacccagggcgaggugaacgugaccggcgugaucccccugaccaccacccccaccaagagccacuucgccaaccugaagggcaccaagaccagaggcaagcugugccccaagugccugaacugcaccgaccuggacguggcccugggcagacccaagugcaccggcaacauccccagcgccaaggugagcauccugcacgaggugagacccgugaccagcggcugcuuccccaucaugcacgacagaaccaagaucagacagcugcccaaccugcugagaggcuacgagcacaucagacugagcacccacaacgugaucaacgccgagaaggcccccggcggccccuacaagaucggcaccagcggcagcugccccaacgugaccaacggcaacggcuucuucgccaccauggccugggccgugcccaagaacgacaacaacaagaccgccaccaacagccugaccaucgaggugcccuacaucugcaccgagggcgaggaccagcugaccguguggggcuuccacagcgacaacgagaaccagauggccaagcuguacggcgacagcaagccccagaaguucaccagcagcgccaacggcgugaccacccacuacgugagccagaucggcggcuuccccaaccagaccgaggacggcggccugccccagagcggcagaaucgugguggacuacauggugcagaagagcggcaagaccggcaccaucaccuaccagagaggcauccugcugccccagaagguguggugcgccagcggcagaagcaaggugaucaagggcagccugccccugaucggcgaggccgacugccugcacgagaaguacggcggccugaacaagagcaagcccuacuacaccggcgagcacgccaaggccaucggcaacugccccaucugggugaagaccccccugaagcuggccaacggcaccaaguacagaccccccgccaagcugcugaaggagagaggcuucuucggcgccaucgccggcuuccuggagggcggcugggagggcaugaucgccggcuggcacggcuacaccagccacggcgcccacggcguggccguggccgccgaccugaagagcacccaggaggccaucaacaagaucaccaagaaccugaacagccugagcgagcuggaggugaagaaccugcagagacugagcggcgccauggacgagcugcacaacgagauccuggagcuggacgagaagguggacgaccugagagccgacaccaucagcagccagaucgagcuggccgugcugcugagcaacgagggcaucaucaacagcgaggacgagcaccugcuggcccuggagagaaagcugaagaagaugcugggccccagcgccguggagaucggcaacggcugcuucgagaccaagcacaagugcaaccagaccugccuggacagaaucgccgccggcaccuucgacgccggcgaguucagccugcccaccuucgacagccugaacaucaccgccgccagccugaacgacgacggccuggacaaccacaccauccugcuguacuacagcaccgccgccagcagccuggccgugacccugaugaucgccaucuucgugguguacauggugagcagagacaacgugagcugcagcaucugccuguga

SEQ ID NO: 186551 - RNA, 1758 nt, Artificial Sequence
  derived and/or modified CDS sequence (opt4) from hemagglutinin__InfluenzaB__ABN50558
augaaggccaucaucgugcugcugaugguggugaccagcaacgccgacagaaucugcaccggcaucaccagcagcaacagcccccacguggugaagaccgccacccagggcgaggugaacgugaccggcgugaucccccugaccaccacccccaccaagagccacuucgccaaccugaagggcaccaagaccagaggcaagcugugccccaagugccugaacugcaccgaccuggacguggcccugggcagacccaagugcaccggcaacauccccagcgccaaggugagcauccugcacgaggugagacccgugaccagcggcugcuuccccaucaugcacgacagaaccaagaucagacagcugcccaaccugcugagaggcuacgagcacaucagacugagcacccacaacgugaucaacgccgagaaggcccccggcggccccuacaagaucggcaccagcggcagcugccccaacgugaccaacggcaacggcuucuucgccaccauggccugggccgugcccaagaacgacaacaacaagaccgccaccaacagccugaccaucgaggugcccuacaucugcaccgagggcgaggaccagaucaccguguggggcuuccacagcgacaaggagacccagauggccaagcuguacggcgacagcaagccccagaaguucaccagcagcgccaacggcgugaccacccacuacgugagccagaucggcggcuuccccaaccagaccgaggacggcggccugccccagagcggcagaaucgugguggacuacaugaugcagaagagcggcaagaccggcaccaucaccuaccagagaggcauccugcugccccagaagguguggugcgccagcggcagaagcaaggugaucaagggcagccugccccugaucggcgaggccgacugccugcacgagaaguacggcggccugaacaagagcaagcccuacuacaccggcgagcacgccaaggccaucggcaacugccccaucugggugaagaccccccugaagcuggccaacggcaccaaguacagaccccccgccaagcugcugaaggagagaggcuucuucggcgccaucgccggcuuccuggagggcggcugggagggcaugaucgccggcuggcacggcuacaccagccacggcgcccacggcguggccguggccgccgaccugaagagcacccaggaggccaucaacaagaucaccaagaaccugaacagccugagcgagcuggaggugaagaaccugcagagacugagcggcgccauggacgagcugcacaacgagauccuggagcuggacgagaagguggacgaccugagagccgacaccaucagcagccagaucgagcuggccgugcugcugagcaacgagggcaucaucaacagcgaggacgagcaccugcuggcccuggagagaaagcugaagaagaugcugggccccagcgccguggagaucggcaacggcugcuucgagaccaagcacaagugcaaccagaccugccuggacagaaucgccgccggcaccuucgacgccggcgaguucagccugcccaccuucgacagccugaacaucaccgccgccagccugaacgacgacggccuggacaaccacaccauccugcuguacuacagcaccgccgccagcagccuggccgugacccugaugaucgccaucuucgugguguacauggugagcagagacaacgugagcugcagcaucugccuguga

SEQ ID NO: 186552 - RNA, 1755 nt, Artificial Sequence; identical to SEQ ID NO: 186467
  derived and/or modified CDS sequence (opt4) from hemagglutinin__InfluenzaB__ABN50569

SEQ ID NO: 186553 - RNA, 1758 nt, Artificial Sequence; identical to SEQ ID NO: 186479
  derived and/or modified CDS sequence (opt4) from hemagglutinin__InfluenzaB__ABN50580

SEQ ID NO: 186554 - RNA, 1758 nt, Artificial Sequence
  derived and/or modified CDS sequence (opt4) from hemagglutinin__InfluenzaB__ABN50591
augaaggccaucaucgugcugcugaugguggugaccagcaacgccgacagaaucugcaccggcaucaccagcagcaacagcccccacguggugaagaccgccacccagggcgaggugaacgugaccggcgugaucccccugaccaccacccccaccaagagccacuucgccaaccugaagggcaccaagaccagaggcaagcugugccccaagugccugaacugcaccgaccuggacguggcccugggcagacccaagugcaccggcaacauccccagcgccaaggugagcauccugcacgaggugagacccgugaccagcggcugcuuccccaucaugcacgacagaaccaagaucagacagcugcccaaccugcugagaggcuacgagagaaucagacugagcaaccacaacgugaucaacgccgagaaggcccccggcggccccuacaagaucggcaccagcggcagcugccccaacgugaccaacggcaacggcuucuucgccaccauggccugggccgugcccaagaacgagaacaacaagaccgccaccaacagccugaccaucgaggugcccuacaucugcaccgagggcgaggaccagaucaccguguggggcuuccacagcgacaacgaggcccagauggccaagcuguacggcgacagcaagccccagaaguucaccagcagcgccaacggcgugaccacccacuacgugagccagaucggcggcuuccccaaccagaccgaggacggcggccugccccagagcggcagaaucgugguggacuacauggugcagaagagcggcaagaccggcaccaucaccuaccagagaggcauccugcugccccagaagguguggugcgccagcggcagaagcaaggugaucaagggcagccugccccugaucggcgaggccgacugccugcacgagaaguacggcggccugaacaagagcaagcccuacuacaccggcgagcacgccaaggccaucggcaacugccccaucugggugaagaccccccugaagcuggccaacggcaccaaguacagaccccccgccaagcugcugaaggagagaggcuucuucggcgccaucgccggcuuccuggagggcggcugggagggcaugaucgccggcuggcacggcuacaccagccacggcgcccacggcguggccguggccgccgaccugaagagcacccaggaggccaucaacaagaucaccaagaaccugaacagccugagcgagcuggaggugaagaaccugcagagacugagcggcgccauggacgagcugcacaacgagauccuggagcuggacgagaagguggacgaccugagagccgacaccaucagcagccagaucgagcuggccgugcugcugagcaacgagggcaucaucaacagcgaggacgagcaccugcuggcccuggagagaaagcugaagaagaugcugggccccagcgccguggagaucggcaacggcugcuucgagaccaagcacaagugcaaccagaccugccuggacagaaucgccgccggcaccuucaacgccggcgaguucagccugcccaccuucgacagccugaacaucaccgccgccagccugaacgacgacggccuggacaaccacaccauccugcuguacuacagcaccgccgccagcagccuggccgugacccugaugaucgccaucuucgugguguacauggugagcagagacaacgugagcugcagcaucugccuguga

SEQ ID NO: 186555 - RNA, 1758 nt, Artificial Sequence
  derived and/or modified CDS sequence (opt4) from hemagglutinin__InfluenzaB__ABN50602
augaaggccaucaucgugcugcugaugguggugaccagcaacgccgacagaaucugcaccggcaucaccagcagcaacagcccccacguggugaagaccgccacccagggcgaggugaacgugaccggcgugaucccccugaccaccacccccaccaagagccacuucgccaaccugaagggcaccaagaccagaggcaagcugugccccaagugccugaacugcaccgaccuggacguggcccugggcagacccaagugcaugggcaccauccccagcgccaaggccagcauccugcacgaggugaagcccgugaccagcggcugcuuccccaucaugcacgacagaaccaagaucagacagcugcccaaccugcugagaggcuacgagaacaucagacugagcacccacaacgugaucaacgccgagaccgcccccggcggccccuacaagaucggcaccagcggcagcugccccaacaucaccaacggcaacggcuucuucgccaccauggccugggccgugcccaagaacgacaacaacaagaccgccaccaacccccugaccguggaggugcccuacaucugcaccgagggcgaggaccagaucaccguguggggcuuccacagcgacaacgagacccagauggugaagcuguacggcgacagcaagccccagaaguucaccagcagcgccaacggcgugaccgcccacuacgugagccagaucggcggcuuccccaaccaggccgaggacggcggccugccccagagcggcagaaucgugguggacuacauggugcagaagagcggcaagaccggcaccaucaccuaccagagaggcauccugcugccccagaagguguggugcgccagcggcagaagcaaggugaucaagggcagccugccccugaucggcgaggccgacugccugcacgagaaguacggcggccugaacaagagcaagcccuacuacaccggcgagcacgccaaggccaucggcaacugccccaucugggugaagaccccccugaagcuggccaacggcaccaaguacagaccccccgccaagcugcugaaggagagaggcuucuucggcgccaucgccggcuuccuggagggcggcugggagggcaugaucgccggcuggcacggcuacaccagccacggcgcccacggcguggccguggccgccgaccugaagagcacccaggaggccaucaacaagaucaccaagaaccugaacagccugagcgagcuggaggugaagaaccugcagagacugagcggcgccauggacgagcugcacaacgagauccuggagcuggacgagaagguggacgaccugagagccgacaccaucagcagccagaucgagcuggccgugcugcugagcaacgagggcaucaucaacagcgaggacgagcaccugcuggcccuggagagaaagcugaagaagaugcugggccccagcgccguggacaucggcaacggcugcuucgagaccaagcacaagugcaaccagaccugccuggacagaaucgccgccggcaccuucaacgccggcgaguucagccugcccaccuucgacagccugaacaucaccgccgccagccugaacgacgacggccuggacaaccacaccauccugcuguacuacagcaccgccgccagcagccuggccgugacccugaugaucgccaucuucaucguguacauggugagcagagacaacgugagcugcagcaucugccuguga

SEQ ID NO: 186556 - RNA, 1752 nt, Artificial Sequence
  derived and/or modified CDS sequence (opt4) from hemagglutinin__InfluenzaB__ABN50624
augaaggccaucaucgugcugcugaugguggugaccagcaacgccgacagaaucugcaccggcaucaccagcagcaacagcccccacguggugaagaccgccacccagggcgaggugaacgugaccggcgugaucccccugaccaccacccccaccaagagccacuucgccaaccugaagggcaccaagaccagaggcaagcugugccccaacugccugaacugcaccgaccuggacguggcccugggcagacccaugugcaucggcaccauccccagcgccaaggccagcauccugcacgaggugagacccgugaccagcggcugcuuccccaucaugcacgacagaaccaagaucagacagcugcccaaccugcugagaggcuacgagaacaucagacugagcacccacaacgugaucaacgccgagagagcccccggcggccccuacagacugggcaccagcggcagcugccccaacgugaccagcaagagcggcuucuucgccaccauggccugggccgugcccagagacaacaagaccgccaccaacccccugaccguggaggugcccuacaucugcaccaagggcgaggaccagaucaccguguggggcuuccacagcgacaacaagaaccagaugaagaaccuguacggcgacagcaacccccagaaguucaccagcagcgugaacggcgugaccacccacuacgugagccagaucggcggcuuccccaaccagaccgaggacggcggccugccccagagcggcagaaucgugguggacuacauggugcagaagcccggcaagaccggcaccaucguguaccagagaggcgugcugcugccccagaagguguggugcgccagcggcagaagcaaggugaucaagggcagccugccccugaucggcgaggccgacugccugcacgagaaguacggcggccugaacaagagcaagcccuacuacaccggcgagcacgccaaggccaucggcaacugccccaucugggugaagaccccccugaagcuggccaacggcaccaaguacagaccccccgccaagcugcugaaggagagaggcuucuucggcgccaucgccggcuuccuggagggcggcugggagggcaugaucgccggcuggcacggcuacaccagccacggcgcccacggcguggccguggccgccgaccugaagagcacccaggaggccaucaacaagaucaccaagaaccugaacagccugagcgagcuggaggugaagaaccugcagagacugagcggcgccauggacgagcugcacaacgagauccuggagcuggacgagaagguggacgaccugagagccgacaccaucagcagccagaucgagcuggccgugcugcugagcaacgagggcaucaucaacagcgaggacgagcaccugcuggcccuggagagaaagcugaagaagaugcugggccccagcgccguggacaucggcaacggcugcuucgagaccaagcacaagugcaaccagaccugccuggacagaaucgccgccggcaccuucaacgccggcgaguucagccugcccaccuucgacagccugaacaucaccgccgccagccugaacgacgacggccuggacaaccacaccauccugcuguacuacagcaccgccgccagcagccuggccgugacccugaugaucgccaucuucaucguguacauggugagcagagacaacgugagcugcagcaucugccuguga

SEQ ID NO: 186557 - RNA, 1752 nt, Artificial Sequence
  derived and/or modified CDS sequence (opt4) from hemagglutinin__InfluenzaB__ABN50635
augaaggccaucaucgugcugcugaugguggugaccagcaacgccgacagaaucugcaccggcaucaccagcagcaacagcccccacguggugaagaccgccacccagggcgaggugaacgugaccggcgugaucccccugaccaccacccccaccaagagccacuucgccaaccugaagggcaccaagaccagaggcaagcugugccccaacugccugaacugcaccgaccuggacguggcccugggcagacccaugugcaucggcaccauccccagcgccaaggccagcauccugcacgaggugagacccgugaccagcggcugcuuccccaucaugcacgacagaaccaagaucagacagcugcccaaccugcugagaggcuacgagcacaucagacugagcacccacaacgugaucaacgccgagagagcccccggcggccccuacagacugggcaccagcggcagcugccccaacgugaccagcagaagcggcuucuucgccaccauggccugggccgugcccagagacaacaagaccgccaccaacccccugaccguggaggugcccuacaucugcaccaagggcgaggaccagaucaccguguggggcuuccacagcgacagcaagacccagaugaagaaccuguacggcgacagcaacccccagaaguucaccagcagcgccaacggcgugaccacccacuacgugagccagaucggcggcuuccccaaccagaccgaggacggcggccugccccagagcggcagaaucgugguggacuacauggugcagaagcccggcaagaccggcaccaucguguaccagagaggcgugcugcugccccagaagguguggugcgccagcggcagaagcaaggugaucaagggcagccugccccugaucggcgaggccgacugccugcacgagaaguacggcggccugaacaagagcaagcccuacuacaccggcgagcacgccaaggccaucggcaacugccccaucugggugaagaccccccugaagcuggccaacggcaccaaguacagaccccccgccaagcugcugaaggagagaggcuucuucggcgccaucgccggcuuccuggagggcggcugggagggcaugaucgccggcuggcacggcuacaccagccacggcgcccacggcguggccguggccgccgaccugaagagcacccaggaggccaucaacaagaucaccaagaaccugaacagccugagcgagcuggaggugaagaaccugcagagacugagcggcgccauggacgagcugcacaacgagauccuggagcuggacgagaagguggacgaccugagagccgacaccaucagcagccagaucgagcuggccgugcugcugagcaacgagggcaucaucaacagcgaggacgagcaccugcuggcccuggagagaaagcugaagaagaugcugggccccagcgccguggacaucggcaacggcugcuucgagaccaagcacaagugcaaccagaccugccuggacagaaucgccgccggcaccuucaacgccggcgaguucagccugcccaccuucgacagccugaacaucaccgccgccagccugaacgacgacggccuggacaaccacaccauccugcuguacuacagcaccgccgccagcagccuggccgugacccugaugaucgccaucuucaucguguacauggugagcagagacaacgugagcugcagcaucugccuguga

SEQ ID NO: 186558 - RNA, 1752 nt, Artificial Sequence
  derived and/or modified CDS sequence (opt4) from hemagglutinin__InfluenzaB__ABN50646
augaaggccaucaucgugcugcugaugguggugaccagcaacgccgacagaaucugcaccggcaucaccagcagcaacagcccccacguggugaagaccgccacccagggcgaggugaacgugaccggcgugaucccccugaccaccacccccaccaagagccacuucgccaaccugaagggcaccaagaccagaggcaagcugugccccaacugccugaacugcaccgaccuggacguggcccugggcagacccaugugcaucggcaccauccccagcgccaaggccagcauccugcacgaggugagacccgugaccagcggcugcuuccccaucaugcacgacagaaccaagaucagacagcugcccaaccugcugagaggcuacgagcacaucagacugagcacccacaacgugaucaacgccgagagagcccccggcggccccuacagacugggcaccagcggcagcugccccaacgugaccagcagaagcggcuucuucgccaccauggccugggccgugcccagagacaacaagaccgccaccaacccccugaccguggaggugcccuacaucugcaccaagggcgaggaccagaucaccguguggggcuuccacagcgacaacaagaaccagaugaagaaccuguacggcgacagcaacccccagaaguucaccagcagcgccaacggcgugaccacccacuacgugagccagaucggcggcuuccccaaccagaccgaggacggcggccugccccagagcggcagaaucgugguggacuacauggugcagaagcccggcaagaccggcaccaucguguaccagagaggcgugcugcugccccagaagguguggugcgccagcggcagaagcaaggugaucaagggcagccugccccugaucggcgaggccgacugccugcacgagaaguacggcggccugaacaagagcaagcccuacuacaccggcgagcacgccaaggccaucggcaacugccccaucugggugaagaccccccugaagcuggccaacggcaccaaguacagaccccccgccaagcugcugaaggagagaggcuucuucggcgccaucgccggcuuccuggagggcggcugggagggcaugaucgccggcuggcacggcuacaccagccacggcgcccacggcguggccguggccgccgaccugaagagcacccaggaggccaucaacaagaucaccaagaaccugaacagccugagcgagcuggaggugaagaaccugcagagacugagcggcgccauggacgagcugcacaacgagauccuggagcuggacgagaagguggacgaccugagagccgacaccaucagcagccagaucgagcuggccgugcugcugagcaacgagggcaucaucaacagcgaggacgagcaccugcuggcccuggagagaaagcugaagaagaugcugggccccagcgccguggacaucggcaacggcugcuucgagaccaagcacaagugcaaccagaccugccuggacagaaucgccgccggcaccuucaacgccggcgaguucagccugcccaccuucgacagccugaacaucaccgccgccagccugaacgacgacggccuggacaaccacaccauccugcuguacuacagcaccgccgccagcagccuggccgugacccugaugaucgccaucuucaucguguacauggugagcagagacaacgugagcugcagcaucugccuguga

SEQ ID NO: 186559 - RNA, 1752 nt, Artificial Sequence
  derived and/or modified CDS sequence (opt4) from hemagglutinin__InfluenzaB__ABN50657
augaaggccaucaucgugcugcugaugguggugaccagcaacgccgacagaaucugcaccggcaucaccagcagcaacagcccccacguggugaagaccgccacccagggcgaggugaacgugaccggcgugaucccccugaccaccacccccaccaagagccacuucgccaaccugaagggcaccaagaccagaggcaagcugugccccaacugccugaacugcaccgaccuggacguggcccugggcagacccaugugcgugggcaucacccccagcgccaaggccagcauccugcacgaggugagacccgugaccagcggcugcuuccccaucaugcacgacagaaccaagaucagacagcugcccaaccugcugagaggcuacgagaacaucagacugagcacccagaacgugaucaacgccgagaaggcccccggcggccccuacagacugggcaccagcggcagcugccccaacgugaccagcagaaccggcuucuucgccaccauggccugggccgugcccagagacaacaagaccgccaccaacccccugaccguggaggugcccuacaucugcaccaagggcgaggaccagaucaccguguggggcuuccacagcgacaacaagacccagaugaagaaccuguacggcgacagcaacccccagaaguucaccagcagcgccaacggcgugaccacccacuacgugagccagaucggcggcuuccccgaccagaccgaggacggcggccugccccagagcggcagaaucgugguggacuacauggugcagaagcccggcaagaccggcaccaucguguaccagagaggcauccugcugccccagaagguguggugcgccagcggcagaagcaaggugaucaagggcagccugccccugaucggcgaggccgacugccugcacgagaaguacggcggccugaacaagagcaagcccuacuacaccggcgagcacgccaaggccaucggcaacugccccaucugggugaagaccccccugaagcuggccaacggcaccaaguacagaccccccgccaagcugcugaaggagagaggcuucuucggcgccaucgccggcuuccuggagggcggcugggagggcaugaucgccggcuggcacggcuacaccagccacggcgcccacggcguggccguggccgccgaccugaagagcacccaggaggccaucaacaagaucaccaagaaccugaacagccugagcgagcuggaggugaagaaccugcagagacugagcggcgccauggacgagcugcacaacgagauccuggagcuggacgagaagguggacgaccugagagccgacaccaucagcagccagaucgagcuggccgugcugcugagcaacgagggcaucaucaacagcgaggacgagcaccugcuggcccuggagagaaagcugaagaagaugcugggccccagcgccguggacaucggcaacggcugcuucgagaccaagcacaagugcaaccagaccugccuggacagaaucgccgccggcaccuucaacgccggcgaguucagccugcccaccuucgacagccugaacaucaccgccgccagccugaacgacgacggccuggacaaccacaccauccugcuguacuacagcaccgccgccagcagccuggccgugacccugaugaucgccaucuucaucguguacauggugagcagagacaacgugagcugcagcaucugccuguga

SEQ ID NO: 186560 - RNA, 1755 nt, Artificial Sequence
  derived and/or modified CDS sequence (opt4) from hemagglutinin__InfluenzaB__ABN50679
augaaggccaucaucgugcugcugaugguggugaccagcaacgccgacagaaucugcaccggcaucaccagcagcaacagcccccacguggugaagaccgccacccagggcgaggugaacgugaccggcgugaucccccugaccaccacccccaccaagagccacuucgccaaccugaagggcaccaagaccagaggcaagcugugccccaacugccugaacugcaccgaccuggacguggcccugggcagacccaugugcgugggcaccacccccagcgccaaggccagcauccugcacgaggugagacccgugaccagcggcugcuuccccaucaugcacgacagaaccaagaucagacagcugcccaaccugcugagaggcuacgagaacaucagacugagcacccagaacgugaucaacgccgagaaggcccccggcggccccuacagacugggcaccagcggcagcugccccaacgccaccagcagaagcggcuucuucgccaccauggccugggccgugcccagagacaacaacaagaccgccaccaacccccugaccguggaggugcccuacaucugcaccaagggcgaggaccagaucaccguguggggcuuccacagcgacgacaagacccagaugaagaaccuguacggcgacagcaacccccagaaguucaccagcagcgccaacggcgugaccacccacuacgugagccagaucggcggcuuccccgaccagaccgaggacggcggccugccccagagcggcagaaucgugguggacuacauggugcagaagcccggcaagaccggcaccaucguguaccagagaggcgugcugcugccccagaagguguggugcgccagcggcagaagcaaggugaucaagggcagccugccccugaucggcgaggccgacugccugcacgagaaguacggcggccugaacaagagcaagcccuacuacaccggcgagcacgccaaggccaucggcaacugccccaucugggugaagaccccccugaagcuggccaacggcaccaaguacagaccccccgccaagcugcugaaggagagaggcuucuucggcgccaucgccggcuuccuggagggcggcugggagggcaugaucgccggcuggcacggcuacaccagccacggcgcccacggcguggccguggccgccgaccugaagagcacccaggaggccaucaacaagaucaccaagaaccugaacagccugagcgagcuggaggugaagaaccugcagagacugagcggcgccauggacgagcugcacaacgagauccuggagcuggacgagaagguggacgaccugagagccgacaccaucagcagccagaucgagcuggccgugcugcugagcaacgagggcaucaucaacagcgaggacgagcaccugcuggcccuggagagaaagcugaagaagaugcugggccccagcgccguggacaucggcaacggcugcuucgagaccaagcacaagugcaaccagaccugccuggacagaaucgccgccggcaccuucaacgccggcgaguucagccugcccaccuucgacagccugaacaucaccgccgccagccugaacgacgacggccuggacaaccacaccauccugcuguacuacagcaccgccgccagcagccuggccgugacccugaugaucgccaucuucaucguguacauggugagcagagacaacgugagcugcagcaucugccuguga

SEQ ID NO: 186561 - RNA, 1755 nt, Artificial Sequence
  derived and/or modified CDS sequence (opt4) from hemagglutinin__InfluenzaB__ABN50690
augaaggccaucaucgugcugcugaugguggugaccagcaacgccgacagaaucugcaccggcaucaccagcagcaacagcccccacguggugaagaccgccacccagggcgaggugaacgugaccggcgugaucccccugaccaccacccccaccaagagccacuucgccaaccugaagggcaccaagaccagaggcaagcugugccccaacugccugaacugcaccgaccuggacguggcccugggcagacccaugugcgugggcaccacccccagcgccaaggccagcauccugcacgaggugagacccgugaccagcggcugcuuccccaucaugcacgacagaaccaagaucagacagcugcccaaccugcugagaggcuacgagaacaucagacugagcacccagaacgugaucaacgccgagaaggcccccggcggccccuacagacugggcaccagcggcagcugccccaacgccaccagcagaagcggcuucuucgccaccauggccugggccgugcccagagacaacaacaagaccgccaccaacccccugaccguggaggugcccuacgugugcaccgagggcgaggaccagaucaccguguggggcuuccacagcgacaacaagacccagaugaagaaccuguacggcgacagcaacccccagaaguucaccagcagcgccaacggcgugaccacccacuacgugagccagaucggcggcuuccccgaccagaccgaggacggcggccugccccagagcggcagaaucgugguggacuacauggugcagaagcccggcaagaccggcaccaucguguaccagagaggcgugcugcugccccagaagguguggugcgccagcggcagaagcaaggugaucaagggcagccugccccugaucggcgaggccgacugccugcacgagaaguacggcggccugaacaagagcaagcccuacuacaccggcgagcacgccaaggccaucggcaacugccccaucugggugaagaccccccugaagcuggccaacggcaccaaguacagaccccccgccaagcugcugaaggagagaggcuucuucggcgccaucgccggcuuccuggagggcggcugggagggcaugaucgccggcuggcacggcuacaccagccacggcgcccacggcguggccguggccgccgaccugaagagcacccaggaggccaucaacaagaucaccaagaaccugaacagccugagcgagcuggaggugaagaaccugcagagacugagcggcgccauggacgagcugcacaacgagauccuggagcuggacgagaagguggacgaccugagagccgacaccaucagcagccagaucgagcuggccgugcugcugagcaacgagggcaucaucaacagcgaggacgagcaccugcuggcccuggagagaaagcugaagaagaugcugggccccagcgccguggacaucggcaacggcugcuucgagaccaagcacaagugcaaccagaccugccuggacagaaucgccgccggcaccuucaacgccggcgaguucagccugcccaccuucgacagccugaacaucaccgccgccagccugaacgacgacggccuggacaaccacaccauccugcuguacuacagcaccgccgccagcagccuggccgugacccugaugaucgccaucuucaucguguacauggugagcagagacaacgugagcugcagcaucugccuguga

SEQ ID NO: 186562 - RNA, 1752 nt, Artificial Sequence
  derived and/or modified CDS sequence (opt4) from hemagglutinin__InfluenzaB__ABN50701
augaaggccaucaucgugcugcugaugguggugaccagcaacgccgacagaaucugcaccggcaucaccagcagcaacagcccccacguggugaagaccgccacccagggcgaggugaacgugaccggcgugaucccccugaccaccacccccaccaagagccacuucgccaaccugaagggcaccaagaccagaggcaagcugugccccaacugccugaacugcaccgaccuggacguggcccugggcagacccaugugcgugggcaucacccccagcgccaaggccagcauccugcacgaggugagacccgugaccagcggcugcuuccccaucaugcacgacagaaccaagaucagacagcugcccaaccugcugagaggcuacgagaacaucagacugagcacccagaacgugaucaacgccgagaaggcccccggcggccccuacagacugggcaccagcggcagcugccccaacgugaccagcagaaccggcuucuucgccaccauggccugggccgugcccagagacaacaagaccgccaccaacccccugaccguggaggugcccuacaucugcaccaagggcgaggaccagaucaccguguggggcuuccacagcgacaacaaggcccagaugaagaaccuguacggcgacagcaacccccagaaguucaccagcagcgccaacggcgugaccacccacuacgugagccagaucggcggcuuccccgaccagaccgaggacggcggccugccccagagcggcagaaucgugguggacuacauggugcagaagcccggcaagaccggcaccaucguguaccagagaggcauccugcugccccagaagguguggugcgccagcggcagaagcaaggugaucaagggcagccugccccugaucggcgaggccgacugccugcacgagaaguacggcggccugaacaagagcaagcccuacuacaccggcgagcacgccaaggccaucggcaacugccccaucugggugaagaccccccugaagcuggccaacggcaccaaguacagaccccccgccaagcugcugaaggagagaggcuucuucggcgccaucgccggcuuccuggagggcggcugggagggcaugaucgccggcuggcacggcuacaccagccacggcgcccacggcguggccguggccgccgaccugaagagcacccaggaggccaucaacaagaucaccaagaaccugaacagccugagcgagcuggaggugaagaaccugcagagacugagcggcgccauggacgagcugcacaacgagauccuggagcuggacgagaagguggacgaccugagagccgacaccaucagcagccagaucgagcuggccgugcugcugagcaacgagggcaucaucaacagcgaggacgagcaccugcuggcccuggagagaaagcugaagaagaugcugggccccagcgccguggacaucggcaacggcugcuucgagaccaagcacaagugcaaccagaccugccuggacagaaucgccgccggcaccuucaacgccggcgaguucagccugcccaccuucgacagccugaacaucaccgccgccagccugaacgacgacggccuggacaaccacaccauccugcuguacuacagcaccgccgccagcagccuggccgugacccugaugaucgccaucuucaucguguacauggugagcagagacaacgugagcugcagcaucugccuguga

SEQ ID NO: 186563 - RNA, 1755 nt, Artificial Sequence; identical to SEQ ID NO: 186561
  derived and/or modified CDS sequence (opt4) from hemagglutinin__InfluenzaB__ABN50712

SEQ ID NO: 186564 - RNA, 1755 nt, Artificial Sequence
  derived and/or modified CDS sequence (opt4) from hemagglutinin__InfluenzaB__ABN50723
augaaggccaucaucgugcugcugaugguggugaccagcaacgccgacagaaucugcaccggcaucaccagcagcaacagcccccacguggugaagaccgccacccagggcgaggugaacgugaccggcgugaucccccugaccaccacccccaccaagagccacuucgccaaccugagaggcaccaagaccagaggcaagcugugccccaccugccugaacugcaccgaccuggacguggcccugggcagacccaugugcgugggcaccacccccagcgccaaggccagcauccugcacgaggugagacccgugaccagcggcugcuuccccaucaugcacgacagaaccaagaucagacagcugcccaaccugcugagaggcuacgagaagaucagacugagcacccagaacgugaucaacgccgagaaggcccccggcggccccuacagacugggcaccagcggcagcugccccaacgccaccagcagaagcggcuucuucgccaccauggccugggccgugcccagagacaacaacaagaccgccaccaacccccugaccguggaggugcccuacaucugcaccaaggaggaggaccagaucaccguguggggcuuccacagcgacaacaagacccagaugaagaaccuguacggcgacagcaacccccagaaguucaccagcagcgccaacggcgugaccacccacuacgugagccagaucggcggcuuccccgaccagaccgaggacggcggccugccccagagcggcagaaucgugguggacuacauggugcagaagcccggcaagaccggcaccaucguguaccagagaggcauccugcugccccagaagguguggugcgccagcggcagaagcaaggugaucaagggcagccugccccugaucggcgaggccgacugccugcacgagaaguacggcggccugaacaagagcaagcccuacuacaccggcgagcacgccaaggccaucggcaacugccccaucugggugaagaccccccugaagcuggccaacggcaccaaguacagaccccccgccaagcugcugaaggagagaggcuucuucggcgccaucgccggcuuccuggagggcggcugggagggcaugaucgccggcuggcacggcuacaccagccacggcgcccacggcguggccguggccgccgaccugaagagcacccaggaggccaucaacaagaucaccaagaaccugaacagccugagcgagcuggaggugaagaaccugcagagacugagcggcgccauggacgagcugcacaacgagauccuggagcuggacgagaagguggacgaccugagagccgacaccaucagcagccagaucgagcuggccgugcugcugagcaacgagggcaucaucaacagcgaggacgagcaccugcuggcccuggagagaaagcugaagaagaugcugggccccagcgccguggacaucggcaacggcugcuucgagaccaagcacaagugcaaccagaccugccuggacagaaucgccgccggcaccuucaacgccggcgaguucagccugcccaccuucgacagccugaacaucaccgccgccagccugaacgacgacggccuggacaaccacaccauccugcuguacuacagcaccgccgccagcagccuggccgugacccugaugaucgccaucuucaucguguacaugaucagcagagacaacgugagcugcagcaucugccuguga

SEQ ID NO: 186565 - RNA, 1755 nt, Artificial Sequence
  derived and/or modified CDS sequence (opt4) from hemagglutinin__InfluenzaB__ABN50734
augaaggccaucaucgugcugcugaugguggugaccagcaacgccgacagaaucugcaccggcaucaccagcagcaacagcccccacguggugaagaccgccacccagggcgaggugaacgugaccggcgccaucccccugaccaccacccccaccaagagccacuucgccaaccugaagggcaccaagaccagaggcaagcugugccccaccugccugaacugcaccgaccuggacguggcccugggcagacccaugugcgugggcaucacccccagcgccaaggccagcauccugcacgaggugagacccgugaccagcggcugcuuccccaucaugcacgacagaaccaagaucagacagcugcccaaccugcugagaggcuacgagaagaucagacugagcacccagaacgugaucaacgccgagaaggcccccggcggccccuacagacugggcaccagcggcagcugccccaacgccaccagcagaagcggcuucuucaccaccauggccugggccgugcccagagacaacaacaagaccgccaccaacccccugaccguggaggugccccacaucugcaccaaggaggaggaccagaucaccguguggggcuuccacagcgacgacaagacccagaugaagaaccuguacggcgacagcaacccccagaaguucaccagcagcaccaacggcaucaccacccacuacgugagccagaucggcggcuuccccgaccagaccgaggacggcggccugccccagagcggcagaaucgugguggacuacauggugcagaagcccggcaagaccggcaccaucguguaccagagaggcauccugcugccccagaagguguggugcgccagcggcagaagcaaggugaucaagggcagccugccccugaucggcgaggccgacugccugcacgagaaguacggcggccugaacaagagcaagcccuacuacaccggcgagcacgccaaggccaucggcaacugccccaucugggugaagaccccccugaagcuggccaacggcaccaaguacagaccccccgccaagcugcugaaggagagaggcuucuucggcgccaucgccggcuuccuggagggcggcugggagggcaugaucgccggcuggcacggcuacaccagccacggcgcccacggcguggccguggccgccgaccugaagagcacccaggaggccaucaacaagaucaccaagaaccugaacagccugagcgagcuggaggugaagaaccugcagagacugagcggcgccauggacgagcugcacaacgagauccuggagcuggacgagaagguggacgaccugagagccgacaccaucagcagccagaucgagcuggccgugcugcugagcaacgagggcaucaucaacagcgaggacgagcaccugcuggcccuggagagaaagcugaagaagaugcugggccccagcgccguggacaucggcaacggcugcuucgagaccaagcacaagugcaaccagaccugccuggacagaaucgccgccggcaccuucaacgccggcgaguucagccugcccaccuucgacagccugaacaucaccgccgccagccugaacgacgacggccuggacaaccacaccauccugcuguacuacagcaccgccgccagcagccuggccgugacccugaugaucgccaucuucaucguguacaugaucagcagagacaacgugagcugcagcaucugccuguga

SEQ ID NO: 186566 - RNA, 1758 nt, Artificial Sequence
  derived and/or modified CDS sequence (opt4) from hemagglutinin__InfluenzaB__ABN50745
augaaggccaucaucgugcugcugaugguggugaccagcaacgccgacagaaucugcaccggcaucaccagcagcaacagcccccacguggugaagaccgccacccagggcgaggugaacgugaccggcgugaucccccugaccaccacccccaccaagagccacuucgccaaccugaagggcaccaagaccagaggcaagcugugccccaagugccugaacugcaccgaccuggacguggcccugggcagacccaagugcaccggcaacauccccagcgccaaggugagcauccugcacgaggugagacccgugaccagcggcugcuuccccaucaugcacgacagaaccaagaucagacagcugcccaaccugcugagaggcuacgagcacaucagacugagcacccacaacgugaucaacgccgagaaggcccccggcggccccuacaagaucggcaccagcggcagcugccccaacaucaccaacggcaacggcuucuucgccaccauggccugggccgugcccaagaacgacaacaacaagaccgccaccaacagccugaccaucgaggugcccuacaucugcaccgagggcgaggaccagaucaccguguggggcuuccacagcgacaacgagacccagauggccaagcuguacggcgacagcaagccccagaaguucaccagcagcgccaacggcgugaccacccacuacgugagccagaucggcggcuuccccaaccagaccgaggacggcggccugccccagagcggcagaaucgugguggacuacauggugcagaagagcggcaagaccggcaccaucaccuaccagagaggcauccugcugccccagaagguguggugcgccagcggcagaagcaaggugaucaagggcagccugccccugaucggcgaggccgacugccugcacgagaaguacggcggccugaacaagagcaagcccuacuacaccggcgagcacgccaaggccaucggcaacugccccaucugggugaagaccccccugaagcuggccaacggcaccaaguacagaccccccgccaagcugcugaaggagagaggcuucuucggcgccaucgccggcuuccuggagggcggcugggagggcaugaucgccggcuggcacggcuacaccagccacggcgcccacggcguggccguggccgccgaccugaagagcacccaggaggccaucaacaagaucaccaagaaccugaacagccugagcgagcuggaggugaagaaccugcagagacugagcggcgccauggacgagcugcacaacgagauccuggagcuggacgagaagguggacgaccugagagccgacaccaucagcagccagaucgagcuggccgugcugcugagcaacgagggcaucaucaacagcgaggacgagcaccugcuggcccuggagagaaagcugaagaagaugcugggccccagcgccguggagaucggcaacggcugcuucgagaccaagcacaagugcaaccagaccugccuggacagaaucgccgccggcaccuucaacgccggcgaguucagccugcccaccuucgacagccugaacaucaccgccgccagccugaacgacgacggccuggacaaccacaccauccugcuguacuacagcaccgccgccagcagccuggccgugacccugaugaucgccaucuucgugguguacauggugagcagagacaacgugagcugcagcaucugccuguga

SEQ ID NO: 186567 - RNA, 1752 nt, Artificial Sequence
  derived and/or modified CDS sequence (opt4) from hemagglutinin__InfluenzaB__ABN51184
augaaggccaucaucgugcugcugaugguggugaccagcaacgccgacagaaucugcaccggcaucaccagcagcaacagcccccacguggugaagaccgccacccagggcgaggugaacgugaccggcgugaucccccugaccaccacccccaccaagagccacuucgccaaccugaagggcaccaagaccagaggcaagcugugccccaacugccugaacugcaccgaccuggacguggcccugggcagacccaugugcaucggcaccauccccagcgccaaggccagcauccugcacgaggugagacccgugaccagcggcugcuuccccaucaugcacgacagaaccaagaucagacagcugcccaaccugcugagaggcuacgagaacaucagacugagcacccacaacgugaucaacgccgagagagcccccggcggccccuacagacugggcaccagcggcagcugccccaacgugaccagcaagagcggcuucuucgccaccauggccugggccgugcccagagacaacaagaccgccaccaacccccugaccguggaggugcccuacaucugcaccaagggcgaggaccagaucaccguguggggcuuccacagcgacaacaagauccagaugaagaaccuguacggcgacagcaacccccagaaguucaccagcagcgccaacggcgugaccacccacuacgugagccagaucggcggcuuccccaaccagaccgaggacggcggccugccccagagcggcagaaucgugguggacuacauggugcagaagcccggcaagaccggcaccaucguguaccagagaggcgugcugcugccccagaagguguggugcgccagcggcagaagcaaggugaucaagggcagccugccccugaucggcgaggccgacugccugcacgagaaguacggcggccugaacaagagcaagcccuacuacaccggcgagcacgccaaggccaucggcaacugccccaucugggugaagaccccccugaagcuggccaacggcaccaaguacagaccccccgccaagcugcugaaggagagaggcuucuucggcgccaucgccggcuuccuggagggcggcugggagggcaugaucgccggcuggcacggcuacaccagccacggcgcccacggcguggccguggccgccgaccugaagagcacccaggaggccaucaacaagaucaccaagaaccugaacagccugagcgagcuggaggugaagaaccugcagagacugagcggcgccauggacgagcugcacaacgagauccuggagcuggacgagaagguggacgaccugagagccgacaccaucagcagccagaucgagcuggccgugcugcugagcaacgagggcaucaucaacagcgaggacgagcaccugcuggcccuggagagaaagcugaagaagaugcugggccccagcgccguggacaucggcaacggcugcuucgagaccaagcacaagugcaaccagaccugccuggacagaaucgccgccggcaccuucaacgccggcgaguucagccugcccaccuucgacagccugaacaucaccgccgccagccugaacgacgacggccuggacaaccacaccauccugcuguacuacagcaccgccgccagcagccuggccgugacccugaugaucgccaucuucaucguguacauggugagcagagacaacgugagcugcagcaucugccuguga

SEQ ID NO: 186568 - RNA, 1752 nt, Artificial Sequence
  derived and/or modified CDS sequence (opt4) from hemagglutinin__InfluenzaB__ABN51195
augaaggccaucaucgugcugcugaugguggugaccagcaacgccgacagaaucugcaccggcaucaccagcagcaacagcccccacguggugaagaccgccacccagggcgaggugaacgugaccggcgugaucccccugaccaccacccccaccaagagccacuucgccaaccugaagggcaccaagaccagaggcaagcugugccccaacugccugaacugcaccgaccuggacguggcccugggcagacccaugugcaucggcaccauccccagcgccaaggccagcauccugcacgaggugagacccgugaccagcggcugcuuccccaucaugcacgacagaaccaagaucagacagcugcccaaccugcugagaggcuacgagaacaucagacugagcacccacaacgugaucaacgccgagagagcccccggcggccccuacagacugggcaccagcggcagcugccccaacgugaccagcagaagcggcuucuucgccaccauggccugggccgugcccagagacaacaagaccgccaccaacccccugaccguggaggugcccuacaucugcaccaagggcgaggaccagaucaccguguggggcuuccacuucgacaacaagauccagaugaagaaccuguacggcgacagcaacccccagaaguucaccagcagcgccaacggcgugaccacccacuacgugagccagaucggcggcuuccccaaccagaccgaggacggcggccugccccagagcggcagaaucgugguggacuacauggugcagaagcccggcaagaccggcaccaucguguaccagagaggcgugcugcugccccagaagguguggugcgccagcggcagaagcaaggugaucaagggcagccugccccugaucggcgaggccgacugccugcacgagaaguacggcggccugaacaagagcaagcccuacuacaccggcgagcacgccaaggccaucggcaacugccccaucugggugaagaccccccugaagcuggccaacggcaccaaguacagaccccccgccaagcugcugaaggagagaggcuucuucggcgccaucgccggcuuccuggagggcggcugggagggcaugaucgccggcuggcacggcuacaccagccacggcgcccacggcguggccguggccgccgaccugaagagcacccaggaggccaucaacaagaucaccaagaaccugaacagccugagcgagcuggaggugaagaaccugcagagacugagcggcgccauggacgagcugcacaacgagauccuggagcuggacgagaagguggacgaccugagagccgacaccaucagcagccagaucgagcuggccgugcugcugagcaacgagggcaucaucaacagcgaggacgagcaccugcuggcccuggagagaaagcugaagaagaugcugggccccagcgccguggacaucggcaacggcugcuucgagaccaagcacaagugcaaccagaccugccuggacagaaucgccgccggcaccuucaacgccggcgaguucagccugcccaccuucgacagccugaacaucaccgccgccagccugaacgacgacggccuggacaaccacaccauccugcuguacuacagcaccgccgccagcagccuggccgugacccugaugaucgccaucuucaucguguacauggugagcagagacaacgugagcugcagcaucugccuguga

SEQ ID NO: 186569 - RNA, 1758 nt, Artificial Sequence
  derived and/or modified CDS sequence (opt4) from hemagglutinin__InfluenzaB__ABN58661
augaaggccaucaucgugcugcugaugguggugaccagcaacgccgacagaaucugcaccggcaucaccagcagcaacagcccccacguggugaagaccgccacccagggcgaggugaacgugaccggcgugaucccccugaccaccacccccaccaagagccacuucgccaaccugaagggcaccaagaccagaggcaagcugugccccaagugccugaacugcaccgaccuggacguggcccugggcagacccaagugcaccggcaccauccccagcgccaaggugagcauccugcacgaggugaagcccgugaccagcggcugcuuccccaucaugcacgacagaaccaagaucagacagcugcccaaccugcugagaggcuacgagcacaucagacugagcacccacaacgugaucaacgccgagaaggcccccggcggccccuacaagaucggcaccagcggcagcugccccaacgugaccaacggcaacggcuucuucgccaccauggccugggccgugcccaagaacgacaacaacaagaccgccaccaacagccugaccguggaggugcccuacaucugcaccgagggcgaggaccagaucaccguguggggcuuccacagcgacaacgagacccagauggccaagcuguacggcgacagcaagccccagaaguucaccagcagcgccaacggcgugaccacccacuacgugagccagaucggcggcuuccccaaccaggccgaggacggcggccugccccagagcggcagaaucgugguggacuacauggugcagaagagcggcaagaccggcaccaucaccuaccagagaggcauccugcugccccagaagguguggugcgccagcggcagaagcaaggugaucaagggcagccugccccugaucggcgaggccgacugccugcacgagaaguacggcggccugaacaagagcaagcccuacuacaccggcgagcacgccaaggccaucggcaacugccccaucugggugaagaccccccugaagcuggccaacggcaccaaguacagaccccccgccaagcugcugaaggagagaggcuucuucggcgccaucgccggcuuccuggagggcggcugggagggcaugaucgccggcuggcacggcuacaccagccacggcgcccacggcguggccguggccgccgaccugaagagcacccaggaggccaucaacaagaucaccaagaaccugaacagccugagcgagcuggaggugaagaaccugcagagacugagcggcgccauggacgagcugcacaacgagauccuggagcuggacgagaagguggacgaccugagagccgacaccaucagcagccagaucgagcuggccgugcugcugagcaacgagggcaucaucaacagcgaggacgagcaccugcuggcccuggagagaaagcugaagaagaugcugggccccagcgccguggagaucggcaacggcugcuucgagaccaagcacaagugcaaccagaccugccuggacagaaucgccgccggcaccuucaacgccggcgaguucagccugcccaccuucgacagccugaacaucaccgccgccagccugaacgacgacggccuggacaaccacaccauccugcuguacuacagcaccgccgccagcagccuggccgugacccugaugaucgccaucuucaucguguacauggugagcagagacaacgugagcugcagcaucugccuguga

SEQ ID NO: 186570 - RNA, 1755 nt, Artificial Sequence; identical to SEQ ID NO: 186458
  derived and/or modified CDS sequence (opt4) from hemagglutinin__InfluenzaB__ABN59445

SEQ ID NO: 186571 - RNA, 1755 nt, Artificial Sequence
  derived and/or modified CDS sequence (opt4) from hemagglutinin__InfluenzaB__ABO72377
augaaggccaucaucgugcugcugaugguggugaccagcaacgccgacagaaucugcaccggcaucaccagcagcaacagcccccacguggugaagaccgccacccagggcgaggugaacgugaccggcgccaucccccugaccaccacccccaccaagagccacuucgccaaccugaagggcaccaagaccagaggcaagcugugccccaccugcuucaacugcaccgaccuggacguggcccugggcagacccaugugcgugggcaucacccccagcgccaaggccagcauccugcacgaggugagacccgugaccagcggcugcuuccccaucaugcacgacagaaccaagaucagacagcugcccaaccugcugagaggcuacgagaagaucagacugagcacccagaacgugaucgacgccgagaaggcccccggcggccccuacagacugggcaccagcggcagcugccccaacgccaccagcaagagcggcuucuucgccaccauggccugggccgugcccagagacaacaacaagaccgccaccaacccccugaccguggaggugccccacaucugcaccaaggaggaggaccagaucaccguguggggcuuccacagcgacaacaagacccagaugaagaaccuguacggcgacagcaacccccagaaguucaccagcagcgccaacggcaucaccacccacuacgugagccagaucggcggcuuccccgaccagaccgaggacggcggccugccccagagcggcagaaucgugguggacuacauggugcagaagcccggcaagaccggcaccaucguguaccagagaggcauccugcugccccagaagguguggugcgccagcggcagaagcaaggugaucaagggcagccugccccugaucggcgaggccgacugccugcacgagaaguacggcggccugaacaagagcaagcccuacuacaccggcgagcacgccaaggccaucggcaacugccccaucugggugaagaccccccugaagcuggccaacggcaccaaguacagaccccccgccaagcugcugaaggagagaggcuucuucggcgccaucgccggcuuccuggagggcggcugggagggcaugaucgccggcuggcacggcuacaccagccacggcgcccacggcguggccguggccgccgaccugaagagcacccaggaggccaucaacaagaucaccaagaaccugaacagccugagcgagcuggaggugaagaaccugcagagacugagcggcgccauggacgagcugcacaacgagauccuggagcuggacgagaagguggacgaccugagagccgacaccaucagcagccagaucgagcuggccgugcugcugagcaacgagggcaucaucaacagcgaggacgagcaccugcuggcccuggagagaaagcugaagaagaugcugggccccagcgccguggacaucggcaacggcugcuucgagaccaagcacaagugcaaccagaccugccuggacagaaucgccgccggcaccuucaacgccggcgaguucagccugcccaccuucgacagccugaacaucaccgccgccagccugaacgacgacggccuggacaaccacaccauccugcuguacuacagcaccgccgccagcagccuggccgugacccugaugaucgccaucuucaucguguacaugaucagcagagacaacgugagcugcagcaucugccuguga

SEQ ID NO: 186572 - RNA, 1755 nt, Artificial Sequence; identical to SEQ ID NO: 186465
  derived and/or modified CDS sequence (opt4) from hemagglutinin__InfluenzaB__ABR15973

SEQ ID NO: 186573 - RNA, 1752 nt, Artificial Sequence
  derived and/or modified CDS sequence (opt4) from hemagglutinin__InfluenzaB__ABR15995
augaaggccaucaucgugcugcugaugguggugaccagcaacgccgacagaaucugcaccggcaucaccagcagcaacagcccccacguggugaagaccgccacccagggcgaggugaacgugaccggcgugaucccccugaccaccacccccaccaagagccacuucgccaaccugaagggcaccaagaccagaggcaagcugugccccaacugccugaacugcaccgaccuggacguggcccugggcagacccaugugcaucggcaucacccccagcgccaaggccagcauccugcacgaggugagacccgugaccagcggcugcuuccccaucaugcacgacagaaccaagaucagacagcugcccaaccugcugagaggcuacgagcacaucagacugagcacccacaacgugaucaacgccgagagagcccccggcggccccuacagacugggcaccagcggcagcugccccaacgugaccagcagaagcggcuucuucgccaccauggccugggccgugcccagagacaacaagaccgccaccaacccccugaccguggaggugcccuacaucugcaccaagggcgaggaccagaucaccguguggggcuuccacagcgacuacaagacccagaugaagaaccuguacggcgacagcaacccccagaaguucaccagcagcgccaacggcaucaccacccacuacgugagccagaucggcggcuuccccaaccagaccgaggacggcggccugccccagagcggcagaaucgugguggacuacauggugcagaagcccggcaagaccggcaccaucguguaccagagaggcgugcugcugccccagaagguguggugcgccagcggcagaagcaaggugaucaagggcagccugccccugaucggcgaggccgacugccugcacgagaaguacggcggccugaacaagagcaagcccuacuacaccggcgagcacgccaaggccaucggcaacugccccaucugggugaagaccccccugaagcuggccaacggcaccaaguacagaccccccgccaagcugcugaaggagagaggcuucuucggcgccaucgccggcuuccuggagggcggcugggagggcaugaucgccggcuggcacggcuacaccagccacggcgcccacggcguggccguggccgccgaccugaagagcacccaggaggccaucaacaagaucaccaagaaccugaacagccugagcgagcuggaggugaagaaccugcagagacugagcggcgccauggacgagcugcacaacgagauccuggagcuggacgagaagguggacgaccugagagccgacaccaucagcagccagaucgagcuggccgugcugcugagcaacgagggcaucaucaacagcgaggacgagcaccugcuggcccuggagagaaagcugaagaagaugcugggccccagcgccguggacaucggcaacggcugcuucgagaccaagcacaagugcaaccagaccugccuggacagaaucgccgccggcaccuucaacgccggcgaguucagccugcccaccuucgacagccugaacaucaccgccgccagccugaacgacgacggccuggacaaccacaccauccugcuguacuacagcaccgccgccagcagccuggccgugacccugaugaucgccaucuucaucguguacauggugagcagagacaacgugagcugcagcaucugccuguga

SEQ ID NO: 186574 - RNA, 1758 nt, Artificial Sequence
  derived and/or modified CDS sequence (opt4) from hemagglutinin__InfluenzaB__ABR16017
augaaggccaucaucgugcugcugaugguggugaccagcaacgccgacagaaucugcaccggcaucaccagcagcaacagcccccacguggugaagaccgccacccagggcgaggugaacgugaccggcgugaucccccugaccaccacccccaccaagagccacuucgccaaccugaagggcaccgagaccagaggcaagcugugccccaagugccugaacugcaccgaccuggacguggcccugggcagacccaagugcaccggcaacauccccagcgccagagugagcauccugcacgaggugagacccgugaccagcggcugcuuccccaucaugcacgacagaaccaagaucagacagcugcccaaccugcugagaggcuacgagcacaucagacugagcacccacaacgugaucaacgccgagaacgcccccggcggccccuacaagaucggcaccagcggcagcugccccaacgugaccaacggcaacggcuucuucgccaccauggccugggccgugcccaagaacgacaacaacaagaccgccaccaacagccugaccaucgaggugcccuacaucugcaccgagggcgaggaccagaucaccguguggggcuuccacagcgacaacgagacccagauggccaagcuguacggcgacagcaagccccagaaguucaccagcagcgccaacggcgugaccacccacuacgugagccagaucggcggcuuccccaaccagaccgaggacggcggccugccccagagcggcagaaucgugguggacuacauggugcagaagagcggcaagaccggcaccaucaccuaccagagaggcauccugcugccccagaagguguggugcgccagcggcagaagcaaggugaucaagggcagccugccccugaucggcgaggccgacugccugcacgagaaguacggcggccugaacaagagcaagcccuacuacaccggcgagcacgccaaggccaucggcaacugccccaucugggugaagaccccccugaagcuggccaacggcaccaaguacagaccccccgccaagcugcugaaggagagaggcuucuucggcgccaucgccggcuuccuggagggcggcugggagggcaugaucgccggcuggcacggcuacaccagccacggcgcccacggcguggccguggccgccgaccugaagagcacccaggaggccaucaacaagaucaccaagaaccugaacagccugagcgagcuggaggugaagaaccugcagagacugagcggcgccauggacgagcugcacaacgagauccuggagcuggacgagaagguggacgaccugagagccgacaccaucagcagccagaucgagcuggccgugcugcugagcaacgagggcaucaucaacagcgaggacgagcaccugcuggcccuggagagaaagcugaagaagaugcugggccccagcgccguggagaucggcaacggcugcuucgagaccaagcacaagugcaaccagaccugccuggacagaaucgccgccggcaccuucgacgccggcgaguucagccugcccaccuucgacagccugaacaucaccgccgccagccugaacgacgacggccuggacaaccacaccauccugcuguacuacagcaccgccgccagcagccuggccgugacccugaugaucgccaucuucgugguguacauggugagcagagacaacgugagcugcagcaucugccuguga

SEQ ID NO: 186575 - RNA, 1758 nt, Artificial Sequence; identical to SEQ ID NO: 186574
  derived and/or modified CDS sequence (opt4) from hemagglutinin__InfluenzaB__ACA64899

SEQ ID NO: 186576 - RNA, 1758 nt, Artificial Sequence
  derived and/or modified CDS sequence (opt4) from hemagglutinin__InfluenzaB__ACA64932
augaaggccaucaucgugcugcugaugguggugaccagcaacgccgacagaaucugcaccggcaucaccagcagcaacagcccccacguggugaagaccgccacccagggcgaggugaacgugaccggcgugaucccccugaccaccacccccaccaagagccacuucagcaaccugaagggcaccgagaccagaggcaagcugugccccaagugccugaacugcaccgaccuggacguggcccugggcagacccaagugcaccggcaacauccccagcgccagagugagcauccugcacgaggugagacccgugaccagcggcugcuuccccaucaugcacgacagaaccaagaucagacagcugcccaaccugcugagaggcuacgagcacaucagacugagcacccacaacgugaucaacgccgagaacgcccccggcggccccuacaagaucggcaccagcggcagcugccccaacgugaccaacggcaacggcuucuucgccaccauggccugggccgugcccaagaacgacaucaacaagaccgccaccaacagccugaccaucgaggugcccuacaucugcaccgagggcgaggaccagaucaccguguggggcuuccacagcgacaacgagacccagauggccaagcuguacggcgacagcaagccccagaaguucaccagcagcgccaacggcgugaccacccacuacgugagccagaucggcggcuuccccaaccagaccgaggacggcggccugccccagagcggcagaaucgugguggacuacauggugcagaagagcggcaagaccggcaccaucaccuaccagagaggcauccugcugccccagaagguguggugcgccagcggcagaagcaaggugaucaagggcagccugccccugaucggcgaggccgacugccugcacgagaaguacggcggccugaacaagagcaagcccuacuacaccggcgagcacgccaaggccaucggcaacugccccaucugggugaagaccccccugaagcuggccaacggcaccaaguacagaccccccgccaagcugcugaaggagagaggcuucuucggcgccaucgccggcuuccuggagggcggcugggagggcaugaucgccggcuggcacggcuacaccagccacggcgcccacggcguggccguggccgccgaccugaagagcacccaggaggccaucaacaagaucaccaagaaccugaacagccugagcgagcuggaggugaagaaccugcagagacugagcggcgccauggacgagcugcacaacgagauccuggagcuggacgagaagguggacgaccugagagccgacaccaucagcagccagaucgagcuggccgugcugcugagcaacgagggcaucaucaacagcgaggacgagcaccugcuggcccuggagagaaagcugaagaagaugcugggccccagcgccguggagaucggcaacggcugcuucgagaccaagcacaagugcaaccagaccugccuggacaagaucgccgccggcaccuucgacgccggcgaguucagccugcccaccuucgacagccugaacaucaccgccgccagccugaacgacgacggccuggacaaccacaccauccugcuguacuacagcaccgccgccagcagccuggccgugacccugaugaucgccaucuucgugguguacauggugagcagagacaacgugagcugcagcaucugccuguga

SEQ ID NO: 186577 - RNA, 1758 nt, Artificial Sequence; identical to SEQ ID NO: 186574
  derived and/or modified CDS sequence (opt4) from hemagglutinin__InfluenzaB__ACA64943

SEQ ID NO: 186578 - RNA, 1758 nt, Artificial Sequence
  derived and/or modified CDS sequence (opt4) from hemagglutinin__InfluenzaB__ACA64954
augaaggccaucaucgugcugcugaugguggugaccagcaacgccgacagaaucugcaccggcaucaccagcagcaacagcccccacguggugaagaccgccacccagggcgaggugaacgugaccggcgugaucccccugaccaccacccccaccaagagccacuucgccaaccugaagggcaccgagaccagaggcaagcugugccccaagugccugaacugcaccgaccuggacguggcccugggcagacccaagugcaccggcaacauccccagcgccagagugagcauccugcacgaggugagacccgugaccagcggcugcuuccccaucaugcacgacagaaccaagaucagacagcugcccaaccugcugagaggcuacgagcacaucagacugagcacccacaacgugaucaacgccgagaacgcccccggcggccccuacaagaucggcaccagcggcagcugccccaacgugaccaacggcaacggcuucuucgccaccauggccugggccgugcccaagaacgacaacaacaagaccgccaccagcagccugaccaucgaggugcccuacaucugcaccgagggcgaggaccagaucaccguguggggcuuccacagcgacaacgagacccagauggccaagcuguacggcgacagcaagccccagaaguucaccagcagcgccaacggcgugaccacccacuacgugagccagaucggcggcuuccccaaccagaccgaggacggcggccugccccagagcggcagaaucgugguggacuacauggugcagaagagcggcaagaccggcaccaucaccuaccagagaggcauccugcugccccagaagguguggugcgccagcggcagaagcaaggugaucaagggcagccugccccugaucggcgaggccgacugccugcacgagaaguacggcggccugaacaagagcaagcccuacuacaccggcgagcacgccaaggccaucggcaacugccccaucugggugaagaccccccugaagcuggccaacggcaccaaguacagaccccccgccaagcugcugaaggagagaggcuucuucggcgccaucgccggcuuccuggagggcggcugggagggcaugaucgccggcuggcacggcuacaccagccacggcgcccacggcguggccguggccgccgaccugaagagcacccaggaggccaucaacaagaucaccaagaaccugaacagccugagcgagcuggaggugaagaaccugcagagacugagcggcgccauggacgagcugcacaacgagauccuggagcuggacgagaagguggacgaccugagagccgacaccaucagcagccagaucgagcuggccgugcugcugagcaacgagggcaucaucaacagcgaggacgagcaccugcuggcccuggagagaaagcugaagaagaugcugggccccagcgccguggagaucggcaacggcugcuucgagaccaagcacaagugcaaccagaccugccuggacagaaucgccgccggcaccuucgacgccggcgaguucagccugcccaccuucgacagccugaacaucaccgccgccagccugaacgacgacggccuggacaaccacaccauccugcuguacuacagcaccgccgccagcagccuggccgugacccugaugaucgccaucuucgugguguacauggugagcagagacaacgugagcugcagcaucugccuguga

SEQ ID NO: 186579 - RNA, 1758 nt, Artificial Sequence; identical to SEQ ID NO: 186574
  derived and/or modified CDS sequence (opt4) from hemagglutinin__InfluenzaB__ACA64965

SEQ ID NO: 186580 - RNA, 1758 nt, Artificial Sequence
  derived and/or modified CDS sequence (opt4) from hemagglutinin__InfluenzaB__ACA64998
augaaggccaucaucgugcugcugaugguggugaccagcaacgccgacagaaucugcaccggcaucaccagcagcaacagcccccacguggugaagaccgccacccagggcgaggugaacgugaccggcgugaucccccugaccaccacccccaccaagagccacuucgccaaccugaagggcaccgagaccagaggcaagcugugccccaagugcuucaacugcaccgaccuggacguggcccugggcagacccaagugcaccggcaacauccccagcgccagagugagcauccugcacgaggugagacccgugaccagcggcugcuuccccaucaugcacgacagaaccaagaucagacagcugcccaaccugcugagaggcuacgagcacaucagacugagcacccacaacgugaucaacgccgagaacgcccccggcggccccuacaagaucggcaccagcggcagcugccccaacgugaccaacggcaacggcuucuucgccaccauggccugggccgugcccaagaacgacaacaacaagaccgccaccaacagccugaccaucgaggugcccuacaucugcaccgagggcgaggaccagaucaccguguggggcuuccacagcgacaacgagacccagauggccaagcuguacggcgacagcaagccccagaaguucaccagcagcgccaacggcgugaccacccacuacgugagccagaucggcggcuuccccaaccagaccgaggacggcggccugccccagagcggcagaaucgugguggacuacauggugcagaagagcggcaagaccggcaccaucaccuaccagagaggcauccugcugccccagaagguguggugcgccagcggcagaagcaaggugaucaagggcagccugccccugaucggcgaggccgacugccugcacgagaaguacggcggccugaacaagagcaagcccuacuacaccggcgagcacgccaaggccaucggcaacugccccaucugggugaagaccccccugaagcuggccaacggcaccaaguacagaccccccgccaagcugcugaaggagagaggcuucuucggcgccaucgccggcuuccuggagggcggcugggagggcaugaucgccggcuggcacggcuacaccagccacggcgcccacggcguggccguggccgccgaccugaagagcacccaggaggccaucaacaagaucaccaagaaccugaacagccugagcgagcuggaggugaagaaccugcagagacugagcggcgccauggacgagcugcacaacgagauccuggagcuggacgagaagguggacgaccugagagccgacaccaucagcagccagaucgagcuggccgugcugcugagcaacgagggcaucaucaacagcgaggacgagcaccugcuggcccuggagagaaagcugaagaagaugcugggccccagcgccguggagaucggcaacggcugcuucgagaccaagcacaagugcaaccagaccugccuggacagaaucgccgccggcaccuucgacgccggcgaguucagccugcccaccuucgacagccugaacaucaccgccgccagccugaacgacgacggccuggacaaccacaccauccugcuguacuacagcaccgccgccagcagccuggccgugacccugaugaucgccaucuucgugguguacauggugagcagagacaacgugagcugcagcaucugccuguga

SEQ ID NO: 186581 - RNA, 1758 nt, Artificial Sequence
  derived and/or modified CDS sequence (opt4) from hemagglutinin__InfluenzaB__ACA65020
augaaggccaucaucgugcugcugaugguggugaccagcaacgccgacagaaucugcaccggcaucaccagcagcaacagcccccacguggugaagaccgccacccagggcgaggugaacgugaccggcgugaucccccugaccaccacccccaccaagagccacuucagcaaccugaagggcaccgagaccagaggcaagcugugccccaagugccugaacugcaccgaccuggacguggcccugggcagacccaagugcaccggcaacauccccagcgccagagugagcauccugcacgaggugagacccgugaccagcggcugcuuccccaucaugcacgacagaaccaagaucagacagcugcccaaccugcugagaggcuacgagcacaucagacugagcacccacaacgugaucaacgccgagaacgcccccggcggccccuacaagaucggcaccagcggcagcugccccaacgugaccaacggcaacggcuucuucgccaccauggccugggccgugcccaagaacgacaacaacaagaccgccaccaacagccugaccaucgaggugcccuacaucugcaccgagggcgaggaccagaucaccaucuggggcuuccacagcgacaacgagacccagauggccaagcuguacggcgacagcaagccccagaaguucaccagcagcgccaacggcgugaccacccacuacgugagccagaucggcggcuuccccaaccagaccgaggacggcggccugccccagagcggcagaaucgugguggacuacauggugcagaagagcggcaagaccggcaccaucaccuaccagagaggcauccugcugccccagaagguguggugcgccagcggcagaagcaaggugaucaagggcagccugccccugaucggcgaggccgacugccugcacgagaaguacggcggccugaacaagagcaagcccuacuacaccggcgagcacgccaaggccaucggcaacugccccaucugggugaagaccccccugaagcuggccaacggcaccaaguacagaccccccgccaagcugcugaaggagagaggcuucuucggcgccaucgccggcuuccuggagggcggcugggagggcaugaucgccggcuggcacggcuacaccagccacggcgcccacggcguggccguggccgccgaccugaagagcacccaggaggccaucaacaagaucaccaagaaccugaacagccugagcgagcuggaggugaagaaccugcagagacugagcggcgccauggacgagcugcacaacgagauccuggagcuggacgagaagguggacgaccugagagccgacaccaucagcagccagaucgagcuggccgugcugcugagcaacgagggcaucaucaacagcgaggacgagcaccugcuggcccuggagagaaagcugaagaagaugcugggccccagcgccguggaggugggcaacggcugcuucgagaccaagcacaagugcaaccagaccugccuggacagaaucgccgccggcaccuucgacgccggcgaguucagccugcccaccuucgacagccugaacaucaccgccgccagccugaacgacgacggccuggacaaccacaccauccugcuguacuacagcaccgccgccagcagccuggccgugacccugaugaucgccaucuucgugguguacauggugagcagagacaacgugagcugcagcaucugccuguga

SEQ ID NO: 186582 - RNA, 1758 nt, Artificial Sequence; identical to SEQ ID NO: 186580
  derived and/or modified CDS sequence (opt4) from hemagglutinin__InfluenzaB__ACA65031

SEQ ID NO: 186583 - RNA, 1758 nt, Artificial Sequence
  derived and/or modified CDS sequence (opt4) from hemagglutinin__InfluenzaB__ACA65042
augaaggccaucaucgugcugcugaugguggugaccagcaacgccgacagaaucugcaccggcaucaccagcagcaacagcccccacguggugaagaccgccacccagggcgaggugaacgugaccggcgugaucccccugaccaccacccccaccaagagccacuucagcaaccugaagggcaccgagaccagaggcaagcugugccccaagugccugaacugcaccgaccuggacguggcccugggcagacccaagugcaccggcaacauccccagcgccagagugagcauccugcacgaggugagacccgugaccagcggcugcuuccccaucaugcacgacagaaccaagaucagacagcugcccaaccugcugagaggcuacgagcacaucagacugagcacccacaacgugaucaacgccgagaacgcccccggcggccccuacaagaucggcaccagcggcagcugccccaacgugaccaacggcaacggcuucuucgccaccauggccugggccgugcccaagaacgacaacaacaagaccgccaccaacagccugaccaucgaggugcccuacaucugcaccgagggcgaggaccagaucaccguguggggcuuccacagcgacaacgagacccagauggccaagcuguacggcgacagcaagccccagaaguucaccagcagcgccaacggcgugaccacccacuacgugagccagaucggcggcuuccccaaccagaccgaggacggcggccugccccagagcggcagaaucaucguggacuacauggugcagaagagcggcaagaccggcaccaucaccuaccagagaggcauccugcugccccagaagguguggugcgccagcggcagaagcaaggugaucaagggcagccugccccugaucggcgaggccgacugccugcacgagaaguacggcggccugaacaagagcaagcccuacuacaccggcgagcacgccaaggccaucggcaacugccccaucugggugaagaccccccugaagcuggccaacggcaccaaguacagaccccccgccaagcugcugaaggagagaggcuucuucggcgccaucgccggcuuccuggagggcggcugggagggcaugaucgccggcuggcacggcuacaccagccacggcgcccacggcguggccguggccgccgaccugaagagcacccaggaggccaucaacaagaucaccaagaaccugaacagccugagcgagcuggaggugaagaaccugcagagacugagcggcgccauggacgagcugcacaacgagauccuggagcuggacgagaagguggacgaccugagagccgacaccaucagcagccagaucgagcuggccgugcugcugagcaacgagggcaucaucaacagcgaggacgagcaccugcuggcccuggagagaaagcugaagaagaugcugggccccagcgccguggagaucggcaacggcugcuucgagaccaagcacaagugcaaccagaccugccuggacagaaucgccgccggcaccuucgacgccggcgaguucagccugcccaccuucgacagccugaacaucaccgccgccagccugaacgacgacggccuggacaaccacaccauccugcuguacuacagcaccgccgccagcagccuggccgugacccugaugaucgccaucuucgugguguacauggugagcagagacaacgugagcugcagcaucugccuguga

SEQ ID NO: 186584 - RNA, 1758 nt, Artificial Sequence
  derived and/or modified CDS sequence (opt4) from hemagglutinin__InfluenzaB__ACA65053
augaaggccaucaucgugcugcugaugguggugaccagcaacgccgacagaaucugcaccggcaucaccagcagcaacagcccccacguggugaagaccgccacccagggcgaggugaacgugaccggcgugaucccccugaccaccacccccaccaagagccacuucgccaaccugaagggcaccgagaccagaggcaagcugugccccaagugccugaacugcaccgaccuggacguggcccugggcagacccaagugcaccggcaacauccccagcgccagagugagcauccugcacgaggugagacccgugaccagcggcugcuuccccaucaugcacgacagaaccaagaucagacagcugcccaaccugcugagaggcuacgagcacaucagacugagcaccagaaacgugaucaacgccgagaacgcccccggcggccccuacaagaucggcaccagcggcagcugccccaacgugaccaacggcaacggcuucuucgccaccauggccugggccgugcccaagaacgacaacaacaagaccgccaccaacagccugaccaucgaggugcccuacaucugcaccgagggcgaggaccagaucaccguguggggcuuccacagcgacaacgagacccagauggccaagcuguacggcgacagcaagccccagaaguucaccagcagcgccaacggcgugaccacccacuacgugagccagaucggcggcuuccccaaccagaccgaggacggcggccugccccagagcggcagaaucgugguggacuacauggugcagaagagcggcaagaccggcaccaucaccuaccagagaggcauccugcugccccagaagguguggugcgccagcggcagaagcaaggugaucaagggcagccugccccugaucggcgaggccgacugccugcacgagaaguacggcggccugaacaagagcaagcccuacuacaccggcgagcacgccaaggccaucggcaacugccccaucugggugaagaccccccugaagcuggccaacggcaccaaguacagaccccccgccaagcugcugaaggagagaggcuucuucggcgccaucgccggcuuccuggagggcggcugggagggcaugaucgccggcuggcacggcuacaccagccacggcgcccacggcguggccguggccgccgaccugaagagcacccaggaggccaucaacaagaucaccaagaaccugaacagccugagcgagcuggaggugaagaaccugcagagacugagcggcgccauggacgagcugcacaacgagauccuggagcuggacgagaagguggacgaccugagagccgacaccaucagcagccagaucgagcuggccgugcugcugagcaacgagggcaucaucaacagcgaggacgagcaccugcuggcccuggagagaaagcugaagaagaugcugggccccagcgccguggagaucggcaacggcugcuucgagaccaagcacaagugcaaccagaccugccuggacagaaucgccgccggcaccuucgacgccggcgaguucagccugcccaccuucgacagccugaacaucaccgccgccagccugaacgacgacggccuggacaaccacaccauccugcuguacuacagcaccgccgccagcagccuggccgugacccugaugaucgccaucuucgugguguacauggugagcagagacaacgugagcugcagcaucugccuguga

SEQ ID NO: 186585 - RNA, 1758 nt, Artificial Sequence
  derived and/or modified CDS sequence (opt4) from hemagglutinin__InfluenzaB__ACA65075
augaaggccaucaucgugcugcugaugguggugaccagcaacgccgacagaaucugcaccggcaucaccagcagcaacagcccccacguggugaagaccgccacccagggcgaggugaacgugaccggcgugaucccccugaccaccacccccaccaagagccacuucgccaaccugaagggcaccgagaccagaggcaagcugugccccaagugccugaacugcaccgaccuggacguggcccugggcagacccaagugcaccggcaacauccccagcgccagagugagcauccugcacgaggugagacccgugaccagcggcugcuuccccaucaugcacgacagaaccaagaucagacagcugcccaaccugcugagaggcuacgagcacaucagacugagcacccacaacgugaucaacgccgagaacgcccccggcggccccuacaagaucggcaccagcggcagcugccccaacaucaccaacggcaacggcuucuucgccaccauggccugggccgugcccaagaacgacaacaacaagaccgccaccaacagccugaccaucgaggugcccuacaucugcaccgagggcgaggaccagaucaccguguggggcuuccacagcgacaacgagacccagauggccaagcuguacggcgacagcaagccccagaaguucaccagcagcgccaacggcgugaccacccacuacgugagccagaucggcggcuuccccaaccagaccgaggacggcggccugccccagagcggcagaaucgugguggacuacauggugcagaagagcggcaagaccggcaccaucaccuaccagagaggcauccugcugccccagaagguguggugcgccagcggcagaagcaaggugaucaagggcagccugccccugaucggcgaggccgacugccugcacgagaaguacggcggccugaacaagagcaagcccuacuacaccggcgagcacgccaaggccaucggcaacugccccaucugggugaagaccccccugacccuggccaacggcaccaaguacagaccccccgccaagcugcugaaggagagaggcuucuucggcgccaucgccggcuuccuggagggcggcugggagggcaugaucgccggcuggcacggcuacaccagccacggcgcccacggcguggccguggccgccgaccugaagagcacccaggaggccaucaacaagaucaccaagaaccugaacagccugagcgagcuggaggugaagaaccugcagagacugagcggcgccauggacgagcugcacaacgagauccuggagcuggacgagaagguggacgaccugagagccgacaccaucagcagccagaucgagcuggccgugcugcugagcaacgagggcaucaucaacagcgaggacgagcaccugcuggcccuggagagaaagcugaagaagaugcugggccccagcgccguggagaucggcaacggcugcuucgagaccaagcacaagugcaaccagaccugccuggacagaaucgccgccggcaccuucgacgccggcgaguucagccugcccaccuucgacagccugaacaucaccgccgccagccugaacgacgacggccuggacaaccacaccauccugcuguacuacagcaccgccgccagcagccuggccgugacccugaugaucgccaucuucgugguguacauggugagcagagacaacgugagcugcagcaucugccuguga

SEQ ID NO: 186586 - RNA, 1758 nt, Artificial Sequence; identical to SEQ ID NO: 186574
  derived and/or modified CDS sequence (opt4) from hemagglutinin__InfluenzaB__ACA65086

SEQ ID NO: 186587 - RNA, 1758 nt, Artificial Sequence; identical to SEQ ID NO: 186574
  derived and/or modified CDS sequence (opt4) from hemagglutinin__InfluenzaB__ACA65097

SEQ ID NO: 186588 - RNA, 1758 nt, Artificial Sequence; identical to SEQ ID NO: 186574
  derived and/or modified CDS sequence (opt4) from hemagglutinin__InfluenzaB__ACA96552

SEQ ID NO: 186589 - RNA, 1758 nt, Artificial Sequence; identical to SEQ ID NO: 186574
  derived and/or modified CDS sequence (opt4) from hemagglutinin__InfluenzaB__ACA96563

SEQ ID NO: 186590 - RNA, 1758 nt, Artificial Sequence; identical to SEQ ID NO: 186574
  derived and/or modified CDS sequence (opt4) from hemagglutinin__InfluenzaB__ACA96574

SEQ ID NO: 186591 - RNA, 1758 nt, Artificial Sequence; identical to SEQ ID NO: 186574
  derived and/or modified CDS sequence (opt4) from hemagglutinin__InfluenzaB__ACA96585

SEQ ID NO: 186592 - RNA, 1758 nt, Artificial Sequence
  derived and/or modified CDS sequence (opt4) from hemagglutinin__InfluenzaB__ACA96596
augaaggccaucaucgugcugcugaugguggugaccagcaacgccgacagaaucugcaccggcaucaccagcagcaacagcccccacguggugaagaccgccacccagggcgaggugaacgugaccggcgugaucccccugaccaccacccccaccaagagccacuucgccaaccugaagggcaccgagaccagaggcaagcugugccccaagugccugaacugcaccgaccuggacguggcccugggcagacccaagugcaccggcaacauccccagcgccagagugagcauccugcacgaggugagacccgugaccagcggcugcuuccccaucaugcacgacagaaccaagaucagacagcugcccaaccugcugagaggcuacgagcacaucagacugagcacccacaacgugaucaacgccgagaacgcccccggcggccccuacaagaucggcaccagcggcagcugccccaacgugaccaacggcaacggcuucuucgccaccauggccugggccgugcccaagaacgacaacaacaagaccgccaccaacagccugaccaucgaggugcccuacaucugcaccgagggcgaggaccagaucaccguguggggcuuccacagcgacaacgagacccagauggccaagcuguacggcgacagcaagccccagaaguucaccagcagcgccaacggcgugaccacccacuacgugagccagaucggcggcuuccccaaccagaccgaggacggcggccugccccagagcggcagaaucgugguggacuacauggugcagaagagcggcaagaccggcaccaucaccuaccagagaggcauccugcugccccagaagguguggugcgccagcggcagaagcaaggugaucaagggcagccugccccugaucggcgaggccgacugccugcacgagaaguacggcggccugaacaagagcaagcccuacuacaccggcgagcacgccaaggccaucggcaacugccccaucugggugaagaccccccugaagcuggccaacggcaccaaguacagaccccccgccaagcugcugaaggagagaggcuucuucggcgccaucgccggcuuccuggagggcggcugggagggcaugaucgccggcuggcacggcuacaccagccacggcgcccacggcguggccguggccgccgaccugaagagcacccaggaggccaucgacaagaucaccaagaaccugaacagccugagcgagcuggaggugaagaaccugcagagacugagcggcgccauggacgagcugcacaacgagauccuggagcuggacgagaagguggacgaccugagagccgacaccaucagcagccagaucgagcuggccgugcugcugagcaacgagggcaucaucaacagcgaggacgagcaccugcuggcccuggagagaaagcugaagaagaugcugggccccagcgccguggagaucggcaacggcugcuucgagaccaagcacaagugcaaccagaccugccuggacagaaucgccgccggcaccuucgacgccggcgaguucagccugcccaccuucgacagccugaacaucaccgccgccagccugaacgacgacggccuggacaaccacaccauccugcuguacuacagcaccgccgccagcagccuggccgugacccugaugaucgccaucuucgugguguacauggugagcagagacaacgugagcugcagcaucugccuguga

SEQ ID NO: 186593 - RNA, 1758 nt, Artificial Sequence; identical to SEQ ID NO: 186574
  derived and/or modified CDS sequence (opt4) from hemagglutinin__InfluenzaB__ACA96607

SEQ ID NO: 186594 - RNA, 1758 nt, Artificial Sequence
  derived and/or modified CDS sequence (opt4) from hemagglutinin__InfluenzaB__ACA96618
augaaggccaucaucgugcugcugaugguggugaccagcaacgccgacagaaucugcaccggcaucaccagcagcaacagcccccacguggugaagaccgccacccagggcgaggugaacgugaccggcgugaucccccugaccaccacccccaccaagagccacuucgccaaccugaagggcaccgagaccagaggcaagcugugccccaagugccugaacugcaccgaccuggacguggcccugggcagacccaagugcaccggcaacauccccagcgccagagugagcauccugcacgaggugagacccgugaccagcggcugcuuccccaucaugcacgacagaaccaagaucagacagcugcccaaccugcugagaggcuacgagcacaucagacugagcacccacaacgugaucaacgccgagaacgcccccggcggccccuacaagaucggcaccagcggcagcugccccaacgugaccaacggcaacggcuucuucgccaccauggccugggccgugcccaagaacgacaacaacaagaccgccaccaacagccugaccaucgaggugcccuacaucugcaccgagggcgaggaccagaucaccguguggggcuuccacagcgacaacgagacccagauggccaagcuguacggcgacagcaagccccagaaguucaccagcagcgccaacggcgugaccacccacuacgugagccagaucggcggcuuccccaaccagaccgaggacggcggccugccccagagcggcagaaucgugguggacuacauggugcagaagagcggcaagaccggcaccaucaccuaccagagaggcauccugcugccccagaagguguggugcgccagcggcagaagcaaggugaucaagggcagccugccccugaucggcgaggccgacugccugcacgagaaguacggcggccugaacaagagcaagcccuacuacaccggcgagcacgccaaggccaucggcaacugccccaucugggugaagaccccccugaagcuggccaacggcaccaaguacagaccccccgccaagcugcugaaggagagaggcuucuucggcgccaucgccggcuuccuggagggcggcugggagggcaugaucgccggcuggcacggcuacaccagccacggcgcccacggcguggccguggccgccgaccugaagagcacccaggaggccaucaacaagaucaccaagaaccugaacagccugagcgagcuggaggugaagaaccugcagagacugagcggcgccauggacgagcugcacaacgagauccuggagcuggacgagaagguggacgaccugagagccgacaccaucagcagccagaucgagcuggccgugcugcugagcaacgagggcaucaucaacagcgaggacgagcaccugcuggcccuggagagaaagcugaagaagaugcugggccccagcgccguggagaucggcaacggcugcuucgagaccaagcacaagugcaaccagaccugccuggacagaaucgccgccggcaccuucgacgccggcgaguucuuccugcccaccuucgacagccugaacaucaccgccgccagccugaacgacgacggccuggacaaccacaccauccugcuguacuacagcaccgccgccagcagccuggccgugacccugaugaucgccaucuucgugguguacauggugagcagagacaacgugagcugcagcaucugccuguga

SEQ ID NO: 186595 - RNA, 1758 nt, Artificial Sequence; identical to SEQ ID NO: 186574
  derived and/or modified CDS sequence (opt4) from hemagglutinin__InfluenzaB__ACA96629

SEQ ID NO: 186596 - RNA, 1758 nt, Artificial Sequence; identical to SEQ ID NO: 186580
  derived and/or modified CDS sequence (opt4) from hemagglutinin__InfluenzaB__ACA96640

SEQ ID NO: 186597 - RNA, 1755 nt, Artificial Sequence
  derived and/or modified CDS sequence (opt4) from hemagglutinin__InfluenzaB__ACD56566
augaaggccaucaucgugcugcugaugguggugaccagcaacgccgacagaaucugcaccggcaucaccagcagcaacagcccccacguggugaagaccgccacccagggcgaggugaacgugaccggcgugaucccccugaccaccacccccaccaagagcuacuucgccaaccugaagggcaccagaaccagaggcaagcugugccccgacugccugaacugcaccgaccuggacguggcccugggcagacccaugugcgugggcaccacccccagcgccaaggccagcauccugcacgaggugagacccgugaccagcggcugcuuccccaucaugcacgacagaaccaagaucagacagcugcccaaccugcugagaggcuacgagaacaucagacugagcacccagaacgugguggacgccgagaacgcccccggcggccccuacagacugggcaccagcggcagcugccccaacgccaccagcaagagcggcuucuucgccaccauggccugggccgugcccaaggacaacaacaagaacgccaccaacccccugaccguggaggugcccuacgugugcaccgagggcgaggaccagaucaccguguggggcuuccacagcgacaacaagacccagaugaagaaccuguacggcgacagcaacccccagaaguucaccagcagcgccaacggcgugaccacccacuacgugagccagaucggcggcuuccccgcccagaccgaggacggcggccugccccagagcggcagaaucgugguggacuacauggugcagaagcccagaaagaccggcaccaucguguaccagagaggcgugcugcugccccagaagguguggugcgccagcggcagaagcaaggugaucaagggcagccugccccugaucggcgaggccgacugccugcacgagaaguacggcggccugaacaagagcaagcccuacuacaccggcgagcacgccaaggccaucggcaacugccccaucugggugaagaccccccugaagcuggccaacggcaccaaguacagaccccccgccaagcugcugaaggagagaggcuucuucggcgccaucgccggcuuccuggagggcggcugggagggcaugaucgccggcuggcacggcuacaccagccacggcgcccacggcguggccguggccgccgaccugaagagcacccaggaggccaucaacaagaucaccaagaaccugaacagccugagcgagcuggaggugaagaaccugcagagacugagcggcgccauggacgagcugcacaacgagauccuggagcuggacgagaagguggacgaccugagagccgacaccaucagcagccagaucgagcuggccgugcugcugagcaacgagggcaucaucaacagcgaggacgagcaccugcuggcccuggagagaaagcugaagaagaugcugggccccagcgccguggacaucggcaacggcugcuucgagaccaagcacaagugcaaccagaccugccuggacaagaucgccgccggcaccuucaacgccggcgaguucagccugcccaccuucgacagccugaacaucaccgccgccagccugaacgacgacggccuggacaaccacaccauccugcuguacuacagcaccgccgccagcagccuggccgugacccugaugcuggccaucuucaucguguacauggugagcagagacaacgugagcugcagcaucugccuguga

SEQ ID NO: 186598 - RNA, 1755 nt, Artificial Sequence
  derived and/or modified CDS sequence (opt4) from hemagglutinin__InfluenzaB__ACD56577
augaaggccaucaucgugcugcugaugguggugaccagcaacgccgacagaaucugcaccggcaucaccagcagcaacagcccccacguggugaagaccgccacccagggcgaggugaacgugaccggcgugaucccccugaccaccacccccaccaagagcuacuucgccaaccugaagggcaccagaaccagaggcaagcugugccccgacugccugaacugcaccgaccuggacguggcccugggcagacccaugugcgugggcaccacccccagcgccaaggccagcauccugcacgaggugagacccgugaccagcggcugcuuccccaucaugcacgacagaaccaagaucagacagcugcccaaccugcugagaggcuacgagaacaucagacugagcacccagaacgugaucgacgccgagaacgcccccggcggccccuacagacugggcaccagcggcagcugccccaacgccaccagcaagagcggcuucuucgccaccauggccugggccgugcccaaggacaacaacaagaacgccaccaacccccugaccguggaggugcccuacaucugcaccgagggcgaggaccagaucaccguguggggcuuccacagcgacaacaaggcccagaugaagaaccuguacggcgacagcaacccccagaaguucaccagcagcgccaacggcgugaccacccacuacgugagccagaucggcggcuuccccgcccagaccgaggacggcggccugccccagagcggcagaaucgugguggacuacauggugcagaagcccagaaagaccggcaccaucguguaccagagaggcgugcugcugccccagaagguguggugcgccagcggcagaagcaaggugaucaagggcagccugccccugaucggcgaggccgacugccugcacgagaaguacggcggccugaacaagagcaagcccuacuacaccggcgagcacgccaaggccaucggcaacugccccaucugggugaagaccccccugaagcuggccaacggcaccaaguacagaccccccgccaagcugcugaaggagagaggcuucuucggcgccaucgccggcuuccuggagggcggcugggagggcaugaucgccggcuggcacggcuacaccagccacggcgcccacggcguggccguggccgccgaccugaagagcacccaggaggccaucaacaagaucaccaagaaccugaacagccugagcgagcuggaggugaagaaccugcagagacugagcggcgccauggacgagcugcacaacgagauccuggagcuggacgagaagguggacgaccugagagccgacaccaucagcagccagaucgagcuggccgugcugcugagcaacgagggcaucaucaacagcgaggacgagcaccugcuggcccuggagagaaagcugaagaagaugcugggccccagcgccguggacaucggcaacggcugcuucgagaccaagcacaagugcaaccagaccugccuggacagaaucgccgccggcaccuucaacgccggcgaguucagccugcccaccuucgacagccugaacaucaccgccgccagccugaacgacgacggccuggacaaccacaccauccugcuguacuacagcaccgccgccagcagccuggccgugacccugaugcuggccaucuucaucguguacauggugagcagagacaacgugagcugcagcaucugccuguga

SEQ ID NO: 186599 - RNA, 1758 nt, Artificial Sequence; identical to SEQ ID NO: 186580
  derived and/or modified CDS sequence (opt4) from hemagglutinin__InfluenzaB__ACF41658

SEQ ID NO: 186600 - RNA, 1758 nt, Artificial Sequence
  derived and/or modified CDS sequence (opt4) from hemagglutinin__InfluenzaB__ACF54136
augaaggccaucaucgugcugcugaugguggugaccagcaacgccgacagaaucugcaccggcaucaccagcagcaacagcccccacguggugaagaccgccacccagggcgaggugaacgugaccggcgugaucccccugaccaccacccccaccaagagccacuucgccaaccugaagggcaccgagaccagaggcaagcugugccccaagugccugaacugcaccgaccuggacguggcccugggcagacccaagugcaccggcaacauccccagcgccagagugagcauccugcacgaggugagacccgugaccagcggcugcuuccccaucaugcacgacagaaccaagaucagacagcugcccaaccugcugagaggcuacgagcacaucagacugagcacccacaacgugaucaacgccgagaacgcccccggcggccccuacaagaucggcaccagcggcagcugccccaacgugaccaacggcaacggcuucuucgccaccauggccugggccgugcccaagaacgacaacaacaagaccgccaccaacagccugaccaucgaggugcccuacaucugcaccgagggcgaggaccagaucaccguguggggcuuccacagcgacaacaagacccagauggccaagcuguacggcgacagcaagccccagaaguucaccagcagcgccaacggcgugaccacccacuacgugagccagaucggcggcuuccccaaccagaccgaggacggcggccugccccagagcggcagaaucgugguggacuacauggugcagaagagcggcaagaccggcaccaucaccuaccagagaggcauccugcugccccagaagguguggugcgccagcggcagaagcaaggugaucaagggcagccugccccugaucggcgaggccgacugccugcacgagaaguacggcggccugaacaagagcaagcccuacuacaccggcgagcacgccaaggccaucggcaacugccccaucugggugaagaccccccugaagcuggccaacggcaccaaguacagaccccccgccaagcugcugaaggagagaggcuucuucggcgccaucgccggcuuccuggagggcggcugggagggcaugaucgccggcuggcacggcuacaccagccacggcgcccacggcguggccguggccgccgaccugaagagcacccaggaggccaucaacaagaucaccaagaaccugaacagccugagcgagcuggaggugaagaaccugcagagacugagcggcgccauggacgagcugcacaacgagauccuggagcuggacgagaagguggacgaccugagagccgacaccaucagcagccagaucgagcuggccgugcugcugagcaacgagggcaucaucaacagcgaggacgagcaccugcuggcccuggagagaaagcugaagaagaugcugggccccagcgccguggagaucggcaacggcugcuucgagaccaagcacaagugcaaccagaccugccuggacagaaucgccgccggcaccuucgacgccggcgaguucagccugcccaccuucgacagccugaacaucaccgccgccagccugaacgacgacggccuggacaaccacaccauccugcuguacuacagcaccgccgccagcagccuggccgugacccugaugaucgccaucuucgugguguacauggugagcagagacaacaucagcugcagcaucugccuguga

SEQ ID NO: 186601 - RNA, 1758 nt, Artificial Sequence; identical to SEQ ID NO: 186574
  derived and/or modified CDS sequence (opt4) from hemagglutinin__InfluenzaB__ACF54147

SEQ ID NO: 186602 - RNA, 1755 nt, Artificial Sequence
  derived and/or modified CDS sequence (opt4) from hemagglutinin__InfluenzaB__ACF54158
augaaggccaucaucgugcugcugaugguggugaccagcaacgccgacagaaucugcaccggcaucaccagcagcaacagcccccacguggugaagaccgccacccagggcgaggugaacgugaccggcgugaucccccugaccaccacccccaccaagagcuacuucgccaaccugaagggcaccagaaccagaggcaagcugugccccgacugccugaacugcaccgaccuggacguggcccugggcagacccaugugcgugggcaccacccccagcgccaaggccagcauccugcacgaggugagacccgugaccagcggcugcuuccccaucaugcacgacagaaccaagaucagacagcuggccaaccugcugagaggcuacgagaacaucagacugagcacccagaacgugaucgacgccgagaaggcccccggcggccccuacagacugggcaccagcggcagcugccccaacgccaccagcaagagcggcuucuucgccaccauggccugggccgugcccaaggacaacaacaagaacgccaccaacccccugaccguggaggugcccuacaucugcaccgagggcgaggaccagaucaccguguggggcuuccacagcgacaacaagacccagaugaagaaccuguacggcgacagcaacccccagaaguucaccagcagcgccaacggcgugaccacccacuacgugagccagaucggcggcuuccccgaccagaccgaggacggcggccugccccagagcggcagaaucgugguggacuacaugaugcagaagcccggcaagaccggcaccaucguguaccagagaggcgugcugcugccccagaagguguggugcgccagcggcagaagcaaggugaucaagggcagccugccccugaucggcgaggccgacugccugcacgagaaguacggcggccugaacaagagcagacccuacuacaccggcgagcacgccaaggccaucggcaacugccccaucugggugaagaccccccugaagcuggccaacggcaccaaguacagaccccccgccaagcugcugaaggagagaggcuucuucggcgccaucgccggcuuccuggagggcggcugggagggcaugaucgccggcuggcacggcuacaccagccacggcgcccacggcguggccguggccgccgaccugaagagcacccaggaggccaucaacaagaucaccaagaaccugaacagccugagcgagcuggaggugaagaaccugcagagacugagcggcgccauggacgagcugcacaacgagauccuggagcuggacgagaagguggacgaccugagagccgacaccaucagcagccagaucgagcuggccgugcugcugagcaacgagggcaucaucaacagcgaggacgagcaccugcuggcccuggagagaaagcugaagaagaugcugggccccagcgccguggacaucggcaacggcugcuucgagaccaagcacaagugcaaccagaccugccuggacagaaucgccgccggcaccuucaacgccggcgaguucagccugcccaccuucgacagccugaacaucaccgccgccagccugaacgacgacggccuggacaaccacaccauccugcuguacuacagcaccgccgccagcagccuggccgugacccugaugcuggccaucuucaucguguacauggugagcagagacaacgugagcugcagcaucugccuguga

SEQ ID NO: 186603 - RNA, 1755 nt, Artificial Sequence
  derived and/or modified CDS sequence (opt4) from hemagglutinin__InfluenzaB__ACF54169
augaaggccaucaucgugcugcugaugguggugaccagcaacgccgacagaaucugcaccggcaucaccagcagcaacagcccccacguggugaagaccgccacccagggcgaggugaacgugaccggcgugaucccccugaccaccacccccaccaagagcuacuucgccaaccugaagggcaccagaaccagaggcaagcugugccccgacugccugaacugcaccgaccuggacguggcccugggcagacccaugugcgugggcaccacccccagcgccaaggccagcauccugcacgaggugagacccgugaccagcggcugcuuccccaucaugcacgacagaaccaagaucagacagcugcccaaccugcugagaggcuacgagaacaucagacugagcacccagaacgugaucgacgccgagaacgcccccggcggccccuacagacugggcaccagcggcagcugccccaacgccaccagcaagagcggcuucuucgccaccauggccugggccgugcccaaggacaacaacaagaacgccaccaacccccugaccguggaggugcccuacgugugcaccgagggcgaggaccagaucaccguguggggcuuccacagcgacaacaagacccccaugaagaaccuguacggcgacagcaacccccagaaguucaccagcagcgccaacggcgugaccacccacuacgugagccagaucggcggcuuccccgcccagaccgaggacgagggcaucccccagagcggcagaaucgugguggacuacauggugcagaagcccagaaagaccggcaccaucguguaccagagaggcgugcugcugccccagaagguguggugcgccagcggcagaagcaaggugaucaagggcagccugccccugaucggcgaggccgacugccugcacgagaaguacggcggccugaacaagagcaagcccuacuacaccggcgagcacgccaaggccaucggcaacugccccaucugggugaagaccccccugaagcuggccaacggcaccaaguacagaccccccgccaagcugcugaaggagagaggcuucuucggcgccaucgccggcuuccuggagggcggcugggagggcaugaucgccggcuggcacggcuacaccagccacggcgcccacggcguggccguggccgccgaccugaagagcacccaggaggccaucagcaagaucaccaagaaccugaacagccugagcgagcuggaggugaagaaccugcagagacugagcggcgccauggacgagcugcacaacgagauccuggagcuggacgagaagguggacgaccugagagccgacaccaucagcagccagaucgagcuggccgugcugcugagcaacgagggcaucaucaacagcgaggacgagcaccugcuggcccuggagagaaagcugaagaagaugcugggccccagcgccguggacaucggcaacggcugcuucgagaccaagcacaagugcaaccagaccugccuggacagaaucgccgccggcaccuucaacgccggcgaguucagccugcccaccuucgacagccugaacaucaccgccgccagccugaacgacgacggccuggacaaccacaccauccugcuguacuacagcaccgccgccagcagccuggccgugacccugaugcuggccaucuucaucguguacauggugagcagagacaacgugagcugcagcaucugccuguga

SEQ ID NO: 186604 - RNA, 1755 nt, Artificial Sequence
  derived and/or modified CDS sequence (opt4) from hemagglutinin__InfluenzaB__ACF54180
augaaggccaucaucgugcugcugaugguggugaccagcaacgccgacagaaucugcaccggcaucaccagcagcaacagcccccacguggugaagaccgccacccagggcgaggugaacgugaccggcgugaucccccugaccaccacccccaccaagagcuacuucgccaaccugaagggcaccagaaccagaggcaagcugugccccgacugccugaacugcaccgaccuggacguggcccugggcagacccaugugcgugggcaccacccccagcgccaaggccagcauccugcacgaggugagacccgugaccagcggcugcuuccccaucaugcacgacagaaccaagaucagacagcugcccaaccugcugagaggcuacgagaacaucagacugagcacccagaacgugaucgacgccgagaacgcccccggcggccccuacagacugggcaccagcggcagcugccccaacgccaccagcaagagcggcuucuucgccaccauggccugggccgugcccaaggacaacaacaagaacgccaccaacccccugaccguggaggugcccuacgugugcaccgagggcgaggaccagaucaccguguggggcuuccacagcgacaacaagacccccaugaagaaccuguacggcgacagcaacccccagaaguucaccagcagcgccaacggcgugaccacccacuacgugagccagaucggcggcuuccccgcccagaccgaggacggcggccugccccagagcggcagaaucgugguggacuacauggugcagaagcccagaaagaccggcaccaucguguaccagagaggcgugcugcugccccagaagguguggugcgccagcggcagaagcaaggugaucaagggcagccugccccugaucggcgaggccgacugccugcacgagaaguacggcggccugaacaagagcaagcccuacuacaccggcgagcacgccaaggccaucggcaacugccccaucugggugaagaccccccugaagcuggccaacggcaccaaguacagaccccccgccaagcugcugaaggagagaggcuucuucggcgccaucgccggcuuccuggagggcggcugggagggcaugaucgccggcuggcacggcuacaccagccacggcgcccacggcguggccguggccgccgaccugaagagcacccaggaggccaucaacaagaucaccaagaaccugaacagccugagcgagcuggaggugaagaaccugcagagacugagcggcgccauggacgagcugcacaacgagauccuggagcuggacgagaagguggacgaccugagagccgacaccaucagcagccagaucgagcuggccgugcugcugagcaacgagggcaucaucaacagcgaggacgagcaccugcuggcccuggagagaaagcugaagaagaugcugggccccagcgccguggacaucggcaacggcugcuucgagaccaagcacaagugcaaccagaccugccuggacagaaucgccgccggcaccuucaacgccggcgaguucagccugcccaccuucgacagccugaacaucaccgccgccagccugaacgacgacggccuggacaaccacaccauccugcuguacuacagcaccgccgccagcagccuggccgugacccugaugcuggccaucuucaucguguacauggugagcagagacaacgugagcugcagcaucugccuguga

SEQ ID NO: 186605 - RNA, 1755 nt, Artificial Sequence
  derived and/or modified CDS sequence (opt4) from hemagglutinin__InfluenzaB__ACF54202
augaaggccaucaucgugcugcugaugguggugaccagcaacgccgacagaaucugcaccggcaucaccagcagcaacagcccccacguggugaagaccgccacccagggcgaggugaacgugaccggcgugaucccccugaccaccacccccaccaagagcuacuucgccaaccugaagggcaccagaaccagaggcaagcugugccccgacugccugaacugcaccgaccuggacguggcccugggcagacccaugugcgugggcaccacccccagcgccaaggccagcauccugcacgaggugagacccgugaccagcggcugcuuccccaucaugcacgacagaaccaagaucagacagcugcccaaccugcugagaggcuacgagaacaucagacugagcacccagaacgugaucgacgccgagaacgcccccggcggccccuacagacugggcaccagcagaagcugccccaacgccaccagcaagagcggcuucuucgccaccauggccugggccgugcccaaggacaacaacaagaacgccaccaacccccugaccguggaggugcccuacgugugcaccgagggcgaggaccagaucaccguguggggcuuccacagcgacaacaagacccagaugaagaaccuguacggcgacagcaacccccagaaguucaccagcagcgccaacggcgugaccacccacuacgugagccagaucggcggcuuccccgcccagaccgaggacgagggccugccccagagcggcagaaucgugguggacuacauggugcagaagcccagaaagaccggcaccaucguguaccagagaggcgugcugcugccccagaagguguggugcgccagcggcagaagcaaggugaucaagggcagccugccccugaucggcgaggccgacugccugcacgagaaguacggcggccugaacaagagcaagcccuacuacaccggcgagcacgccaaggccaucggcaacugccccaucugggugaagaccccccugaagcuggccaacggcaccaaguacagaccccccgccaagcugcugaaggagagaggcuucuucggcgccaucgccggcuuccuggagggcggcugggagggcaugaucgccggcuggcacggcuacaccagccacggcgcccacggcguggccguggccgccgaccugaagagcacccaggaggccaucaacaagaucaccaagaaccugaacagccugagcgagcuggaggugaagaaccugcagagacugagcggcgccauggacgagcugcacaacgagauccuggagcuggacgagaagguggacgaccugagagccgacaccaucagcagccagaucgagcuggccgugcugcugagcaacgagggcaucaucaacagcgaggacgagcaccugcuggcccuggagagaaagcugaagaagaugcugggccccagcgccguggacaucggcaacggcugcuucgagaccaagcacaagugcaaccagaccugccuggacagaaucgccgccggcaccuucaacgccggcgaguucagccugcccaccuucgacagccugaacaucaccgccgccagccugaacgacgacggccuggacaaccacaccauccugcuguacuacagcaccgccgccagcagccuggccgugacccugaugcuggccaucuucaucguguacauggugagcagagacaacgugagcugcagcaucugccuguga

SEQ ID NO: 186606 - RNA, 1755 nt, Artificial Sequence
  derived and/or modified CDS sequence (opt4) from hemagglutinin__InfluenzaB__ACF54213
augaaggccaucaucgugcugcugaugguggugaccagcaacgccgacagaaucugcaccggcaucaccagcagcaacagcccccacguggugaagaccgccacccagggcgaggugaacgugaccggcgugaucccccugaccaccacccccaccaagagcuacuucgccaaccugaagggcaccagaaccagaggcaagcugugccccgacugccugaacugcaccgaccuggacguggcccugggcagacccaugugcgugggcaccacccccagcgccaaggccagcauccugcacgaggugagacccgugaccagcggcugcuuccccaucaugcacgacagaaccaagaucagacagcugcccaaccugcugagaggcuacgagaacaucagacugagcacccagaacgugaucgacgccgagaaggcccccggcggccccuacagacugggcaccagcggcagcugccccaacgccaccagcaagagcggcuucuucgccaccauggccugggccgugcccaaggacaacaacaagaacgccaccaacccccugaccguggaggugcccuacaucugcaccgagggcgaggaccagaucaccguguggggcuuccacagcgacgacaagacccagaugaagaaccuguacggcgacagcaacccccagaaguucaccagcagcgccaacggcgugaccacccacuacgugagccagaucggcggcuuccccgaccagaccgaggacggcggccugccccagagcggcagaaucgugguggacuacaugaugcagaagcccggcaagaccggcaccaucguguaccagagaggcgugcugcugccccagaagguguggugcgccagcggcagaagcaaggugaucaagggcagccugccccugaucggcgaggccgacugccugcacgagaaguacggcggccugaacaagagcaagcccuacuacaccggcgagcacgccaaggccaucggcaacugccccaucugggugaagaccccccugaagcuggccaacggcaccaaguacagaccccccgccaagcugcugaaggagagaggcuucuucggcgccaucgccggcuuccuggagggcggcugggagggcaugaucgccggcuggcacggcuacaccagccacggcgcccacggcguggccguggccgccgaccugaagagcacccaggaggccaucaacaagaucaccaagaaccugaacagccugagcgagcuggaggugaagaaccugcagagacugagcggcgccauggacgagcugcacaacgagauccuggagcuggacgagaagguggacgaccugagagccgacaccaucagcagccagaucgagcuggccgugcugcugagcaacgagggcaucaucaacagcgagaacgagcaccugcuggcccuggagagaaagcugaagaagaugcugggccccagcgccguggacaucggcaacggcugcuucgagaccaagcacaagugcaaccagaccugccuggacagaaucgccgccggcaccuucaacgccggcgaguucagccugcccaccuucgacagccugaacaucaccgccgccagccugaacgacgacggccuggacaaccacaccauccugcuguacuacagcaccgccgccagcagccuggccgugacccugaugcuggccaucuucaucguguacauggugagcagagacaacgugagcugcagcaucugccuguga

SEQ ID NO: 186607 - RNA, 1758 nt, Artificial Sequence
  derived and/or modified CDS sequence (opt4) from hemagglutinin__InfluenzaB__ACF54224
augaaggccaucaucgugcugcugaugguggugaccagcaacgccgacagaaucugcaccggcaucaccagcagcaacagcccccacguggugaagaccgccacccagggcgaggugaacgugaccggcgugaucccccugaccaccacccccaccaagagccacuucgccaaccugaagggcaccaagaccagaggcaagcugugccccaagugccugaacugcaccgaccuggacguggcccugggcagacccaagugcaccggcaacauccccagcgccgaggugagcauccugcacgaggugagacccgugaccagcggcugcuuccccaucaugcacgacagaaccaagaucagacagcugcccaaccugcugagaggcuacgagcacaucagacugagcacccacaacgugaucaacgccgagaaggcccccggcggccccuacaagaucggcaccagcggcagcugccccaacgugaccaacggcaacggcuucuucgccaccauggccugggccgugcccaagaacgacaacaacaagaccgccaccaacagccugaccaucgaggugcccuacaucugcaccgagggcgaggaccagaucaccguguggggcuuccacagcgacaacgagacccagauggccaagcuguacggcgacagcaagccccagaaguucaccagcagcagcaacggcgugaccacccacuacgugagccagaucggcggcuuccccaaccagaccgaggacggcggccugccccagagcggcagaaucgugguggacuacauggugcagaagagcggcaagaccggcaccaucaccuaccagagaggcauccugcugccccagaagguguggugcgccagcggcagaagcaaggugaucaagggcagccugccccugaucggcgaggccgacugccugcacgagagauacggcggccugaacaagagcaagcccuacuacaccggcgagcacgccaaggccaucggcaacugccccaucugggugaagaccccccugaagcuggccaacggcaccaaguacagaccccccgccaagcugcugaaggagagaggcuucuucggcgccaucgccggcuuccuggagggcggcugggagggcaugaucgccggcuggcacggcuacaccagccacggcgcccacggcguggccguggccgccgaccugaagagcacccaggaggccaucaacaagaucaccaagaaccugaacagccugagcgagcuggaggugaagaaccugcagagacugagcggcgccauggacgagcugcacaacgagauccuggagcuggacgagaagguggacgaccugagagccgacaccaucagcagccagaucgagcuggccgugcugcugagcaacgagggcaucaucaacagcgaggacgagcaccugcuggcccuggagagaaagcugaagaagaugcugggccccagcgccguggagaucggcaacggcugcuucgagaccaagcacaagugcaaccagaccugccuggacagaaucgccgccggcaccuucgacgccggcgaguucagccugcccaccuucgacagccugaacaucaccgccgccagccugaacgacgacggccuggacaaccacaccauccugcuguacuacagcaccgccgccagcagccuggccgugacccugaugaucgccaucuucgugguguacauggugagcagagacaacgugagcugcagcaucugccuguga

SEQ ID NO: 186608 - RNA, 1755 nt, Artificial Sequence
  derived and/or modified CDS sequence (opt4) from hemagglutinin__InfluenzaB__ACF54257
augaaggccaucaucgugcugcugaugguggugaccagcaacgccgacagaaucugcaccggcaucaccagcagcaacagcccccacguggugaagaccgccacccagggcgaggugaacgugaccggcgccaucccccugaccaccacccccaccaagagccacuucgccaaccugaagggcaccaagaccagaggcaagcugugccccaccugccugaacugcaccgaccuggacguggcccugggcagacccaugugcgugggcaucacccccagcgccaaggccagcauccugcacgaggugagacccgugaccagcggcugcuuccccaucaugcacgacagaaccaagaucagacagcugcccaaccugcugagaggcuacgagaagaucagacugagcacccagaacgugaucgacgccgagaaggcccccggcggccccuacagacugggcaccagcggcagcugccccaacgccaccagcaagagcggcuucuucgccaccauggccugggccgugcccagagagaacaacaagaccgccaccaacccccugaccguggaggugccccacaucugcaccaaggaggaggaccagaucaccguguggggcuuccacagcgacaacaagccccagaugaagaaccuguacggcgacagcaacccccagaaguucaccagcagcgccaacggcaucaccacccacuacgugagccagaucggcggcuuccccgaccagaccgaggacggcggccugccccagagcggcagaaucgugguggacuacauggugcagaagcccggcaagaccggcaccaucguguaccagagaggcauccugcugccccagaagguguggugcgccagcggcagaagcaaggugaucaagggcagccugccccugaucggcgaggccgacugccugcacgagaaguacggcggccugaacaagagcaagcccuacuacaccggcgagcacgccaaggccaucggcaacugccccaucugggugaagaccccccugaagcuggccaacggcaccaaguacagaccccccgccaagcugcugaaggagagaggcuucuucggcgccaucgccggcuuccuggagggcggcugggagggcaugaucgccggcuggcacggcuacaccagccacggcgcccacggcguggccguggccgccgaccugaagagcacccaggaggccaucaacaagaucaccaagaaccugaacagccugagcgagcuggaggugaagaaccugcagagacugagcggcgccauggacgagcugcacaacgagauccuggagcuggacgagaagguggacgaccugagagccgacaccaucagcagccagaucgagcuggccgugcugcugagcaacgagggcaucaucaacagcgaggacgagcaccugcuggcccuggagagaaagcugaagaagaugcugggccccagcgccguggacaucggcaacggcugcuucgagaccaagcacaagugcaaccagaccugccuggacagaaucgccgccggcaccuucaacgccggcgaguucagccugcccaccuucgacagccugaacaucaccgccgccagccugaacgacgacggccuggacaaccacaccauccugcuguacuacagcaccgccgccagcagccuggccgugacccugaugaucgccaucuucaucguguacaugaucagcagagacaacgugagcugcagcaucugccuguga

SEQ ID NO: 186609 - RNA, 1755 nt, Artificial Sequence
  derived and/or modified CDS sequence (opt4) from hemagglutinin__InfluenzaB__ACF54268
augaaggccaucaucgugcugcugaugguggugaccagcaacgccgacagaaucugcaccggcaucaccagcagcaacagcccccacguggugaagaccgccacccagggcgaggugaacgugaccggcgccaucccccugaccaccacccccaccaagagccacuucgccaaccugaagggcaccaagaccagaggcaagcugugccccaccugccugaacugcaccgaccuggacguggcccugggcagacccaugugcgugggcaucacccccagcgccaaggccagcauccugcacgaggugagacccgugaccagcggcugcuuccccaucaugcacgacagaaccaagaucagacagcugcccaaccugcugagaggcuacgagaagaucagacugagcacccagaacgugaucgacgccgagaaggcccccggcggccccuacagacugggcaccagcggcagcugccccaacgccaccagcaagagcggcuucuucgccaccauggccugggccgugcccagagagaacaacaagaccgccaccaacccccugaccguggaggugccccacaucugcaccaaggaggaggaccagaucaccguguggggcuuccacagcgacaacaagauccagaugaagaaccuguacggcgacagcaacccccagaaguucaccagcagcgccaacggcaucaccacccacuacgugagccagaucggcggcuuccccgaccagaccgaggacggcggccugccccagagcggcagaaucgugguggacuacauggugcagaagcccggcaagaccggcaccaucguguaccagagaggcauccugcugccccagaagguguggugcgccagcggcagaagcaaggugaucaagggcagccugccccugaucggcgaggccgacugccugcacgagaaguacggcggccugaacaagagcaagcccuacuacaccggcgagcacgccaaggccaucggcaacugccccaucugggugaagaccccccugaagcuggccaacggcaccaaguacagaccccccgccaagcugcugaaggagagaggcuucuucggcgccaucgccggcuuccuggagggcggcugggagggcaugaucgccggcuggcacggcuacaccagccacggcgcccacggcguggccguggccgccgaccugaagagcacccaggaggccaucaacaagaucaccaagaaccugaacagccugagcgagcuggaggugaagaaccugcagagacugagcggcgccauggacgagcugcacaacgagauccuggagcuggacgagaagguggacgaccugagagccgacaccaucagcagccagaucgagcuggccgugcugcugagcaacgagggcaucaucaacagcgaggacgagcaccugcuggcccuggagagaaagcugaagaagaugcugggccccagcgccaucgacaucggcaacggcugcuucgagaccaagcacaagugcaaccagaccugccuggacagaaucgccgccggcaccuucaacgccggcgaguucagccugcccaccuucgacagccugaacaucaccgccgccagccugaacgacgacggccuggacaaccacaccauccugcuguacuacagcaccgccgccagcagccuggccgugacccugaugaucgccaucuucaucguguacaugaucagcagagacaacgugagcugcagcaucugccuguga

SEQ ID NO: 186610 - RNA, 1755 nt, Artificial Sequence
  derived and/or modified CDS sequence (opt4) from hemagglutinin__InfluenzaB__ACF54279
augaaggccaucaucgugcugcugaugguggugaccagcaacgccgacagaaucugcaccggcaucaccagcagcaacagcccccacguggugaagaccgccacccagggcgaggugaacgugaccggcgccaucccccugaccaccacccccaccaagagccacuucgccaaccugaagggcaccaagaccagaggcaagcugugccccaccugccugaacugcaccgaccuggacguggcccugggcagacccaugugcgugggcaucacccccagcgccaaggccagcauccugcacgaggugagacccgugaccagcggcugcuuccccaucaugcacgacagaaccaagaucagacagcugcccaaccugcugagaggcuacgagaagaucagacugagcacccagaacgugaucgacgccgagaaggcccccggcggccccuacagacugggcaccagcggcagcugccccaacgccaccagcaagagcggcuucuucgccaccauggccugggccgugcccagagagaacaacaagaccgccaccaacccccugaccguggaggugccccacaucugcaccaaggaggaggaccagaucaccguguggggcuuccacagcgacaacaagacccagaugaagaaccuguacggcgacagcaacccccagaaguucaccagcagcgccaacggcaucaccacccacuacgugagccagaucggcggcuuccccgaccagaccgaggacggcggccugccccagagcggcagaaucgugguggacuacauggugcagaagcccggcaagaccggcaccaucguguaccagagaggcauccugcugccccagaagguguggugcgccagcggcagaagcaaggugaucaagggcagccugccccugaucggcgaggccgacugccugcacgagaaguacggcggccugaacaagagcaagcccuacuacaccggcgagcacgccaaggccaucggcaacugccccaucugggugaagaccccccugaagcuggccaacggcaccaaguacagaccccccgccaagcugcugaaggagagaggcuucuucggcgccaucgccggcuuccuggagggcggcugggagggcaugaucgccggcuggcacggcuacaccagccacggcgcccacggcguggccguggccgccgaccugaagagcacccaggaggccaucaacaagaucaccaagaaccugaacagccugagcgagcuggaggugaagaaccugcagagacugagcggcgccauggacgagcugcacaacgagauccuggagcuggacgagaagguggacgaccugagagccgacaccaucagcagccagaucgagcuggccgugcugcugagcaacgagggcaucaucaacagcgaggacgagcaccugcuggcccuggagagaaagcugaagaagaugcugggccccagcgccguggacaucggcaacggcugcuucgagaccaagcacaagugcaaccagaccugccuggacagaaucgccgccggcaccuucaacgccggcgaguucagccugcccaccuucgacagccugaacaucaccgccgccagccugaacgacgacggccuggacaaccacaccauccugcuguacuacagcaccgccgccagcagccuggccgugacccugaugaucgccaucuucaucguguacaugaucagcagagacaacgugagcugcagcaucugccuguga

SEQ ID NO: 186611 - RNA, 1755 nt, Artificial Sequence
  derived and/or modified CDS sequence (opt4) from hemagglutinin__InfluenzaB__ACF54290
augaaggccaucaucgugcugcugaugguggugaccagcaacgccgacagaaucugcaccggcaucaccagcagcaacagcccccacguggugaagaccgccacccagggcgaggugaacgugaccggcgugaucccccugaccaccacccccaccaagagcuacuucgccaaccugaagggcaccagaaccagaggcaagcugugccccgacugccugaacugcaccgaccuggacguggcccugggcagacccaugugcgugggcaccacccccagcgccaaggccagcauccugcacgaggugagacccgugaccagcggcugcuuccccaucaugcacgacagaaccaagaucagacagcugcccaaccugcugagaggcuacgagaacaucagacugagcacccagaacgugguggacgccgagaacgcccccggcggccccuacagacugggcaccagcggcagcugccccaacgccaccagcaagagcggcuucuucgccaccauggccugggccgugcccaaggacaacaacaagaacgccaccaacccccugaccguggaggugcccuacgugugcaccgagggcgaggaccagaucaccguguggggcuuccacagcgacaagaagacccagaugaagaaccuguacggcgacagcaacccccagaaguucaccagcagcgccaacggcgugaccacccacuacgugagccagaucggcggcuuccccgcccagaccgaggacggcggccugccccagagcggcagaaucgugguggacuacauggugcagaagcccagaaagaccggcaccaucguguaccagagaggcgugcugcugccccagaagguguggugcgccagcggcagaagcaaggugaucaagggcagccugccccugaucggcgaggccgacugccugcacgagaaguacggcggccugaacaagagcaagcccuacuacaccggcgagcacgccaaggccaucggcaacugccccaucugggugaagaccccccugaagcuggccaacggcaccaaguacagaccccccgccaagcugcugaaggagagaggcuucuucggcgccaucgccggcuuccuggagggcggcugggagggcaugaucgccggcuggcacggcuacaccagccacggcgcccacggcguggccguggccgccgaccugaagagcacccaggaggccaucaacaagaucaccaagaaccugaacagccugagcgagcuggaggugaagaaccugcagagacugagcggcgccauggacgagcugcacaacgagauccuggagcuggacgagaagguggacgaccugagagccgacaccaucagcagccagaucgagcuggccgugcugcugagcaacgagggcaucaucaacagcgaggacgagcaccugcuggcccuggagagaaagcugaagaagaugcugggccccagcgccguggacaucggcaacggcugcuucgagaccaagcacaagugcaaccagaccugccuggacaagaucgccgccggcaccuucaacgccggcgaguucagccugcccaccuucgacagccugaacaucaccgccgccagccugaacgacgacggccuggacaaccacaccauccugcuguacuacagcaccgccgccagcagccuggccgugacccugaugcuggccaucuucaucguguacauggugagcagagacaacgugagcugcagcaucugccuguga

SEQ ID NO: 186612 - RNA, 1758 nt, Artificial Sequence
  derived and/or modified CDS sequence (opt4) from hemagglutinin__InfluenzaB__ACF54312
augaaggccaucaucgugcugcugaugguggugaccagcaacgccgacagaaucugcaccggcaucaccagcagcaacagcccccacguggugaagaccgccacccagggcgaggugaacgugaccggcgugaucccccugaccaccacccccaccaagagccacuucgccaaccugaagggcaccaagaccagaggcaagcugugccccaagugccugaacugcaccgaccuggacguggcccugggcagacccaagugcaccggcaacauccccagcgccgaggugagcauccugcacgaggugagacccgugaccagcggcugcuuccccaucaugcacgacagaaccaagaucagacagcugcccaaccugcugagaggcuacgagcacaucagacugagcacccacaacgugaucaacgccgagaaggcccccggcggccccuacaagaucggcaccagcggcagcugccccaacgugaccaacggcaacggcuucuucgccaccauggccugggccgugcccaagaacgacaacaacaagaccgccaccaacagccugaccaucgaggugcccuacaucugcaccgagggcgaggaccagaucaccguguggggcuuccacagcgacagcgagacccagauggccaagcuguacggcgacagcaagccccagaaguucaccagcagcagcaacggcgugaccacccacuacaucagccagaucggcggcuuccccaaccagaccgaggacggcggccugccccagagcggcagaaucgugguggacuacauggugcagaagagcggcaagaccggcaccaucaccuaccagagaggcauccugcugccccagaagguguggugcgccagcggcagaagcaaggugaucaagggcagccugccccugaucggcgaggccgacugccugcacgagaaguacggcggccugaacaagagcaagcccuacuacaccggcgagcacgccaaggccaucggcaacugccccaucugggugaagaccccccugaagcuggccaacggcaccaaguacagaccccccgccaagcugcugaaggagagaggcuucuucggcgccaucgccggcuuccuggagggcggcugggagggcaugaucgccggcuggcacggcuacaccagccacggcgcccacggcguggccguggccgccgaccugaagagcacccaggaggccaucaacaagaucaccaagaaccugaacagccugagcgagcuggaggugaagaaccugcagagacugagcggcgccauggacgagcugcacaacgagauccuggagcuggacgagaagguggacgaccugagagccgacaccaucagcagccagaucgagcuggccgugcugcugagcaacgagggcaucaucaacagcgaggacgagcaccugcuggcccuggagagaaagcugaagaagaugcugggccccagcgccaucgagaucggcaacggcugcuucgagaccaagcacaagugcaaccagaccugccuggacagaaucgccgccggcaccuucgacgccggcgaguucagccugcccaccuucgacagccugaacaucaccgccgccagccugaacgacgacggccuggacaaccacaccauccugcuguacuacagcaccgccgccagcagccuggccgugacccugaugaucgccaucuucgugguguacauggugagcagagacaacgugagcugcagcaucugccuguga

SEQ ID NO: 186613 - RNA, 1758 nt, Artificial Sequence
  derived and/or modified CDS sequence (opt4) from hemagglutinin__InfluenzaB__ACF54323
augaaggccaucaucgugcugcugaugguggugaccagcaacgccgacagaaucugcaccggcaucaccagcagcaacagcccccacguggugaagaccgccacccagggcgaggugaacgugaccggcgugaucccccugaccaccacccccaccaagagccacuucgccaaccugaagggcaccgagaccagaggcaagcugugccccaagugccugaacugcaccgaccuggacguggcccugggcagacccaagugcaccggcaacauccccagcgccagagugagcauccugcacgaggugagacccgugaccagcggcugcuuccccaucaugcacgacagaaccaagaucagacagcugcccaaccugcugagaggcuacgagcacaucagacugagcaccagaaacgugaucaacgccgagaacgcccccggcggccccuacaagaucggcaccagcggcagcugccccaacgugaccaacggcaacggcuucuucgccaccauggccugggccgugcccaagaacgacaacaacaagaccgccaccaacagccugaccaucgaggugcccuacaucugcaccgagggcgaggaccagaucaccguguggggcuuccacagcgacaacgaggcccagauggccaagcuguacggcgacagcaagccccagaaguucaccagcagcgccaacggcgugaccacccacuacgugagccagaucggcggcuuccccaaccagaccgaggacggcggccugccccagagcggcagaaucgugguggacuacauggugcagaagagcggcaagaccggcaccaucaccuaccagagaggcauccugcugccccagaagguguggugcgccagcggcagaagcaaggugaucaagggcagccugccccugaucggcgaggccgacugccugcacgagaaguacggcggccugaacaagagcaagcccuacuacaccggcgagcacgccaaggccaucggcaacugccccaucugggugaagaccccccugaagcuggccaacggcaccaaguacagaccccccgccaagcugcugaaggagagaggcuucuucggcgccaucgccggcuuccuggagggcggcugggagggcaugaucgccggcuggcacggcuacaccagccacggcgcccacggcguggccguggccgccgaccugaagagcacccaggaggccaucaacaagaucaccaagaaccugaacagccugagcgagcuggaggugaagaaccugcagagacugagcggcgccauggacgagcugcacaacgagauccuggagcuggacgagaagguggacgaccugagagccgacaccaucagcagccagaucgagcuggccgugcugcugagcaacgagggcaucaucaacagcgaggacgagcaccugcuggcccuggagagaaagcugaagaagaugcugggccccagcgccguggagaucggcaacggcugcuucgagaccaagcacaagugcaaccagaccugccuggacagaaucgccgccggcaccuucgacgccggcgaguucagccugcccaccuucgacagccugaacaucaccgccgccagccugaacgacgacggccuggacaaccacaccauccugcuguacuacagcaccgccgccagcagccuggccgugacccugaugaucgccaucuucgugguguacauggugagcagagacaacgugagcugcagcaucugccuguga

SEQ ID NO: 186614 - RNA, 1755 nt, Artificial Sequence
  derived and/or modified CDS sequence (opt4) from hemagglutinin__InfluenzaB__ACF54345
augaaggccaucaucgugcugcugaugguggugaccagcaacgccgacagaaucugcaccggcaucaccagcagcaacagcccccacguggugaagaccgccacccagggcgaggugaacgugaccggcgugaucccccugaccaccacccccaccaagagcuacuucgccaaccugaagggcaccagaaccagaggcaagcugugccccgacugccugaacugcaccgaccuggacguggcccugggcagacccaugugcgugggcaccacccccagcgccaaggccagcauccugcacgaggugagacccgugaccagcggcugcuuccccaucaugcacgacagaaccaagaucagacagcuggccaaccugcugagaggcuacgagaacaucagacugagcacccagaacgugaucgacgccgagaaggcccccggcggccccuacagacugggcaccagcggcagcugccccaacgccaccagcaagagcggcuucuucgccaccauggccugggccgugcccaaggacaacaacaagaacgccaccaacccccugaccguggaggugcccuacaucugcaccgagggcgaggaccagaucaccguguggggcuuccacagcgacaacaaggcccagaugaagaaccuguacggcgacagcaacccccagaaguucaccagcagcgccaacggcgugaccacccacuacgugagccagaucggcggcuuccccgaccagaccgaggacggcggccugccccagagcggcagaaucgugguggacuacaugauccagaagcccggcaagaccggcaccaucguguaccagagaggcgugcugcugccccagaagguguggugcgccagcggcagaagcaaggugaucaagggcagccugccccugaucggcgaggccgacugccugcacgagaaguacggcggccugaacaagagcaagcccuacuacaccggcgagcacgccaaggccaucggcaacugccccaucugggugaagaccccccugaagcuggccaacggcaccaaguacagaccccccgccaagcugcugagagagagaggcuucuucggcgccaucgccggcuuccuggagggcggcugggagggcaugaucgccggcuggcacggcuacaccagccacggcgcccacggcguggccguggccgccgaccugaagagcacccaggaggccaucaacaagaucaccaagaaccugaacagccugagcgagcuggaggugaagaaccugcagagacugagcggcgccauggacgagcugcacaacgagauccuggagcuggacgagaagguggacgaccugagagccgacaccaucagcagccagaucgagcuggccgugcugcugagcaacgagggcaucaucaacagcgaggacgagcaccugcuggcccuggagagaaagcugaagaagaugcugggccccagcgccguggacaucggcaacggcugcuucgagaccaagcacaagugcaaccagaccugccuggacagaaucgccgccggcaccuucaacgccggcgaguucagccugcccaccuucgacagccugaacaucaccgccgccagccugaacgacgacggccuggacaaccacaccauccugcuguacuacagcaccgccgccagcagccuggccgugacccugaugcuggccaucuucaucguguacauggugagcagagacaacgugagcugcagcaucugccuguga

SEQ ID NO: 186615 - RNA, 1755 nt, Artificial Sequence
  derived and/or modified CDS sequence (opt4) from hemagglutinin__InfluenzaB__ACF54367
augaaggccaucaucgugcugcugaugguggugaccagcaacgccgacagaaucugcaccggcaucaccagcagcaacagcccccacguggugaagaccgccacccagggcgaggugaacgugaccggcgugaucccccugaccaccgcccccaccaagagcuacuucgccaaccugaagggcaccagaaccagaggcaagcugugccccgacugccugaacugcaccgaccuggacguggcccugggcagacccaugugcgugggcaccacccccagcgccaaggccagcauccugcacgaggugagacccgugaccagcggcugcuuccccaucaugcacgacagaaccaagaucagacagcuggccaaccugcugagaggcuacgagaacaucagacugagcacccagaacgugaucgacgccgagaaggcccccggcggccccuacagacugggcaccagcggcagcugccccaacgccaccagcaagagcggcuucuucgccaccauggccugggccgugcccaaggacaacaacaagaacgccaccaacccccugaccguggaggugcccuacaucugcaccgagggcgaggaccagaucaccguguggggcuuccacagcgacagcaagacccagaugaagaaccuguacggcgacagcaacccccagaaguucaccagcagcgccaacggcgugaccacccacuacgugagccagaucggcggcuuccccgaccagaccgaggacggcggccugccccagagcggcagaaucgugguggacuacaugaugcagaagcccggcaagaccggcaccaucguguaccagagaggcgugcugcugccccagaagguguggugcgccagcggcagaagcaaggugaucaagggcagccugccccugaucggcgaggccgacugccugcacgagaaguacggcggccugaacaagagcaagcccuacuacaccggcgagcacgccaaggccaucggcaacugccccaucugggugaagaccccccugaagcuggccaacggcaccaaguacagaccccccgccaagcugcugaaggagagaggcuucuucggcgccaucgccggcuuccuggagggcggcugggagggcaugaucgccggcuggcacggcuacaccagccacggcgcccacggcguggccguggccgccgaccugaagagcacccaggaggccaucaacaagaucaccaagaaccugaacagccugagcgagcuggaggugaagaaccugcagagacugagcggcgccauggacgagcugcacaacgagauccuggagcuggacgagaagguggacgaccugagagccgacaccaucagcagccagaucgagcuggccgugcugcugagcaacgagggcaucaucaacagcgaggacgagcaccugcuggcccuggagagaaagcugaagaagaugcugggccccagcgccguggacaucggcaacggcugcuucgagaccaagcacaagugcaaccagaccugccuggacagaaucgccgccggcaccuucaacgccggcgaguucagccugcccaccuucgacagccugaacaucaccgccgccagccugaacgacgacggccuggacaaccacaccauccugcuguacuacagcaccgccgccagcagccuggccgugacccugaugcuggccaucuucaucguguacauggugagcagagacaacgugagcugcagcaucugccuguga

SEQ ID NO: 186616 - RNA, 1755 nt, Artificial Sequence
  derived and/or modified CDS sequence (opt4) from hemagglutinin__InfluenzaB__ACN32556
augaaggccaucaucgugcugcugaugguggugaccagcaacgccgacagaaucugcaccggcaucaccagcagcaacagcccccacguggugaagaccgccacccagggcgaggugaacgugaccggcgccaucccccugaccaccacccccaccaagagccacuucgccaaccugaagggcaccaagaccagaggcaagcugugccccaccugccugaacugcaccgaccuggacguggcccugggcagacccaugugcgugggcaucacccccagcgccaaggccagcauccugcacgaggugagacccgugaccagcggcugcuuccccaucaugcacgacagaaccaagaucagacagcugcccaaccugcugagaggcuacgagaagaucagacugagcacccagaacgugaucaacgccgagaaggcccccggcggccccuacagacugggcaccagcggcagcugccccaacgccaccagcaagagcggcuucuucgccaccauggccugggccgugcccagagacaacaacaagaccgccaccaacccccugaccguggaggugccccacaucugcaccaaggaggaggaccagaucaccguguggggcuuccacagcgacaacaagacccagaugaagaaccuguacggcgacagcaacccccagaaguucaccagcuucgccaacggcaucaccacccacuacgugagccagaucggcggcuuccccgaccagaccgaggacggcggccugccccagagcggcagaaucgugguggacuacauggugcagaagcccggcaagaccggcaccaucguguaccagagaggcauccugcugccccagaagguguggugcgccagcggcagaagcaaggugaucaagggcagccugccccugaucggcgaggccgacugccugcacgagaaguacggcggccugaacaagagcaagcccuacuacaccggcgagcacgccaaggccaucggcaacugccccaucugggugaagaccccccugaagcuggccaacggcaccaaguacagaccccccgccaagcugcugaaggagagaggcuucuucggcgccaucgccggcuuccuggagggcggcugggagggcaugaucgccggcuggcacggcuacaccagccacggcgcccacggcguggccguggccgccgaccugaagagcacccaggaggccaucaacaagaucaccaagaaccugaacagccugagcgagcuggaggugaagaaccugcagagacugagcggcgccauggacgagcugcacaacgagauccuggagcuggacgagaagguggacgaccugagagccgacaccaucagcagccagaucgagcuggccgugcugcugagcaacgagggcaucaucaacagcgaggacgagcaccugcuggcccuggagagaaagcugaagaagaugcugggccccagcgccguggacaucggcaacggcugcuucgagaccaagcacaagugcaaccagaccugccuggacagaaucgccgccggcaccuucaacgccggcgaguucagccugcccaccuucgacagccugaacaucaccgccgccagccugaacgacgacggccuggacaaccacaccauccugcuguacuacagcaccgccgccagcagccuggccgugacccugaugaucgccaucuucaucguguacaugaucagcagagacaacgugagcugcagcaucugccuguga

SEQ ID NO: 186617 - RNA, 1758 nt, Artificial Sequence
  derived and/or modified CDS sequence (opt4) from hemagglutinin__InfluenzaB__ACN32567
auggaggccaucaucgugcugcugaugguggugaccagcaacgccgacagaaucugcaccggcaucaccagcagcaacagcccccacguggugaagaccgccacccagggcgaggugaacgugaccggcgugaucccccugaccaccacccccaccaagagccacuucgccaaccugaagggcaccgagaccagaggcaagcugugccccaagugccugaacugcaccgaccuggacguggcccugggcagacccaagugcaccggcaacauccccagcgccagagugagcauccugcacgaggugagacccgugaccagcggcugcuuccccaucaugcacgacagaaccaagaucagacagcugcccaaccugcugagaggcuacgagcacaucagacugagcacccacaacgugaucaacgccgagaacgcccccggcggccccuacaagaucggcaccagcggcagcugccccaacgugaccaacggcaacggcuucuucgccaccauggccugggccgugcccaagaacgacaacaacaagaccgccaccaacagccugaccaucgaggugcccuacaucugcaccgagggcgaggaccagaucaccguguggggcuuccacagcgacaacgagacccagauggccaagcuguacggcgacagcaagccccagaaguucaccagcagcgccaacggcgugaccacccacuacgugagccagaucggcggcuuccccaaccagaccgaggacggcggccugccccagagcggcagaaucgugguggacuacauggugcagaagagcggcaagaccggcaccaucaccuaccagagaggcauccugcugccccagaagguguggugcgccagcggcagaagcaaggugaucaagggcagccugccccugaucggcgaggccgacugccugcacgagaaguacggcggccugaacaagagcaagcccuacuacaccggcgagcacgccaaggccaucggcaacugccccaucugggugaagaccccccugaagcuggccaacggcaccaaguacagaccccccgccaagcugcugaaggagagaggcuucuucggcgccaucgccggcuuccuggagggcggcugggagggcaugaucgccggcuggcacggcuacaccagccacggcgcccacggcguggccguggccgccgaccugaagagcacccaggaggccaucaacaagaucaccaagaaccugaacagccugagcgagcuggaggugaagaaccugcagagacugagcggcgccauggacgagcugcacaacgagauccuggagcuggacgagaagguggacgaccugagagccgacaccaucagcagccagaucgagcuggccgugcugcugagcaacgagggcaucaucaacagcgaggacgagcaccugcuggcccuggagagaaagcugaagaagaugcugggccccagcgccguggagaucggcaacggcugcuucgagaccaagcacaagugcaaccagaccugccuggacagaaucgccgccggcaccuucgacgccggcgaguucagccugcccaccuucgacagccugaacaucaccgccgccagccugaacgacgacggccuggacaaccacaccauccugcuguacuacagcaccgccgccagcagccuggccgugacccugaugaucgccaucuucgugguguacauggugagcagagacaacgugagcugcagcaucugccuguga

SEQ ID NO: 186618 - RNA, 1758 nt, Artificial Sequence; identical to SEQ ID NO: 186574
  derived and/or modified CDS sequence (opt4) from hemagglutinin__InfluenzaB__ACN32578

SEQ ID NO: 186619 - RNA, 1758 nt, Artificial Sequence
  derived and/or modified CDS sequence (opt4) from hemagglutinin__InfluenzaB__ACN32589
augaaggccaucaucgugcugcugaugguggugaccagcaacgccgacagaaucugcaccggcaucaccagcagcaacagcccccacguggugaagaccgccacccagggcgaggugaacgugaccggcgugaucccccugaccaccacccccaccaagagccacuucagcaaccugaagggcaccgagaccagaggcaagcugugccccaagugccugaacugcaccgaccuggacguggcccugggcagacccaagugcaccggcaacauccccagcgccagagugagcauccugcacgaggugagacccgugaccagcggcugcuuccccaucaugcacgacagaaccaagaucagacagcugcccaaccugcugagaggcuacgagcacaucagacugagcacccacaacgugaucaacgccgagaacgcccccggcggccccuacaagaucggcaccagcggcagcugccccaacgugaccaacggcaacggcuucuucgccaccauggccugggccgugcccaagaacgacaacaacaagaccgccaccaacagccugaccaucgaggugcccuacaucugcaccgagggcgaggaccagaucaccaucuggggcuuccacagcgacaacgagacccagauggccaagcuguacggcgacagcaagccccagaaguucaccagcagcgccaacggcgugaccacccacuacgugagccagaucggcggcuuccccaaccagaccgaggacggcggccugccccagagcggcagaaucgugguggacuacauggugcagaagagcggcaagaccggcaccaucaccuaccagagaggcauccugcugccccagaagguguggugcgccagcggcagaagcaaggugaucaagggcagccugccccugaucggcgaggccgacugccugcacgagaaguacggcggccugaacaagagcaagcccuacuacaccggcgagcacgccaaggccaucggcaacugccccaucugggugaagaccccccugaagcuggccaacggcaccaaguacagaccccccgccaagcugcugaaggagagaggcuucuucggcgccaucgccggcuuccuggagggcggcugggagggcaugaucgccggcuggcacggcuacaccagccacggcgcccacggcguggccguggccgccgaccugaagagcacccaggaggccaucaacaagaucaccaagaaccugaacagccugagcgagcuggaggugaagaaccugcagagacugagcggcgccauggacgagcugcacaacgagauccuggagcuggacgagaagguggacgaccugagagccgacaccaucagcagccagaucgagcuggccgugcugcugagcaacgagggcaucaucaacagcgaggacgagcaccugcuggcccuggagagaaagcugaagaagaugcugggccccagcgccguggagaucggcaacggcugcuucgagaccaagcacaagugcaaccagaccugccuggacagaaucgccgccggcaccuucgacgccggcgaguucagccugcccaccuucgacagccugaacaucaccgccgccagccugaacgacgacggccuggacaaccacaccauccugcuguacuacagcaccgccgccagcagccuggccgugacccugaugaucgccaucuucgugguguacauggugagcagagacaacgugagcugcagcaucugccuguga

SEQ ID NO: 186620 - RNA, 1758 nt, Artificial Sequence
  derived and/or modified CDS sequence (opt4) from hemagglutinin__InfluenzaB__ACN32600
augaaggccaucaucgugcugcugaugguggugaccagcaacgccgacagaaucugcaccggcaucaccagcagcaacagcccccacguggugaagaccgccacccagggcgaggugaacgugaccggcgugaucccccugaccaccacccccaccaagagccacuucagcaaccugaagggcaccgagaccagaggcaagcugugccccaagugccugaacugcaccgaccuggacguggcccugggcagacccaagugcaccggcaacauccccagcgccagagugagcauccugcacgaggugagacccgugaccagcggcugcuuccccaucaugcacgacagaaccaagaucagacagcugcccaaccugcugagaggcuacgagcacaucagacugagcacccacaacgugaucaacgccgagaacgcccccggcggccccuacaagaucggcaccagcggcagcugccccaacgugaccaacggcaacggcuucuucgccaccauggccugggccgugcccaagaacgacaacaacaagaccgccaccaacagccugaccaucgaggugcccuacaucugcaccgagggcgaggaccagaucaccguguggggcuuccacagcgacaacgagacccagauggccaagcuguacggcgacagcaagccccagaaguucaccagcagcgccaacggcgugaccacccacuacgugagccagaucggcggcuuccccaaccagaccgaggacggcggccugccccagagcggcagaaucgugguggacuacauggugcagaagagcggcaagaccggcaccaucaccuaccagagaggcauccugcugccccagaagguguggugcgccagcggcagaagcaaggugaucaagggcagccugccccugaucggcgaggccgacugccugcacgagaaguacggcggccugaacaagagcaagcccuacuacaccggcgagcacgccaaggccaucggcaacugccccaucugggugaagaccccccugaagcuggccaacggcaccaaguacagaccccccgccagacugcugaaggagagaggcuucuucggcgccaucgccggcuuccuggagggcggcugggagggcaugaucgccggcuggcacggcuacaccagccacggcgcccacggcguggccguggccgccgaccugaagagcacccaggaggccaucaacaagaucaccaagaaccugaacagccugagcgagcuggaggugaagaaccugcagagacugagcggcgccauggacgagcugcacaacgagauccuggagcuggacgagaagguggacgaccugagagccgacaccaucagcagccagaucgagcuggccgugcugcugagcaacgagggcaucaucaacagcgaggacgagcaccugcuggcccuggagagaaagcugaagaagaugcugggccccagcgccguggagaucggcaacggcugcuucgagaccaagcacaagugcaaccagaccugccuggacagaaucgccgccggcaccuucgacgccggcgaguucagccugcccaccuucgacagccugaacaucaccgccgccagccugaacgacgacggccuggacaaccacaccauccugcuguacuacagcaccgccgccagcagccuggccgugacccugaugaucgccaucuucgugguguacauggugagcagagacaacgugagcugcagcaucugccuguga

SEQ ID NO: 186621 - RNA, 1758 nt, Artificial Sequence; identical to SEQ ID NO: 186585
  derived and/or modified CDS sequence (opt4) from hemagglutinin__InfluenzaB__ACN32611

SEQ ID NO: 186622 - RNA, 1755 nt, Artificial Sequence; identical to SEQ ID NO: 186486
  derived and/or modified CDS sequence (opt4) from hemagglutinin__InfluenzaB__ACN32716

SEQ ID NO: 186623 - RNA, 1758 nt, Artificial Sequence; identical to SEQ ID NO: 186574
  derived and/or modified CDS sequence (opt4) from hemagglutinin__InfluenzaB__ACN32771

SEQ ID NO: 186624 - RNA, 1758 nt, Artificial Sequence; identical to SEQ ID NO: 186580
  derived and/or modified CDS sequence (opt4) from hemagglutinin__InfluenzaB__ACN32782

SEQ ID NO: 186625 - RNA, 1758 nt, Artificial Sequence
  derived and/or modified CDS sequence (opt4) from hemagglutinin__InfluenzaB__ACO05957
augaaggccaucaucgugcugcugaugguggugaccagcaacgccgacagaaucugcaccggcaucaccagcagcaacagcccccacguggugaagaccgccacccagggcgaggugaacgugaccggcgugaucccccugaccaccacccccaccaagagccacuucgccaaccugaagggcaccgagaccagaggcaagcugugccccaagugccugaacugcaccgaccuggacguggcccugggcagacccaagugcaccggcaacauccccagcgccagagugagcauccugcacgaggugagacccgugaccagcggcugcuuccccaucaugcacgacagaaccaagaucagacagcugcccaaccugcugagaggcuacgagcacaucagacugagcacccacaacgugaucaacgccgagaacgcccccggcggccccuacaagaucggcaccagcggcagcugccccaacgugaccaacggcaacggcuucuucgccaccauggccugggccgugcccaagaacgacaacaacaagaccgccaccaacagccugaccaucgaggugcccuacaucugcaccgagggcgaggaccagaucaccguguggggcuuccacagcgacaacgagauccagauggccaagcuguacggcgacagcaagccccagaaguucaccagcagcgccaacggcgugaccacccacuacgugagccagaucggcggcuuccccaaccagaccgaggacggcggccugccccagagcggcagaaucgugguggacuacauggugcagaagagcggcaagaccggcaccaucaccuaccagagaggcauccugcugccccagaagguguggugcgccagcggcagaagcaaggugaucaagggcagccugccccugaucggcgaggccgacugccugcacgagaaguacggcggccugaacaagagcaagcccuacuacaccggcgagcacgccaaggccaucggcaacugccccaucugggugaagaccccccugaagcuggccaacggcaccaaguacagaccccccgccaagcugcugaaggagagaggcuucuucggcgccaucgccggcuuccuggagggcggcugggagggcaugaucgccggcuggcacggcuacaccagccacggcgcccacggcguggccguggccgccgaccugaagagcacccaggaggccaucaacaagaucaccaagaaccugaacagccugagcgagcuggaggugaagaaccugcagagacugagcggcgccauggacgagcugcacaacgagauccuggagcuggacgagaagguggacgaccugagagccgacaccaucagcagccagaucgagcuggccgugcugcugagcaacgagggcaucaucaacagcgaggacgagcaccugcuggcccuggagagaaagcugaagaagaugcugggccccagcgccguggagaucggcaacggcugcuucgagaccaagcacaagugcaaccagaccugccuggacagaaucgccgccggcaccuucgacgccggcgaguucagccugcccaccuucgacagccugaacaucaccgccgccagccugaacgacgacggccuggacaaccacaccauccugcuguacuacagcaccgccgccagcagccuggccgugacccugaugaucgccaucuucgugguguacauggugagcagagacaacgugagcugcagcaucugccuguga

SEQ ID NO: 186626 - RNA, 1755 nt, Artificial Sequence
  derived and/or modified CDS sequence (opt4) from hemagglutinin__InfluenzaB__ACO05968
augaaggccaucaucgugcugcugaugguggugaccagcaacgccgacagaaucugcaccggcaucaccagcagcaacagcccccacguggugaagaccgccacccagggcgaggugaacgugaccggcgugaucccccugaccaccacccccaccaagagcuacuucgccaaccugaagggcaccagaaccagaggcaagcugugccccgacugccugaacugcaccgaccuggacguggcccugggcagacccaugugcgugggcaccacccccagcgccaaggccagcauccugcacgaggugagacccgugaccagcggcugcuuccccaucaugcacgacagaaccaagaucagacagcugcccaaccugcugagaggcuacgagaacaucagacugagcacccagaacgugaucgacgccgagaaggcccccggcggccccuacagacugggcaccagcggcagcugccccaacgccaccagcaagagcggcuucuucgccaccauggccugggccgugcccaaggacaacaacaagaacgccaccaacccccugaccguggaggugcccuacaucugcaccgagagagaggaccagaucaccguguggggcuuccacagcgacaacaagacccagaugaagaaccuguacggcgacagcaacccccagaaguucaccagcagcgccaacggcgugaccacccacuacgugagccagaucggcagcuuccccgaccagaccgaggacggcggccugccccagagcggcagaaucgugguggacuacaugaugcagaagcccggcaagaccggcaccaucguguaccagagaggcgugcugcugccccagaagguguggugcgccagcggcagaagcaaggugaucaagggcagccugccccugaucggcgaggccgacugccugcacgagaaguacggcggccugaacaagagcaagcccuacuacaccggcgagcacgccaaggccaucggcaacugccccaucugggugaagaccccccugaagcuggccaacggcaccaaguacagaccccccgccaagcugcugaaggagagaggcuucuucggcgccaucgccggcuuccuggagggcggcugggagggcaugaucgccggcuggcacggcuacaccagccacggcgcccacggcguggccguggccgccgaccugaagagcacccaggaggccaucaacaagaucaccaagaaccugaacagccugagcgagcuggaggugaagaaccugcagagacugagcggcgccauggacgagcugcacaacgagauccuggagcuggacgagaagguggacgaccugagagccgacaccaucagcagccagaucgagcuggccgugcugcugagcaacgagggcaucaucaacagcgaggacgagcaccugcuggcccuggagagaaagcugaagaagaugcugggccccagcgccguggagaucggcaacggcugcuucgagaccaagcacaagugcaaccagaccugccuggacagaaucgccgccggcaccuucaacgccggcgaguucagccugcccaccuucgacagccugaacaucaccgccgccagccugaacgacgacggccuggacaaccacaccauccugcuguacuacagcaccgccgccagcagccuggccgugacccugaugcuggccaucuucaucguguacauggugagcagagacaacgugagcugcagcaucugccuguga

SEQ ID NO: 186627 - RNA, 1755 nt, Artificial Sequence
  derived and/or modified CDS sequence (opt4) from hemagglutinin__InfluenzaB__ACO05979
augaaggccaucaucgugcugcugaugguggugaccagcaacgccgacagaaucugcaccggcaucaccagcagcaacagcccccacguggugaagaccgccacccagggcgaggugaacgugaccggcgugaucccccugaccaccacccccaccaagagcuacuucgccaaccugaagggcaccagaaccagaggcaagcugugccccgacugccugaacugcaccgaccuggacguggcccugggcagacccaugugcgugggcaccacccccagcgccaaggccagcauccugcacgaggugagacccgugaccagcggcugcuuccccaucaugcacgacagaaccaagaucagacagcugcccaaccugcugagaggcuacgagaacaucagacugagcacccagaacgugaucgacgccgagaaggcccccggcggccccuacagacugggcaccagcggcagcugccccaacgccaccagcaagagcggcuucuucgccaccauggccugggccgugcccaaggacaacaacaagaacgccaccaacccccugaccguggaggugcccuacaucugcaccgagggcgaggaccagaucaccguguggggcuuccacagcgacaacaagacccagaugaagaaccuguacggcgacagcaacccccagaaguucaccagcagcgccaacggcgugaccacccacuacgugagccagaucggcagcuuccccgaccagaccgaggacggcggccugccccagagcggcagaaucgugguggacuacaugaugcagaagcccggcaagaccggcaccaucguguaccagagaggcgugcugcugccccagaagguguggugcgccagcggcagaagcaaggugaucaagggcagccugccccugaucggcgaggccgacugccugcacgagaaguacggcggccugaacaagagcaagcccuacuacaccggcgagcacgccaaggccaucggcaacugccccaucugggugaagaccccccugaagcuggccaacggcaccaaguacagaccccccgccaagcugcugaaggagagaggcuucuucggcgccaucgccggcuuccuggagggcggcugggagggcaugaucgccggcuggcacggcuacaccagccacggcgcccacggcguggccguggccgccgaccugaagagcacccaggaggccaucaacaagaucaccaagaaccugaacagccugagcgagcuggaggugaagaaccugcagagacugagcggcgccauggacgagcugcacaacgagauccuggagcuggacgagaagguggacgaccugagagccgacaccaucagcagccagaucgagcuggccgugcugcugagcaacgagggcaucaucaacagcgaggacgagcaccugcuggcccuggagagaaagcugaagaagaugcugggccccagcgccguggagaucggcaacggcugcuucgagaccaagcacaagugcaaccagaccugccuggacagaaucgccgccggcaccuucaacgccggcgaguucagccugcccaccuucgacagccugaacaucaccgccgccagccugaacgacgacggccuggacaaccacaccauccugcuguacuacagcaccgccgccagcagccuggccgugacccugaugcuggccaucuucaucguguacauggugagcagagacaacgugagcugcagcaucugccuguga

SEQ ID NO: 186628 - RNA, 1755 nt, Artificial Sequence; identical to SEQ ID NO: 186627
  derived and/or modified CDS sequence (opt4) from hemagglutinin__InfluenzaB__ACO05990

SEQ ID NO: 186629 - RNA, 1758 nt, Artificial Sequence
  derived and/or modified CDS sequence (opt4) from hemagglutinin__InfluenzaB__ACO06001
augaaggccaucaucgugcugcugaugguggugaccagcaacgccgacagaaucugcaccggcaucaccagcagcaacagcccccacguggugaagaccgccacccagggcgaggugaacgugaccggcgugaucccccugaccaccacccccaccaagagccacuucgccaaccugaagggcaccgagaccagaggcaagcugugccccaagugccugaacugcaccgaccuggacguggcccugggcagacccaagugcaccggcaacauccccagcgccagagugagcauccugcacgaggugagacccgugaccagcggcugcuuccccaucaugcacgacagaaccaagaucagacagcugcccaaccugcugagaggcuacgagcacaucagacugagcacccacaacgugaucaacgccgagaacgcccccggcggccccuacaagaucggcaccagcggcagcugccccaacgugaccaacggcaacggcuucuucgccaccauggccugggccgugcccaagaacgacaacaacaagaccgccaccaacagccugaccaucgaggugcccuacaucugcaccgagggcgaggaccagaucaccguguggggcuuccacagcgacaacgagaaccagauggccaagcuguacggcgacagcaagccccagaaguucaccagcuucgccaacggcgugaccacccacuacgugagccagaucggcggcuuccccaaccagaccgaggacggcggccugccccagagcggcagaaucgugguggacuacauggugcagaagagcggcaagaccggcaccaucaccuaccagagaggcauccugcugccccagaagguguggugcgccagcggcagaagcaaggugaucaagggcagccugccccugaucggcgaggccgacugccugcacgagaaguacggcggccugaacaagagcaagcccuacuacaccggcgagcacgccaaggccaucggcaacugccccaucugggugaagaccccccugaagcuggccaacggcaccaaguacagaccccccgccaagcugcugaaggagagaggcuucuucggcgccaucgccggcuuccuggagggcggcugggagggcaugaucgccggcuggcacggcuacaccagccacggcgcccacggcguggccguggccgccgaccugaagagcacccaggaggccaucaacaagaucaccaagaaccugaacagccugagcgagcuggaggugaagaaccugcagagacugagcggcgccauggacgagcugcacaacgagauccuggagcuggacgagaagguggacgaccugagagccgacaccaucagcagccagaucgagcuggccgugcugcugagcaacgagggcaucaucaacagcgaggacgagcaccugcuggcccuggagagaaagcugaagaagaugcugggccccagcgccguggagaucggcaacggcugcuucgagaccaagcacaagugcaaccagaccugccuggacagaaucgccgccggcaccuucgacgccggcgaguucagccugcccaccuucgacagccugaacaucaccgccgccagccugaacgacgacggccuggacaaccacaccauccugcuguacuacagcaccgccgccagcagccuggccgugacccugaugaucgccaucuucgugguguacauggugagcagagacaacgugagcugcagcaucugccuguga

SEQ ID NO: 186630 - RNA, 1755 nt, Artificial Sequence; identical to SEQ ID NO: 186627
  derived and/or modified CDS sequence (opt4) from hemagglutinin__InfluenzaB__ACO06012

SEQ ID NO: 186631 - RNA, 1755 nt, Artificial Sequence; identical to SEQ ID NO: 186627
  derived and/or modified CDS sequence (opt4) from hemagglutinin__InfluenzaB__ACO06023

SEQ ID NO: 186632 - RNA, 1755 nt, Artificial Sequence
  derived and/or modified CDS sequence (opt4) from hemagglutinin__InfluenzaB__ACO06062
augaaggccaucaucgugcugcugaugguggugaccagcaacgccgacagaaucugcaccggcaucaccagcagcaacagcccccacguggugaagaccgccacccagggcgaggugaacgugaccggcgugaucccccugaccaccacccccaccaagagcuacuucgccaaccugaagggcaccagaaccagaggcaagcugugccccgacugccugaacugcaccgaccuggacguggcccugggcagacccaugugcgugggcaccacccccagcgccaaggccagcauccugcacgaggugagacccgugaccagcggcugcuuccccaucaugcacgacagaaccaagaucagacagcugcccaaccugcugagaggcuacgagaacaucagacugagcacccagaacgugaucgacgccgagaaggcccccggcggccccuacagacugggcaccagcggcagcugccccaacgccaccagcaagagcggcuucuucgccaccauggccugggccgugcccaaggacaacaacaagaacgccaccaacccccugaccguggaggugcccuacaucugcaccgagggcgaggaccagaucaccguguggggcuuccacagcgacaacaagacccagaugaagaaccuguacggcgacagcaacccccagaaguucaccagcagcgccaacggcgugaccacccacuacgugagccagaucgacagcuuccccgaccagaccgaggacggcggccugccccagagcggcagaaucgugguggacuacaugaugcagaagcccggcaagaccggcaccaucguguaccagagaggcgugcugcugccccagaagguguggugcgccagcggcagaagcaaggugaucaagggcagccugccccugaucggcgaggccgacugccugcacgagaaguacggcggccugaacaagagcaagcccuacuacaccggcgagcacgccaaggccaucggcaacugccccaucugggugaagaccccccugaagcuggccaacggcaccaaguacagaccccccgccaagcugcugaaggagagaggcuucuucggcgccaucgccggcuuccuggagggcggcugggagggcaugaucgccggcuggcacggcuacaccagccacggcgcccacggcguggccguggccgccgaccugaagagcacccaggaggccaucaacaagaucaccaagaaccugaacagccugagcgagcuggaggugaagaaccugcagagacugagcggcgccauggacgagcugcacaacgagauccuggagcuggacgagaagguggacgaccugagagccgacaccaucagcagccagaucgagcuggccgugcugcugagcaacgagggcaucaucaacagcgaggacgagcaccugcuggcccuggagagaaagcugaagaagaugcugggccccagcgccguggagaucggcaacggcugcuucgagaccaagcacaagugcaaccagaccugccuggacagaaucgccgccggcaccuucaacgccggcgaguucagccugcccaccuucgacagccugaacaucaccgccgccagccugaacgacgacggccuggacaaccacaccauccugcuguacuacagcaccgccgccagcagccuggccgugacccugaugcuggccaucuucaucguguacauggugagcagagacaacgugagcugcagcaucugccuguga

SEQ ID NO: 186633 - RNA, 1758 nt, Artificial Sequence
  derived and/or modified CDS sequence (opt4) from hemagglutinin__InfluenzaB__ACO94661
augaaggccaucaucgugcugcugaugguggugaccagcaacgccgacagaaucugcaccggcaucaccagcagcaacagcccccacguggugaagaccgccacccagggcgaggugaacgugaccggcgugaucccccugaccaccacccccaccaagagccacuucgccaaccugaagggcaccgagaccagaggcaagcugugccccaagugccugaacugcaccgaccuggacguggcccugggcagacccaagugcaccggcaacauccccagcgccagagugagcauccugcacgaggugagacccgugaccagcggcugcuuccccaucaugcacgacagaaccaagaucagacagcugcccaaccugcugagaggcuacgagcacaucagacugagcacccacaacgugaucaacgccgagaacgcccccggcggccccuacaagaucggcaccagcggcagcugccccaacgugaccaacggcaacggcuucuucaccaccauggccugggccgugcccaagaacgacaacaacaagaccgccaccaacagccugaccaucgaggugcccuacaucugcaccgagggcgaggaccagaucaccguguggggcuuccacagcgacaacgagacccagauggccaagcuguacggcgacagcaagccccagaaguucaccagcagcgccaacggcgugaccacccacuacgugagccagaucggcggcuuccccaaccagaccgaggacggcggccugccccagagcggcagaaucgugguggacuacauggugcagaagagcggcaagaccggcaccaucaccuaccagagaggcauccugcugccccagaagguguggugcgccagcggcagaagcaaggugaucaagggcagccugccccugaucggcgaggccgacugccugcacgagaaguacggcggccugaacaagagcaagcccuacuacaccggcgagcacgccaaggccaucggcaacugccccaucugggugaagaccccccugaagcuggccaacggcaccaaguacagaccccccgccaagcugcugaaggagagaggcuucuucggcgccaucgccggcuuccuggagggcggcugggagggcaugaucgccggcuggcacggcuacaccagccacggcgcccacggcguggccguggccgccgaccugaagagcacccaggaggccaucaacaagaucaccaagaaccugaacagccugagcgagcuggaggugaagaaccugcagagacugagcggcgccauggacgagcugcacaacgagauccuggagcuggacgagaagguggacgaccugagagccgacaccaucagcagccagaucgagcuggccgugcugcugagcaacgagggcaucaucaacagcgaggacgagcaccugcuggcccuggagagaaagcugaagaagaugcugggccccagcgccguggagaucggcaacggcugcuucgagaccaagcacaagugcaaccagaccugccuggacagaaucgccgccggcaccuucgacgccggcgaguucagccugcccaccuucgacagccugaacaucaccgccgccagccugaacgacgacggccuggacaaccacaccauccugcuguacuacagcaccgccgccagcagccuggccgugacccugaugaucgccaucuucgugguguacauggugagcagagacaacgugagcugcagcaucugccuguga

SEQ ID NO: 186634 - RNA, 1758 nt, Artificial Sequence; identical to SEQ ID NO: 186574
  derived and/or modified CDS sequence (opt4) from hemagglutinin__InfluenzaB__ACR15622

SEQ ID NO: 186635 - RNA, 1758 nt, Artificial Sequence
  derived and/or modified CDS sequence (opt4) from hemagglutinin__InfluenzaB__ACR15633
augaaggccaucaucgugcugcugaugguggugaccagcaacgccgacagaaucugcaccggcaucaccagcagcaacagcccccacguggugaagaccgccacccagggcgaggugaacgugaccggcgugaucccccugaccaccacccccaccaagagccacuucgccaaccugaagggcaccgagaccagaggcaagcugugccccaagugccugaacugcaccgaccuggacguggcccugggcagacccaagugcaccggcaacauccccagcgccagagugagcauccugcacgaggugagacccgugaccagcggcugcuuccccaucaugcacgacagaaccaagaucagacagcugcccaaccugcugagaggcuacgagcacaucagacugagcacccacaacgugaucaacgccgagaacgcccccggcggccccuacaagaucggcaccagcggcagcugccccaacgugaccaacggcaacggcuucuucgccaccauggccugggccgugcccaagaacgacaacaacaagaccgccaccaacagccugaccaucgaggugcccuacaucugcaccgagggcgaggaccagaucaccguguggggcuuccacagcgacagcgagacccagauggccaagcuguacggcgacagcaagccccagaaguucaccagcagcgccaacggcgugaccacccacuacgugagccagaucggcggcuuccccaaccagaccgaggacggcggccugccccagagcggcagaaucgugguggacuacauggugcagaagagcggcaagaccggcaccaucaccuaccagagaggcauccugcugccccagaagguguggugcgccagcggcagaagcaaggugaucaagggcagccugccccugaucggcgaggccgacugccugcacgagaaguacggcggccugaacaagagcaagcccuacuacaccggcgagcacgccaaggccaucggcaacugccccaucugggugaagaccccccugaagcuggccaacggcaccaaguacagaccccccgccaagcugcugaaggagagaggcuucuucggcgccaucgccggcuuccuggagggcggcugggagggcaugaucgccggcuggcacggcuacaccagccacggcgcccacggcguggccguggccgccgaccugaagagcacccaggaggccaucaacaagaucaccaagaaccugaacagccugagcgagcuggaggugaagaaccugcagagacugagcggcgccauggacgagcugcacaacgagauccuggagcuggacgagaagguggacgaccugagagccgacaccaucagcagccagaucgagcuggccgugcugcugagcaacgagggcaucaucaacagcgaggacgagcaccugcuggcccuggagagaaagcugaagaagaugcugggccccagcgccguggagaucggcaacggcugcuucgagaccaagcacaagugcaaccagaccugccuggacagaaucgccgccggcaccuucgacgccggcgaguucagccugcccaccuucgacagccugaacaucaccgccgccagccugaacgacgacggccuggacaaccacaccauccugcuguacuacagcaccgccgccagcagccuggccgugacccugaugaucgccaucuucgugguguacauggugagcagagacaacgugagcugcagcaucugccuguga

SEQ ID NO: 186636 - RNA, 1755 nt, Artificial Sequence
  derived and/or modified CDS sequence (opt4) from hemagglutinin__InfluenzaB__ACR15644
augaaggccaucaucgugcugcugaugguggugaccagcaacgccgacagaaucugcaccggcaucaccagcagcaacagcccccacguggugaagaccgccacccagggcgaggugaacgugaccggcgugaucccccugaccaccacccccaccaagagcuacuucgccaaccugaagggcaccagaaccagaggcaagcugugccccgacugccugaacugcaccgaccuggacguggcccugggcagacccaugugcgugggcaccacccccagcgccaaggccagcauccugcacgaggugagacccgugaccagcggcugcuuccccaucaugcacgacagaaccaagaucagacagcugcccaaccugcugagaggcuacgagaacaucagacugagcacccagaacgugaucgacgccgagaacgcccccggcggccccuacagacugggcaccagcggcagcugccccaacgccaccagcaagagcggcuucuucgccaccauggccugggccgugcccaaggacaacaacaagaacgccaccaacccccugaccguggaggugcccuacgugugcaccgagggcgaggaccagaucaccguguggggcuuccacagcgacaacaagauccagaugaagaaccuguacggcgacagcaacccccagaaguucaccagcagcgccaacggcgugaccacccacuacgugagccagaucggcggcuuccccgcccagaccgaggacggcggccugccccagagcggcagaaucgugguggacuacauggugcagaagcccagaaagaccggcaccaucguguaccagagaggcgugcugcugccccagaagguguggugcgccagcggcagaagcaaggugaucaagggcagccugccccugaucggcgaggccgacugccugcacgagaaguacggcggccugaacaagagcaagcccuacuacaccggcgagcacgccaaggccaucggcaacugccccaucugggugaagaccccccugaagcuggccaacggcaccaaguacagaccccccgccaagcugcugaaggagagaggcuucuucggcgccaucgccggcuuccuggagggcggcugggagggcaugaucgccggcuggcacggcuacaccagccacggcgcccacggcguggccguggccgccgaccugaagagcacccaggaggccaucaacaagaucaccaagaaccugaacagccugagcgagcuggaggugaagaaccugcagagacugagcggcgccauggacgagcugcacaacgagauccuggagcuggacgagaagguggacgaccugagagccgacaccaucagcagccagaucgagcuggccgugcugcugagcaacgagggcaucaucaacagcgaggacgagcaccugcuggcccuggagagaaagcugaagaagaugcugggccccagcgccguggacaucggcaacggcugcuucgagaccaagcacaagugcaaccagaccugccuggacagaaucgccgccggcaccuucaacgccggcgaguucagccugcccaccuucgacagccugaacaucaccgccgccagccugaacgacgacggccuggacaaccacaccauccugcuguacuacagcaccgccgccagcagccuggccgugacccugaugcuggccaucuucaucguguacauggugagcagagacaacgugagcugcagcaucugccuguga

SEQ ID NO: 186637 - RNA, 1758 nt, Artificial Sequence
  derived and/or modified CDS sequence (opt4) from hemagglutinin__InfluenzaB__ACR15655
augaaggccaucaucgugcugcugaugguggugaccagcaacgccgacagaaucugcaccggcaucaccagcagcaacagcccccacguggugaagaccgccacccagggcgaggugaacgugaccggcgugaucccccugaccaccacccccaccaagagccacuucgccaaccugaagggcaccgagaccagaggcaagcugugccccaagugccugaacugcaccgaccuggacguggcccugggcagacccaagugcaccggcaacauccccagcgccagagugagcauccugcacgaggugagacccgugaccagcggcugcuuccccaucaugcacgacagaaccaagaucagacagcugcccaaccugcugagaggcuacgagcacaucagacugagcacccacaacgugaucaacgccgagaacgcccccggcggccccuacaagaucggcaccagcggcagcugccccaacgugaccaacggcaacggcuucuucgccaccauggccugggccgugcccaagaacgacaacaacaagaccgccaccaacagccugaccaucgaggugcccuacaucugcaccgagggcgaggaccagaucaccguguggggcuuccacagcgacagcgagacccagauggccaagcuguacggcgacagcaagccccagaaguucaccagcagcgccaacggcgugaccacccacuacgugagccagaucggcggcuuccccaaccagaccgaggacggcggccugccccagagcggcagaaucgugguggacuacauggugcagaagagcggcaagaccggcaccaucaccuaccagagaggcauccugcugccccagaagguguggugcgccagcggcagaagcaaggugaucaagggcagccugccccugaucggcgaggccgacugccugcacgagaaguacggcggccugaacaagagcaagcccuacuacaccggcgagcacgccaaggccaucggcaacugccccaucugggugaagaccccccugaagcuggccaacggcaccaaguacagaccccccgccaagcugcugaaggagagaggcuucuucggcgccaucgccggcuuccuggagggcggcugggagggcaugaucgccggcuggcacggcuacaccagccacggcgcccacggcguggccguggccgccgaccugaagagcacccaggaggccaucaacaagaucaccaagaaccugaacagccugagcgagcuggaggugaagaaccugcagagacugagcggcgccauggacgagcugcacaacgagauccuggagcuggacgagaagguggacgaccugagagccgacaccaucagcagccagaucgagcuggccgugcugcugagcaacgagggcaucaucaacagcgaggacgagcaccugcuggcccuggagagaaagcugaagaagaugcugggccccagcgccguggagaucggcaacggcugcuucgagaccaagcacaagugcaaccagaccugccuggacagaaucgccgccggcaccuucgacgccggcgaguucagccugcccaccuucgacagccugaacaucaccgccgccagccugaacgacgacggccuggacaaccacaccauccugcuguacuacagcaccgccgccagcagccuggccgugacccugaugaucgccaucuucgugguguacauggugagcagagacaacaucagcugcagcaucugccuguga

SEQ ID NO: 186638 - RNA, 1758 nt, Artificial Sequence
  derived and/or modified CDS sequence (opt4) from hemagglutinin__InfluenzaB__ACR15666
augaaggccaucaucgugcugcugaugguggugaccagcaacgccgacagaaucugcaccggcaucaccagcagcaacagcccccacguggugaagaccgccacccagggcgaggugaacgugaccggcgugaucccccugaccaccacccccaccaagagccacuucgccaaccugaagggcaccgagaccagaggcaagcugugccccaagugccugaacugcaccgaccuggacguggcccugggcagacccaagugcaccggcaacauccccagcgccagagugagcauccugcacgaggugagacccgugaccagcggcugcuuccccaucaugcacaacagaaccaagaucagacagcugcccaaccugcugagaggcuacgagcacaucagacugagcacccacaacgugaucaacgccgagaacgcccccggcggccccuacaagaucggcaccagcggcagcugccccaacgugaccaacggcaacggcuucuucgccaccauggccugggccgugcccaagaacgacaacaacaagaccgccaccaacagccugaccaucgaggugcccuacaucugcaccgagggcgaggaccagaucaccguguggggcuuccacagcgacgacgagacccagauggccaagcuguacggcgacagcaagccccagaaguucaccagcagcgccaacggcgugaccacccacuacgugagccagaucggcggcuuccccaaccagaccgaggacggcggccugccccagagcggcagaaucgugguggacuacauggugcagaagagcggcaagaccggcaccaucaccuaccagagaggcauccugcugccccagaagguguggugcgccagcggcagaagcaaggugaucaagggcagccugccccugaucggcgaggccgacugccugcacgagaaguacggcggccugaacaagagcaagcccuacuacaccggcgagcacgccaaggccaucggcaacugccccaucugggugaagaccccccugaagcuggccaacggcaccaaguacagaccccccgccaagcugcugaaggagagaggcuucuucggcgccaucgccggcuuccuggagggcggcugggagggcaugaucgccggcuggcacggcuacaccagccacggcgcccacggcguggccguggccgccgaccugaagagcacccaggaggccaucaacaagaucaccaagaaccugaacagccugagcgagcuggaggugaagaaccugcagagacugagcggcgccauggacgagcugcacaacgagauccuggagcuggacgagaagguggacgaccugagagccgacaccaucagcagccagaucgagcuggccgugcugcugagcaacgagggcaucaucaacagcgaggacgagcaccugcuggcccuggagagaaagcugaagaagaugcugggccccagcgccguggagaucggcaacggcugcuucgagaccaagcacaagugcaaccagaccugccuggacagaaucgccgccggcaccuucgacgccggcgaguucagccugcccaccuucgacagccugaacaucaccgccgccagccugaacgacgacggccuggacaaccacaccauccugcuguacuacagcaccgccgccagcagccuggccgugacccugaugaucgccaucuucgugguguacauggugagcagagacaacgugagcugcagcaucugccuguga

SEQ ID NO: 186639 - RNA, 1758 nt, Artificial Sequence
  derived and/or modified CDS sequence (opt4) from hemagglutinin__InfluenzaB__ACR15677
augaaggccaucaucgugcugcugaugguggugaccagcaacgccgacagaaucugcaccggcaucaccagcagcaacagcccccacguggugaagaccgccacccagggcgaggugaacgugaccggcgugaucccccugaccaccacccccaccaagagccacuucgccaaccugaagggcaccaagaccagaggcaagcugugccccaagugccugaacugcaccgaccuggacguggcccugggcagacccaagugcaccggcaacauccccagcgccaaggugagcauccugcacgaggugagacccgugaccagcggcugcuuccccaucaugcacgacagaaccaagaucagacagcugcccaaccugcugagaggcuacgagcacaucagacugagcacccacaacgugaucaacgccgagaaggcccccggcggccccuacaagaucggcaccagcggcagcugccccaacaucaccaacggcaacggcuucuucgccaccauggccugggccgugcccaagaacgacaacaacaagaccgccaccaacagccugaccaucgaggugcccuacaucugcaccgagggcgaggaccagaucaccguguggggcuuccacagcgacaacgaggcccagauggccaagcuguacggcgacagcaagccccagaaguucaccagcagcgccaacggcgugaccacccacuacgugagccagaucggcggcuuccccaaccagaccgaggacggcggccugccccagagcggcagaaucgugguggacuacauggugcagaagagcggcaagaccggcaccaucaccuaccagagaggcauccugcugccccagaagguguggugcgccagcggcagaagcaaggugaucaagggcagccugccccugaucggcgaggccgacugccugcacgagaaguacggcggccugaacaagagcaagcccuacuacaccggcgagcacgccaaggccaucggcaacugccccaucugggugaagaccccccugaagcuggccaacggcaccaaguacagaccccccgccaagcugcugaaggagagaggcuucuucggcgccaucgccggcuuccuggagggcggcugggagggcaugaucgccggcuggcacggcuacaccagccacggcgcccacggcguggccguggccgccgaccugaagagcacccaggaggccaucaacaagaucaccaagaaccugaacagccugagcgagcuggaggugaagaaccugcagagacugagcggcgccauggacgagcugcacaacgagauccuggagcuggacgagaagguggacgaccugagagccgacaccaucagcagccagaucgagcuggccgugcugcugagcaacgagggcaucaucaacagcgaggacgagcaccugcuggcccuggagagaaagcugaagaagaugcugggccccagcgccguggagaucggcaacggcugcuucgagaccaagcacaagugcaaccagaccugccuggacagaaucgccgccggcaccuucgacgccggcgaguucagccugcccaccuucgacagccugaacaucaccgccgccagccugaacgacgacggccuggacaaccacaccauccugcuguacuacagcaccgccgccagcagccuggccgugacccugaugaucgccaucuucgugguguacauggugagcagagacaacgugagcugcagcaucugccuguga

SEQ ID NO: 186640 - RNA, 1755 nt, Artificial Sequence; identical to SEQ ID NO: 186627
  derived and/or modified CDS sequence (opt4) from hemagglutinin__InfluenzaB__ACR15710

SEQ ID NO: 186641 - RNA, 1755 nt, Artificial Sequence
  derived and/or modified CDS sequence (opt4) from hemagglutinin__InfluenzaB__ACR15721
augaaggccaucaucgugcugcugaugguggugaccagcaacgccgacagaaucugcaccggcaucaccagcagcaacagcccccacguggugaagaccgccacccagggcgaggugaacgugaccggcgugaucccccugaccaccacccccaccaagagccacuucgccaaccugaagggcaccaagaccagaggcaagcugugccccaacugccugaacugcaccgaccuggacguggcccugggcagacccaugugcgugggcaccacccccagcgccaaggccagcauccugcacgaggugagacccgugaccagcggcugcuuccccaucaugcacgacagaaccaagaucagacagcugcccaaccugcugagaggcuacgagaacaucagacugagcacccagaacgugaucaacgccgagaaggcccccggcggccccuacagacugggcaccagcggcagcugccccaacgccaccagcagaagcggcuucuucgccaccauggccugggccgugcccagagacgacaacaagaccgccaccaacccccugaccguggaggugcccuacgugugcaccgagggcgaggaccagaucaccguguggggcuuccacagcgacaacaaggcccagaugaagaaccuguacggcgacagcaacccccagaaguucaccagcagcgccaacggcgugaccacccacuacgugagccagaucggcggcuuccccgaccagaccgaggacggcggccugccccagagcggcagaaucgugguggacuacauggugcagaagcccggcaagaccggcaccaucguguaccagagaggcgugcugcugccccagaagguguggugcgccagcggcagaagcaaggugaucaagggcagccugccccugaucggcgaggccgacugccugcacgagaaguacggcggccugaacaagagcaagcccuacuacaccggcgagcacgccaaggccaucggcaacugccccaucugggugaagaccccccugaagcuggccaacggcaccaaguacagaccccccgccaagcugcugaaggagagaggcuucuucggcgccaucgccggcuuccuggagggcggcugggagggcaugaucgccggcuggcacggcuacaccagccacggcgcccacggcguggccguggccgccgaccugaagagcacccaggaggccaucaacaagaucaccaagaaccugaacagccugagcgagcuggaggugaagaaccugcagagacugagcggcgccauggacgagcugcacaacgagauccuggagcuggacgagaagguggacgaccugagagccgacaccaucagcagccagaucgagcuggccgugcugcugagcaacgagggcaucaucaacagcgaggacgagcaccugcuggcccuggagagaaagcugaagaagaugcugggccccagcgccguggacaucggcaacggcugcuucgagaccaagcacaagugcaaccagaccugccuggacagaaucgccgccggcaccuucaacgccggcgaguucagccugcccaccuucgacagccugaacaucaccgccgccagccugaacgacgacggccuggacaaccacaccauccugcuguacuacagcaccgccgccagcagccuggccgugacccugaugaucgccaucuucaucguguacauggugagcagagacaacgugagcugcagcaucugccuguga

SEQ ID NO: 186642 - RNA, 1758 nt, Artificial Sequence
  derived and/or modified CDS sequence (opt4) from hemagglutinin__InfluenzaB__ACR39336
augaaggccaucaucgugcugcugaugguggugaccagcaacgccgacagaaucugcaccggcaucaccagcagcaacagcccccacguggugaagaccgccacccagggcgaggugaacgugaccggcgugaucccccugaccaccacccccaccaagagccacuucgccaaccugaagggcaccgagaccagaggcaagcugugccccaagugccugaacugcaccgaccuggacguggcccugggcagacccaagugcaccggcaacauccccagcgccagagugagcauccugcacgaggugagacccgugaccagcggcugcuuccccaucaugcacgacagaaccaagaucagacagcugcccaaccugcugagaggcuacgagcacaucagacugagcacccacaacgugaucaacgccgagaacgcccccggcggccccuacaagaucggcaccagcggcagcugccccaacgugaccaacggcaacggcuucuucgccaccauggccugggccgugcccaagaacgacaacaacaagaccgccaccaacagccugaccaucgaggugcccuacaucugcaccgagggcgaggaccagaucaccguguggggcuuccacagcgacaacgaggcccagauggccaagcuguacggcgacagcaagccccagaaguucaccagcagcgccaacggcgugaccacccacuacgugagccagaucggcggcuuccccaaccagaccgaggacggcggccugccccagagcggcagaaucgugguggacuacauggugcagaagagcggcaagaccggcaccaucaccuaccagagaggcauccugcugccccagaagguguggugcgccagcggcagaagcaaggugaucaagggcagccugccccugaucggcgaggccgacugccugcacgagaaguacggcggccugaacaagagcaagcccuacuacaccggcgagcacgccaaggccaucggcaacugccccaucugggugaagaccccccugaagcuggccaacggcaccaaguacagaccccccgccaagcugcugaaggagagaggcuucuucggcgccaucgccggcuuccuggagggcggcugggagggcaugaucgccggcuggcacggcuacaccagccacggcgcccacggcguggccguggccgccgaccugaagagcacccaggaggccaucaacaagaucaccaagaaccugaacagccugagcgagcuggaggugaagaaccugcagagacugagcggcgccauggacgagcugcacaacgagauccuggagcuggacgagaagguggacgaccugagagccgacaccaucagcagccagaucgagcuggccgugcugcugagcaacgagggcaucaucaacagcgaggacgagcaccugcuggcccuggagagaaagcugaagaagaugcugggccccagcgccguggagaucggcaacggcugcuucgagaccaagcacaagugcaaccagaccugccuggacagaaucgccgccggcaccuucgacgccggcgaguucagccugcccaccuucgacagccugaacaucaccgccgccagccugaacgacgacggccuggacaaccacaccauccugcuguacuacagcaccgccgccagcagccuggccgugacccugaugaucgccaucuucgugguguacauggugagcagagacaacgugagcugcagcaucugccuguga

SEQ ID NO: 186643 - RNA, 1755 nt, Artificial Sequence
  derived and/or modified CDS sequence (opt4) from hemagglutinin__InfluenzaB__AEA51386
augaaggccaucaucgugcugcugaugguggugaccagcaacgccgacagaaucugcaccggcaucaccagcagcaacagcccccacguggugaagaccgccacccagggcgaggugaacgugaccggcgugaucccccugaccaccacccccaccaagagcuacuucgccaaccugaagggcaccagaaccagaggcaagcugugccccgacugccugaacugcaccgaccuggacguggcccugggcagacccaugugcgugggcaccacccccagcgccaaggccagcauccugcacgaggugagacccgugaccagcggcugcuuccccaucaugcacgacagaaccaagaucagacagcugcccaaccugcugagaggcuacgagaacaucagacugagcacccagaacgugaucgacgccgagaaggcccccggcggccccuacagacugggcaccagcggcagcugccccaacgccaccagcaagagcggcuucuucgccaccauggccugggccgugcccaaggacaacuacaagaacgccaccaacccccugaccguggaggugcccuacaucugcaccgagggcgagggccagaucaccguguggggcuuccacagcgacaacaagccccagaugaagaaccuguacggcgacagcaacccccagaaguucaccagcagcgccagcggcgugaccacccacuacgugagccagaucggcgacuuccccgaccagaccgaggacggcggccugccccagagcggcagaaucgugguggacuacaugaugcagaagcccggcaagaccggcaccaucguguaccagagaggcgugcugcugccccagaagguguggugcgccagcggcagaagcaaggugaucaagggcagccugccccugaucggcgaggccgacugccugcacgagaaguacggcggccugaacaagagcaagcccuacuacaccggcgagcacgccaaggccaucggcaacugccccaucugggugaucaccccccagaagcuggccaacggcaccaccuucagcccccccgccaagcugcugaaggagagaggcuucuucggcgccaucgccggcuuccuggagggcggcugggagggcaugaucgccggcuggcacggcuacaccagccacggcgcccacggcguggccguggccgccgaccugaagagcacccaggaggccaucaacaagaucaccaagaaccugaacagccugagcgagcuggaggugaagaaccugcagagacugagcggcgccauggacgagcugcacaacgagauccuggagcuggacgagaagguggacgaccugagagccgacaccaucagcagccagaucgagcuggccgugcugcugagcaacgagggcaucaucaacagcgaggacgagcaccugcuggcccuggagagaaagcugaagaagaugcugggccccagcgccguggacaucggcaacggcugcuucgagaccaagcacaagugcaaccagaccugccuggacagaaucgccgccggcaccuucaacgccggcgaguucagccugcccaccuucgacagccugaacaucaccgccgccagccugaacgacgacggccuggacaaccacaccauccugcuguacuacagcaccgccgccagcagccuggccgugacccugaugcuggccaucuucaucguguacauggugagcagagacaacgugagcugcagcaucugccuguga

SEQ ID NO: 186644 - RNA, 1755 nt, Artificial Sequence
  derived and/or modified CDS sequence (opt4) from hemagglutinin__InfluenzaB__AEA51387
augaaggccaucaucgugcugcugaugguggugaccagcaacgccgacagaaucugcaccgagaucaccagcagcaacagcccccugguggugaagaccgccacccagggcgaggugaacgugaccggcgugaucccccugaccaccacccccaccaagagcuacuucgccaaccugaagggcaccagaaccagaggcaagcugugccccgacugccugaacugcaccgaccuggacguggcccugggcagacccaugugcgugggcaccacccccagcgccaaggccagcauccugcacgaggugagacccgugaccagcggcugcuuccccaucaugcacgacagaaccaagaucagacagcugcccaaccugcugagaggcuacgagaacaucagacugagcacccagaacgugaucgacgccgagaaggcccccggcggccccuacagacugggcaccagcggcagcugccccaacgccaccagcaagaucggcuucuucgccaccauggccugggccgugcccaaggacaacuacaagaacgccaccaacccccugaccguggaggugcccuacaucugcaccgagggcgaggaccagaucaccguguggggcuuccacagcgacaacaagacccagaugaagaaccuguacggcgacagcaacccccagaaguucaccagcagcgccaacggcgugaccacccacuacgugagccagaucggcgacuuccccgaccagaccgaggacggcggccugccccagagcggcagaaucgugguggacuacaugaugcagaagcccggcaagaccggccccaucguguaccagagaggcgugcugcugccccagaagguguggugcgccagcggcagaagcaaggugaucaagggcagccugccccugaucggcgaggccgacugccugcacgagaaguacggcggccugaacaagagcaaguacagccacaccggcgaccacgccaagacccugggcaacugccccaucugggugaagaccccccugaagcuggccaacggcaccaaguacagaccccccgccaagcugcugaaggagagaggcuucuucggcgccaucgccggcuuccuggagggcggcugggagggcaugaucgccggcuggcacggcuacaccagccacggcgcccacggcguggccguggccgccgaccugaagagcacccaggaggccaucaacaagaucaccaagaaccugaacagccugagcgagcuggaggugaagaaccugcagagacugagcggcgccauggacgagcugcacaacgagauccuggagcuggacgagaagguggacgaccugagagccgacaccaucagcagccagaucgagcuggccgugcugcugagcaacgagggcaucaucaacagcgaggacgagcaccugcuggcccuggagagaaagcugaagaagaugcugggccccagcgccguggacaucggcaacggcugcuucgagaccaagcacaagugcaaccagaccugccuggacagaaucgccgccggcaccuucaacgccggcgaguucagccugcccaccuucgacagccugaacaucaccgccgccagccugaacgacgacggccuggacaaccacaccauccugcuguacuacagcaccgccgccagcagccuggccgugacccugaugcuggccaucuucaucguguacauggugagcagagacaacgugagcugcagcaucugccuguga

SEQ ID NO: 186645 - RNA, 1755 nt, Artificial Sequence
  derived and/or modified CDS sequence (opt4) from hemagglutinin__InfluenzaB__AEA51388
augaaggccaucaucgugcugcugaugguggugaccagcaacgccgacagaaucugcaccggcaucaccagcagcaacagcccccacguggugaagaccgccacccagggcgaggugaacgugaccggcgugaucccccugaccaccacccccaccaagagcuacuucgccaaccugaagggcaccagaaccagaggcaagcugugccccgacugccugaacugcaccgaccuggacguggcccugggcagacccaugugcgugggcaccacccccagcgccaaggccagcauccugcacgaggugagacccgugaccagcggcugcuuccccaucaugcacgacagaaccaagaucagacagcugcccaaccugcugagaggcuacgagaacaucagacugagcacccagaacgugaucgacgccgagaaggcccccggcggccccuacagacugggcaccagcggcagcugccccaacgccaccagcaagaucggcuucuucgccaccauggccugggccgugcccaaggacaacuacaagaacgccaccaacccccugaccguggaggugcccuacaucugcaccgagggcgaggaccagaucaccguguggggcuuccacagcgacaacaagacccagaugaagaaccuguacggcgacagcaacccccagaaguucaccagcagcgccaacggcgugaccacccacuacgugagccagaucggcgacuuccccgaccagaccgaggacggcggccugccccagagcggcagaaucgugguggacuacaugaugcagaagcccggcaagaccggcaccaucguguaccagagaggcgugcugcugccccagaagguguggugcgccagcggcagaagcaaggugaucaagggcagccugccccugaucggcgaggccgacugccugcacgagaaguacggcggccugaacaagagcaagcccagcuacaccggcgagcacgccaaggccaagggcaacugccccaucugggugaacaccccccugaagcuggccaacggcaccaaguacagaccccccgccaagcuguucaaggagagaggcuucuucggcgccaucgccggcuuccuggagggcggcugggagggcaugaucgccggcuggcacggcuacaccagccacggcgcccacggcguggccguggccgccgaccugaagagcacccaggaggccaucaacaagaucaccaagaaccugaacagccugagcgagcuggaggugaagaaccugcagagacugagcggcgccauggacgagcugcacaacgagauccuggagcuggacgagaagguggacgaccugagagccgacaccaucagcagccagaucgagcuggccgugcugcugagcaacgagggcaucaucaacagcgaggacgagcaccugcuggcccuggagagaaagcugaagaagaugcugggccccagcgccguggacaagggcaacggcugcuucgagaccaagcacaagugcaaccagaccugccuggacagaaucgccgccggcaccuucaacgccggcgaguucagccugcccaccuucgacagccugaacaucaccgccgccagccugaacgacgacggccuggacaaccacaccauccugcuguacuacagcaccgccgccagcagccuggccgugacccugaugcuggccaucuucaucguguacauggugagcagagacaacgugagcugcagcaucugccuguga

SEQ ID NO: 186646 - RNA, 1755 nt, Artificial Sequence
  derived and/or modified CDS sequence (opt4) from hemagglutinin__InfluenzaB__AEA51389
augaaggccaucaucgugcugcugaugguggugaccagcaacgccgacagaaucugcaccggcaucaccagcagcaucagcccccugguggacaagaccgccacccagggcgaggugaacgugaccggcgugaucccccugaccaccacccccaccaagagcuacuucgccaacgugaagggcaccagaaccagaggcaagcugugccccgacugccugaacugcaccgaccuggacguggcccugggcagacccaugugcgugggcaccacccccagcgccaaggccagcauccugcacgaggugagacccgugaccagcggcugcuuccccaucaugcacgacagaaccaagaucagacagcugcccaaccugcugagaggcuacgagaacaucagacugagcacccagaacgugaucgacgcccagaaggcccccggcggccccuacagacugggcaccagcggcagcugccccaacgccaccagcaagaucggcuucuucgccaccauggccugcgccgugcccaaggacaacuacaagaacgccaccaacccccugaccguggaggugcccuacaucagaaccgagggcgaggaccagaucaccguguggggcuuccacagcgacaacaagacccagaugaagaaccuguacggcgacagcaacccccccaaguucaccagcagcgccaacggcgugaccacccacuacgugagccagaccggcgacuuccccgaccagaccgaggacggcggccugccccccagcggcagaaucgugguggacuacaugaugcagaagcccggcaagaccggcaccaucgccuaccagagaggcgugcugcugccccagaagguguggugcgccagcggcagaagcaaggugaucaagggcagccugccccugaucggcgaggccgacugccugcacgagaaguacggcggccugaacaagagcaagcccccccacaccggcgagcacaccaaggccaucggcaacugccccaucugggugaagaccccccugaagcuggccaacggcaccaaguacagacccagcgccaagcugcugaaggagagaggcuucuucggcgccaucgccggcuuccuggagggcggcugggagggcaugaucgccggcuggcacggcuacaccagccacggcgcccacggcguggccguggccgccgaccugaagagcacccaggaggccaucaacaagaucaccaagaaccugaacagccugagcgagcuggaggugaagaaccugcagagacugagcggcgccauggacgagcugcacaacgagauccuggagcuggacgagaagguggacgaccugagagccgacaccaucagcagccagaucgagcuggccgugcugcugagcaacgagggcaucaucaacagcgaggacgagcaccugcuggcccuggagagaaagcugaagaagaugcugggccccagcgccguggacaucggcaacggcugcuucgagaccaagcacaagugcaaccagaccugccuggacagaaucgccgccggcaccuucaacgccggcgaguucuuccugcccaccuucgacagccugaacaucaccgccgccagccugaacgacgacggccuggacaaccacaccauccugcuguacuacagcaccgccgccagcagccuggccgugacccugaugcuggccaucuucaucguguacauggugagcagagacaacgugagcugcagcaucugccuguga

SEQ ID NO: 186647 - RNA, 1755 nt, Artificial Sequence
  derived and/or modified CDS sequence (opt4) from hemagglutinin__InfluenzaB__AEA51390
augaaggccaucaucgugcugcugaugguggugaccagcaacgccgacagaaucugcaccggcaucaccagcagcaacagcccccacguggugaagaccgccacccagggcgaggugaacgugaccggcgugaucccccugaccaccacccccaccaagagcuacuucgccaaccugaagggcaccagaaccagaggcaagcugugccccgacugccugaacugcaccgaccuggacguggcccugggcagacccaugugcgugggcaccacccccagcgccaaggccagcauccugcacgaggugagacccgugaccagcggcugcuuccccaucaugcacgacagaaccaagaucagacagcugcccaaccugcugagaggcuacgagaacaucagacugagcacccagaacgugaucgacgccgagaaggcccccggcggccccuacagacugggcaccagcggcagcugccccaacgccaccagcaagaucggcuucuucgccaccauggccugggccgugcccaaggacaacuacaagaacgccaccaacccccugaccguggaggugcccuacaucugcaccgagggcgaggaccagaucaccguguggggcuuccacagcgacaacaagacccagaugaagaaccuguacggcgacagcaacccccagaaguucaccagcagcgccaacggcgugaccacccacuacgugagccagaucggcgacuuccccgaccagaccgaggacggcggccugccccccagcggcagaaucgugguggacuacaugaugcagaagcccggcaagaccggcaccaucguguaccagagaggcggccugcugccccagaagguguggugcgccagcggcagaagcaaggugaucaagggcagccugccccugaucggcgaggccgacugccugcacgagaaguacggcggccugaacaagagcaagcccuacuacaccggcgagcacgccaaggccaucggcaacugccccaucugggugaagcccccccugaagcuggccaacggcaccaaguacagaccccccgccaagcuguucaaggagagaggcuucuucggcgcccuggccggcuuccuggagggcggcugggagggcaugaucgccggcuggcacggcuacaccagccacggcgcccacggcguggccguggccgccgaccugaagagcacccaggaggccaucaacaagaucaccaagaaccugaacagccugagcgagcuggaggugaagaaccugcagagacugagcggcgccauggacgagcugcacaacgagauccuggagcuggacgagaagguggacgaccugagagccgacaccaucagcagccagaucgagcuggccgugcugcugagcaacgagggcaucaucaacagcgaggacgagcaccugcuggcccuggagagaaagcugaagaagaugcugggccccagcgccguggacaucggcaacggcugcuucgagaccaagcacaagugcaaccagaccugccuggacagaaucgccgccggcaccuucaacgccggcgaguucagccugcccaccuucgacagccugaacaucaccgccgccagccugaacgacgacggccuggacaaccacaccauccugcuguacuacagcaccgccgccagcagccuggccgugacccugaugcuggccaucuucaucguguacauggugagcagagacaacgugagcugcagcaucugccuguga

SEQ ID NO: 186648 - RNA, 1758 nt, Artificial Sequence
  derived and/or modified CDS sequence (opt4) from hemagglutinin__InfluenzaB__AEA51391
augaaggccaucaucgugcugcugaugguggugaccagcaacgccgacagaaucugcaccggcaucaccagcagcaacagcccccacguggugaagaccgccacccagggcgaggugaacgugaccggcgugaucccccugaccaccacccccaccaagagccacuucgccaaccugaagggcaccgagaccagaggcaagcugugccccaagugccugaacugcaccgaccuggacguggcccugggcagacccaagugcaccggcaagauccccagcgccagagugagcauccugcacgaggugagacccgugaccagcggcugcuuccccaucaugcacgacagaaccaagaucagacagcugcccaaccugcugagaggcuacgagcacaucagacugagcacccacaacgugaucaacgccgagaacgcccccggcggccccuacaagaucggcaccagcggcagcugccccaacaucaccaacggcaacggcuucuucgccaccauggccugggccgugcccaagaacgacaagaacaagaccgccaccaacccccugaccaucgaggugcccuacaucugcaccgagggcgaggaccagaucaccguguggggcuuccacagcgugaacgagacccagauggccaagcuguacggcgacagcaagccccagaaguucaccagcagcgccaacggcgugaccacccacuacaucagccagaucggcggcuuccccaaccagaccgaggacggcggccugccccagagcggcagaaucgugguggacuacauggugcagaagagcggcaagaccggcaccaucaccuaccagagaggcauccugcugccccagaagguguggugcgccagcggcagaagcaaggugaucaagggcagccugccccugaucggcgaggccgacugccugcacgagaaguacggcggccugaacaagagcaagcccuacuacaccggcgagcacgccaaggccaucggcaacugccccaucugggugaagaccccccugaagcuggccaacggcaccaaguacagaccccccgccaagcugcugaaggagagaggcuucuucggcgccaucgccggcuuccuggagggcggcugggagggcaugaucgccggcuggcacggcuacaccagccacggcgcccacggcgugcccguggccgccgaccugaagagcacccaggaggccaucaacaagaucaccaagaaccugaacagccugagcgagcuggaggugaagaaccugcagagacugagcggcgccauggacgagcugcacaacgagauccuggagcuggacgagaagguggacgaccugagagccgacaccaucagcagccagaucgagcuggccgugcugcugagcaacgagggcaucaucaacagcgaggacgagcaccugcuggcccuggagagaaagcugaagaagaugcugggccccagcgccguggagaucggcaacggcugcuucgagaccaagcacaagugcaaccagaccugccuggacagaaucgccgccggcaccuucgacgccggcgaguucagccugcccaccuucgacagccugaacaucaccgccgccagccugaacgacgacggccuggacaaccacaccauccugcuguacuacagcaccgccgccagcagccuggccgugacccugaugaucgccaucuucgugguguacauggugagcagagacaacgugagcugcagcaucugccuguga

SEQ ID NO: 186649 - RNA, 1758 nt, Artificial Sequence
  derived and/or modified CDS sequence (opt4) from hemagglutinin__InfluenzaB__AEA51392
augaaggccaucaucgugcugcugaugguggugaccagcaacgccgacagaaucugcaccggcaucaccagcagcaacagcccccacguggugaagaccgccacccagggcgaggugaacgugaccggcgugaucccccugaccaccacccccaccaagagccacuucgccaaccugaagggcaccgagaccagaggcaagcugugccccaagugccccaacugcaccgaccuggacguggcccugggcagacccaagugcaccggcaagauccccagcgccagagugagcauccugcacgaggugagacccgugaccagcggcugcuuccccaucaugcacgacagaaccaagaucagacagcugcccaaccugcugagaggcuacgagcacaucagacugagcacccacaacgugaucaacgccgagaacgcccccggcggccccuacaagaucggcaccagcggcagcugccccaacgugaccaacggcaacggcuucuucgccaccauggccugggccgugcccaagaacgacaagaacaagaccgccaccaacccccugaccaucgaggugcccuacaucugcaccgagggcgaggaccagaucaccguguggggcuuccacagcgacaacgagacccagauggccaagcuguacggcgacagcaagccccagaaguucaccagcagcgccaacggcggcaccacccacuacgugagccagaucggcggcuuccccaaccagaccgaggacggcggccugccccagagcggcagaaucgugguggacuacauggugcagaagagcggcaagaccggcaccaucaccuaccagagaggcauccugcugccccagaagguguggugcgccagcggcagaagcaaggugaucaagggcagccugccccugaucggcgaggccgacugccugcacgagaaguacggcggccugaacaagagcaagcccuacuacaccggcgagcacgccaaggccaucggcaacugccccaucugggugaagaccccccugaagcuggccaacggcaccaagaacaucgcccccgccaagcugcugaaggagagaggcuucuucggcgccaucgccggcuuccuggagggcggcugggagggcaugaucgccggcuggcacggcuacaccagccacggcgcccacggcguggccguggccgccgaccugaagagcacccaggaggccaucaacaagaucaccaagaaccugaacagccugagcgagcuggaggugaagaaccugcagagacugagcggcgccauggacgagcugcacaacgagauccuggagcuggacgagaagguggacgaccugagagccgacaccaucagcagccagaucgagcuggccgugcugcugagcaacgagggcaucaucaacagcgaggacgagcaccugcuggcccuggagagaaagcugaagaagaugcugggccccagcgccguggagaucggcaacggcugcuucgagaccaagcacaagugcaaccagaccugccuggacagaaucgccgccggcaccuucgacgccggcgaguucagccugcccaccuucgacagccugaacaucaccgccgccagccugaacgacgacggccuggacaaccacaccauccugcuguacuacagcaccgccgccagcagccuggccgugacccugaugaucgccaucuucgugguguacauggugagcagagacaacgugagcugcagcaucugccuguga

SEQ ID NO: 186650 - RNA, 1755 nt, Artificial Sequence
  derived and/or modified CDS sequence (opt4) from hemagglutinin__InfluenzaB__AEA51395
augaaggccaucaucgugcugcugaugguggugaccagcaacgccgacagaaucugcaccggcaucaccagcagcaacagcccccacguggugaagaccgccacccugggcgaggugaacgugaccggcgugaucccccugaccaccacccccaccaagagcuacuucgccaaccugaagggcaccagaaccagaggcaagcugugccccgacugccugaacugcaccgaccuggacguggcccugggcagacccaugugcgugggcaccacccccagcgccaaggccagcauccugcacgaggugagacccgugaccagcggcugcuuccccaucaugcacgacagaaccaagaucagacagcugcccaaccugcugagaggcuacgagaacaucagacugagcacccagaacgugaucgacgccgagaaggcccccggcggccccuacagacugggcaccagcggcagcugccccaacgccaccagcaagaucggcuucuucgccaccauggccugggccgugcccaaggacaacuacaagaacgccaccaacccccugaccguggaggugcccuacaucugcaccgagggcgaggaccaguucaccguguggggcuuccacagcgacaacaucacccagcugaagaaccuguucggcgacagcaacccccagagauucaccagcagcgccaacggcgugaccacccacuacgugagccagaucggcgacuuccccgaccagaccgaggacggcggccugccccagagcggcagaaucgugguggacuacgugaugcagaagcccggcaagaccggcaccaucguguaccagagaggcgugcugcugccccccaaggugugguucgccagaggcagaagcaaggugaucaagggcagccugccccugaucggcgaggccgacugcauccacgagaaguacggcggccugaacaagagcaagcccuacuacaccggcgagcacgccaaggccaucggcaacugccccaucugggugaagaccccccugaagcuggccaacggcaccaaguacagaccccccgccaagcugcugaaggagagaggcuucuucggcgccaucgccggcuuccuggagggcggcugggagggcaugaucgccggcuggcacggcuacaccagccacggcgcccacggcguggccguggccgccgaccugaagagcacccaggaggccaucaacaagaucaccaagaaccugaacagccugagcgagcuggaggugaagaaccugcagagacugagcggcgccauggacgagcugcacaacgagauccuggagcuggacgagaagguggacgaccugagagccgacaccaucagcagccagaucgagcuggccgugcugcugagcaacgagggcaucaucaacagcgaggacgagcaccugcuggcccuggagagaaagcugaagaagaugcugggccccagcgccguggacaucggcaacggcugcuucgagaccaagcacaagugcaaccagaccugccuggacagaaucgccgccggcaccuucaacgccggcgaguucagccugcccaccuucgacagccugaacaucaccgccgccagccugaacgacgacggccuggacaaccacaccauccugcuguacuacagcaccgccgccagcagccuggccgugacccugaugcuggccaucuucaucguguacauggugagcagagacaacgugagcugcagcaucugccuguga

SEQ ID NO: 186651 - RNA, 1758 nt, Artificial Sequence
  derived and/or modified CDS sequence (opt4) from hemagglutinin__InfluenzaB__AEA51398
augaaggccaucaucgugcugcugaugguggugaccagcaacgccgacagaaucugcaccggcaucaccagcagcaacagcccccacguggugaagaccgccacccagggcgaggugaacgugaccggcgugaucccccugaccaccacccccaccaagagccacuucgccaaccugaagggcaccgagaccagaggcaagcugugccccaagugccccaacugcaccgaccuggacguggcccugggcagacccaagugcaccggcaagauccccagcgccagagugagcauccugcacgaggugagacccgugaccagcggcugcuuccccaucaugcacgacagaaccaagaucagacagcugcccaaccugcugagaggcuacgagcacaucagacugagcacccacaacgugaucaacgccgagaacgcccccggcggccccuacaagaucggcaccagcggcagcugccccaacgugaccaacggcaucggcuucuucgccaccauggccugggccgugcccaagaacgacaagaacaagaccgccaccaacccccugaccaucgaggugcccuacaucugcaccgagggcgaggaccagaucaccguguggggcuuccacagcgacaacgagacccagauggccaagcuguacggcgacagcaagccccagaaguucaccagcagcgccaacggcgugaccacccacuacgugagccagaucggcggcuuccccaaccagaccgaggacggcggccugccccagagcggcagaaucgugguggacuacauggugcagaagagcggcaagaccggcaccaucaccuaccagagaggcauccugcugccccagaagguguggugcgccagcggcagaagcaaggugaucaagggcagccugccccugaucggcgaggccgacugccugcacgagaaguacggcggccugaacaagagcaagagcuacuacaccggcgagcacgccaaggccaucggcaacugccccaucugggugaagaccccccugaagcuggccaacggcaccaaguacagaccccccgcccaccugagcuacuucugcggcuucuucggcgccaucgccggcuuccuggagggcggcugggagggcaugaucgccggcuggaacggcuacaccagccacggcgcccacggcguggccgugguggccgaccugaagagcacccaggaggccaucaacaagaucaccaagaaccugaacagccugagcgagcuggaggugaagaaccugcagagacugagcggcgccauggacgagcugcacaacgagauccuggagcuggacgagaagguggacgaccugagagccgacaccaucagcagccagaucgagcuggccgugcugcugagcaacgagggcaucaucaacagcgaggacgagcaccugcuggcccuggagagaaagcugaagaagaugcugggccccagcgccguggagaucggcaacggcugcuucgagaccaagcacaagugcaaccagaccugccuggacagaaucgccgccggcaccuucgacgccggcgaguucagccugcccaccuucgacagccugaacaucaccgccgccagccugaacgacgacggccuggacaaccacaccauccugcuguacuacagcaccgccgccagcagccuggccgugacccugaugaucgccaucuucgugguguacauggugagcagagacaacgugagcugcagcaucugccuguga

SEQ ID NO: 186652 - RNA, 1758 nt, Artificial Sequence
  derived and/or modified CDS sequence (opt4) from hemagglutinin__InfluenzaB__AEA51399
augaaggccaucaucgugcugcugaugguggugaccagcaacgccgacagaaucugcaccggcaucaccgccagccagagccccaacaucgacaagagcagcacccagggcgaggugaacgugaccggcgugaucccccugaccaccacccccaccaagagccacuucgccaaccugaagggcaccgagaccagaggcaagcugugccccaagugccccaacugcaccgaccuggacguggcccugggcagacccaagugcaccggcaagauccccagcgccagagugagcauccugcacgaggugagacccgugaccagcggcugcuuccccaucaugcacgacagaaccaagaucagacagcugcccaaccugcugagaggcuacgagcacaucagacugagcacccacaacgugaucaacgccgagaacgcccccggcggccccuacaagaucggcaccagcggcagcugccccaacgugaccaacggcaucggcuucuucgccaccauggccugggccgugcccaagaacgacaagaacaagaccgccaccaacccccugaccaucgaggugcccuacaucugcaccgagggcgaggaccagaucaccguguggggcuuccacagcgacaacgagacccagauggccaagcuguacggcgacagcaagccccagaaguucaccagcagcgccaacggcgugaccacccacuacgugagccagaucggcggcuuccccaaccagaccgaggacggcggccugccccagagcggcagaaucgugguggacuacauggugcagaagagcggcaagaccggcaccaucaccuaccagagaggcauccugcugccccagaagguguggugcgccagcggcagaagcaaggugaucaagggcagccugccccugaucggcgaggccgacugccugcacgagaaguacggcggccugaacaagagcaagagcuacuacaccggcgagcacgccaaggccaucggcaacugccccaucugggugaagaccccccugaagcuggccaacggcaccaaguacagaccccccgcccaccugagcuacuucugcggcuucuucggcgccaucgccggcuuccuggagggcggcugggagggcaugaucgccggcuggaacggcuacaccagccacggcgcccacggcguggccgugguggccgaccugaagagcacccaggaggccaucaacaagaucaccaagaaccugaacagccugagcgagcuggaggugaagaaccugcagagacugagcggcgccauggacgagcugcacaacgagauccuggagcuggacgagaagguggacgaccugagagccgacaccaucagcagccagaucgagcuggccgugcugcugagcaacgagggcaucaucaacagcgaggacgagcaccugcuggcccuggagagaaagcugaagaagaugcugggccccagcgccguggagaucggcaacggcugcuucgagaccaagcacaagugcaaccagaccugccuggacagaaucgccgccggcaccuucgacgccggcgaguucagccugcccaccuucgacagccugaacaucaccgccgccagccugaacgacgacggccuggacaaccacaccauccugcuguacuacagcaccgccgccagcagccuggccgugacccugaugaucgccaucuucgugguguacauggugagcagagacaacgugagcugcagcaucugccuguga

SEQ ID NO: 186653 - RNA, 1758 nt, Artificial Sequence
  derived and/or modified CDS sequence (opt4) from hemagglutinin__InfluenzaB__AEG21014
augaaggccaucaucgugcugcugaugguggugaccagcaacgccgacagaaucugcaccggcaucaccagcagcaacagcccccacguggugaagaccgccacccagggcgaggugaacgugaccggcgugaucccccugaccaccacccccaccaagagccacuucgccaaccugaagggcaccgagaccagaggcaagcugugccccaagugccugcacugcaccgaccuggacguggcccugggcagacccaagugcaccggcaagauccccagcgccagagugagcauccugcacgaggugagacccgugaccagcggcugcuuccccaucaugcacgacagaaccaagaucagacagcugcccaaccugcugagaggcuacgagcacaucagacugagcacccacaacgugaucaacgccgagaacgcccccggcggccccuacaagaucggcaccagcggcagcugccccaacgugaccaacggcaacggcuucuucgccaccauggccugggccgugcccaagaacgacaacaacaagaccgccaccaacagccugaccaucgaggugcccuacaucugcaccgagggcgaggaccagaucaccguguggggcuuccacagcgacaacgagacccagauggccaagcuguacggcgacagcaagccccagaaguucaccagcagcgccaacggcgugaccacccacuacgugagccagaugggcggcuuccccaaccagaccgaggacggcggccugccccagagcggcagaaucgugguggacuacauggugcagaagagcggcaagaccggcaccaucaccuaccagagaggcauccugcugccccagaagguguggugcgccagcggcagaagcaaggugaucaagggcagccugccccugaucggcgaggccgacugccugcacgagaaguacggcggccugaacaagagcaagcccuacuacaccggcgagcacgccaaggccaucggcaacugccccaucugggugaagaccccccugaagcuggccaacggcaccaaguacagaccccccgccaagcugcugauggagagaggcuucuucggcgccaucgccggcuuccuggagggcggcugggagggcaugaucgccggcuggcacggcuacaccagccacggcgcccacggcguggccguggccgccgaccugaagagcacccaggaggccaucaacaagaucaccaagaaccugaacagccugagcgagcuggaggugaagaaccugcagagacugagcggcgccauggacgagcugcacaacgagauccuggagcuggacgagaagguggacgaccugagagccgacaccaucagcagccagaucgagcuggccgugcugcugagcaacgagggcaucaucaacagcgaggacgagcaccugcuggcccuggagagaaagcugaagaagaugcugggccccagcgccguggagaucggcaacggcugcuucgagaccaagcacaagugcaaccagaccugccuggacagaaucgccgccggcaccuucgacgccggcgaguucagccugcccaccuucgacagccugaacaucaccgccgccagccugaacgacgacggccuggacaaccacaccauccugcuguacuacagcaccgccgccagcagccuggccgugacccugaugaucgccaucuucgugguguacauggugagcagagacaacgugagcugcagcaucugccuguga

SEQ ID NO: 186654 - RNA, 1755 nt, Artificial Sequence
  derived and/or modified CDS sequence (opt4) from hemagglutinin__InfluenzaB__AEG21015
augaaggccaucaucgugcugcugaugguggugaccagcaacgccgacagaaucugcaccggcaucaccagcagcaacagcccccacguggugaagaccgccacccagggcgaggugaacgugaccggcgugaucccccugaccaccacccccaccaagagcuacuucgccaaccugaagggcaccagaaccagaggcaagcugugccccgacugccugaacugcaccgaccuggacguggcccugggcagacccaugugcgugggcaccacccccagcgccaaggccagcauccugcacgaggugagacccgugaccagcggcugcuuccccaucaugcacgacagaaccaagaucagacagcugcccaaccugcugagaggcuacgagaacaucagacugagcacccagaacgugaucgacgccgagaaggcccccggcggccccuacagacugggcaccagcggcagcugccccaacgccaccagcaagaacggcuucuucgccaccauggccugggccgugcccaaggacaacuacaagggcgccaccaaccccaagaccguggaggugcccuacaucugcaccgagggcgagggccagaucaccguguggggcuuccacagcgacaacaagccccagaugaagaaccuguacggcgacagcaacccccagaaguucaccagcagcgccagcggcgugaccacccacuacgugagccagaucggcgacuuccccgaccagaccgaggacggcggccugccccagagcggcagaaucgugguggacuacaugaugcagaagcccggcaagaccggcaccaucguguaccagagaggcgugcugcugccccagaagguguggugcgccagcggcagaagcaaggugaucaagggcagccugccccugaucggcgaggccgacugccugcacgagaaguacggcggccugaacaagagcaagcccuacuacaccggcgagcacgccaaggccaucggcaacugccccaucugggugaucaccccccagaagcuggccaacggcaccaccuucagcccccccgccaagcugcugaaggagagaggcuucuucggcgccaucgccggcuuccuggagggcggcugggagggcaugaucgccggcuggcacggcuacaccagccacggcgcccacggcguggccguggccgccgaccugaagagcacccaggaggccaucaacaagaucaccaagaaccugaacagccugagcgagcuggaggugaagaaccugcagagacugagcggcgccauggacgagcugcacaacgagauccuggagcuggacgagaagguggacgaccugagagccgacaccaucagcagccagaucgagcuggccgugcugcugagcaacgagggcaucaucaacagcgaggacgagcaccugcuggcccuggagagaaagcugaagaagaugcugggccccagcgccguggacaucggcaacggcugcuucgagaccaagcacaagugcaaccagaccugccuggacagaaucgccgccggcaccuucaacgccggcgaguucagccugcccaccuucgacagccugaacaucaccgccgccagccugaacgacgacggccuggacaaccacaccauccugcuguacuacagcaccgccgccagcagccuggccgugacccugaugcuggccaucuucaucguguacauggugagcagagacaacgugagcugcagcaucugccuguga

SEQ ID NO: 186655 - RNA, 1755 nt, Artificial Sequence
  derived and/or modified CDS sequence (opt4) from hemagglutinin__InfluenzaB__AEG21016
augaaggccaucaucgugcugcugaugguggugaccagcaacgccgacagaaucugcaccggcaucaccagcagcaacagcccccacguggugaagaccgccacccagggcgaggugaacgugaccggcgugaucccccugaccaccacccccaccaagagcuacuucgccaaccugaagggcaccagaaccagaggcaagcugugccccgacugccugaacugcaccgaccuggacguggcccugggcagacccaugugcgugggcaccacccccagcgccaaggccagcauccugcacgaggugagacccgugaccagcggcugcuuccccaucaugcacgacagaaccaagaucagacagcugcccaaccugcugagaggcuacgagaacaucagacugagcacccagaacgugaucgacgccgagaaggcccccggcggccccuacagacugggcaccagcggcagcugccccaacgccaccagcaagaucggcuucuucgccaccauggccugggccgugcccaaggacaacuacaagagagccaccaaccccaagaccguggaggugcccuacaucugcaccgagggcgaggaccagaucaccguguggggcuuccacagcgacaacaagccccagaugaagaaccccuacggcgacagcaacccccagaaguucaccagcagcgccagcggcgugaccacccacuacgugagccagaucggcgacuuccccgaccagaccgaggacggcggccugccccagagcggcagaaucgugguggacuacaugaugcagaagcccggcaagaccggcaccaucguguaccagagaggcgugcugcugccccagaagguguggugcgccagcggcagaagcaaggugaucaagggcagccugccccugaucggcgaggccgacugccugcacgagaaguacggcggccugaacaagagcaagcccuacuacaccggcgagcacgccaaggccaucggcaacugccccaucugggugaagaccccccugaagcuggccaacggcaccaaguacagaccccccgccaagcugcugaaggagagaggcuucuucggcgccaucgccggcuuccuggagggcggcugggagggcaugaucgccggcuggcacggcuacaccagccacggcgcccacggcguggccguggccgccgaccugaagagcacccaggaggccaucaacaagaucaccaagaaccugaacagccugagcgagcuggaggugaagaaccugcagagacugagcggcgccauggacgagcugcacaacgagauccuggagcuggacgagaagguggacgaccugagagccgacaccaucagcagccagaucgagcuggccgugcugcugagcaacgagggcaucaucaacagcgaggacgagcaccugcuggcccuggagagaaagcugaagaagaugcugggccccagcgccguggacaucggcaacggcugcuucgagaccaagcacaagugcaaccagaccugccuggacagaaucgccgccggcaccuucaacgccggcgaguucagccugcccaccuucgacagccugaacaucaccgccgccagccugaacgacgacggccuggacaaccacaccauccugcuguacuacagcaccgccgccagcagccuggccgugacccugaugcuggccaucuucaucguguacauggugagcagagacaacgugagcugcagcaucugccuguga

SEQ ID NO: 186656 - RNA, 1755 nt, Artificial Sequence
  derived and/or modified CDS sequence (opt4) from hemagglutinin__InfluenzaB__AEG21017
augaaggccaucaucgugcugcugaugguggugaccagcaacgccgacagaaucugcaccggcaucaccagcagcaacagcccccacguggugaagaccgccacccagggcgaggugaacgugaccggcgugaucccccugaccaccacccccaccaagagcuacuucgccaaccugaagggcaccagaaccagaggcaagcugugccccgacugccugaacugcaccgaccuggacguggcccugggcagacccaugugcgugggcaccacccccagcgccaaggccagcauccugcacgaggugagacccgugaccagcggcugcuuccccaucaugcacgacagaaccaagaucagacagcugcccaaccugcugagaggcuacgagaacaucagacugagcacccagaacgugaucgacgccgagaaggcccccggcggccccuacagacugggcaccagcggcagcugccccaacgccaccagcaagaucggcuucuucgccaccauggccugggccgugcccaaggacaacuacaagaacgccaccaacccccugaccguggaggugcccuacaucugcaccgagggcgaggaccagaucaccguguggggcuuccacagcgacaacaagacccagaugaagaaccuguacggcgacagcaacccccagaaguucaccagcagcgccaacggcgugaccacccacuacgugagccagaucggcgacuuccccgaccagaccgaggacggcggccugccccagagcggcagaaucgugguggacuacaugaugcagaagcccggcaagaccggcaccaucguguaccagagaggcgugcugcugccccagaagguguggugcgccagcggcagaagcaaggugaucaagggcagccugccccugaucggcgaggccgacugccugcacgagaaguacggcggccugaacaagagcaagcccagcuacaccggcgagcacgccaaggccaucggcaacugccccaucugggugaagaccccccugaagcuggccaacggcaccaaguacagaccccccgccaagcugcugaaggagagaggcuucuucggcgccaucgccggcuuccuggagggcggcugggagggcaugaucgccggcuggcacggcuacaccagccacggcgcccacggcguggccguggccgccgaccugaagagcacccaggaggccaucaacaagaucaccaagaaccugaacagccugagcgagcuggaggugaagaaccugcagagacugagcggcgccauggacgagcugcacaacgagauccuggagcuggacgagaagguggacgaccugagagccgacaccaucagcagccagaucgagcuggccgugcugcugagcaacgagggcaucaucaacagcgaggacgagcaccugcuggcccuggagagaaagcugaagaagaugcugggccccagcgccguggacaucggcaacggcugcuucgagaccaagcacaagugcaaccagaccugccuggacagaaucgccgccggcaccuucaacgccggcgaguucagccugcccaccuucgacagccugaacaucaccgccgccagccugaacgacgacggccuggacaaccacaccauccugcuguacuacagcaccgccgccagcagccuggccgugacccugaugcuggccaucuucaucguguacauggugagcagagacaacgugagcugcagcaucugccuguga

SEQ ID NO: 186657 - RNA, 1755 nt, Artificial Sequence
  derived and/or modified CDS sequence (opt4) from hemagglutinin__InfluenzaB__AEG21018
augaaggccaucaucgugcugcugaugguggugaccagcaacgccgacagaaucugcaccggcaucaccagcagcaucagcccccugguggacaagaccgccacccagggcgaggugaacgugaccggcgugaucccccugaccaccacccccaccaagagcuacuucgccaacgugaagggcaccagaaccagaggcaagcugugccccgacugccugaacugcaccgaccuggacguggcccugggcagacccaugugcgugggcaccacccccagcgccaaggccagcauccugcacgaggugagacccgugaccagcggcugcuuccccaucaugcacgacagaaccaagaucagacagcugcccaaccugcugagaggcuacgagaacaucagacugagcacccagaacgugaucgacgcccagaaggcccccggcggccccuacagacugggcaccagcggcagcugccccaacgccaccagcaagaucggcuucuucgccaccauggccugcgccgugcccaaggacaacuacaagaacgccaccaacccccugaccguggaggugcccuacaucagaaccgagggcgaggaccagaucaccguguggggcuuccacagcgacaacaagacccagaugaagaaccuguacggcgacagcaacccccccaaguucaccagcagcgccaacggcgugaccacccacuacgugagccagaccggcgacuuccccgaccagaccgaggacggcggccugccccccagcggcagaaucgugguggacuacaugaugcagaagcccggcaagaccggccccaucgccuaccagagaggcgugcugcugccccagaagguguggugcgccagcggcagaagcaaggugaucaagggcagccugccccugaucggcgaggccgacugccugcacgagaaguacggcggccugaacaagagcaaguacagccacaccggcgaccacgccaagacccugggcaacugccccaucugggugaagaccccccugaagcuggccaacggcaccaaguacagacccagcgccaagcugcugaaggagagaggcuucuucggcgccaucgccggcuuccuggagggcggcugggagggcaugaucgccggcuggcacggcuacaccagccacggcgcccacggcguggccguggccgccgaccugaagagcacccaggaggccaucaacaagaucaccaagaaccugaacagccugagcgagcuggaggugaagaaccugcagagacugagcggcgccauggacgagcugcacaacgagauccuggagcuggacgagaagguggacgaccugagagccgacaccaucagcagccagaucgagcuggccgugcugcugagcaacgagggcaucaucaacagcgaggacgagcaccugcuggcccuggagagaaagcugaagaagaugcugggccccagcgccguggacaucggcaacggcugcuucgagaccaagcacaagugcaaccagaccugccuggacagaaucgccgccggcaccuucaacgccggcgaguucagccugcccaccuucgacagccugaacaucaccgccgccagccugaacgacgacggccuggacaaccacaccauccugcuguacuacagcaccgccgccagcagccuggccgugacccugaugcuggccaucuucaucguguacauggugagcagagacaacgugagcugcagcaucugccuguga

SEQ ID NO: 186658 - RNA, 1755 nt, Artificial Sequence
  derived and/or modified CDS sequence (opt4) from hemagglutinin__InfluenzaB__AEG21019
augaaggccaucaucgugcugcugaugguggugaccagcaacgccgacagaaucugcaccggcaucaccagcagcaacagcccccacguggugaagaccgccacccagggcgaggugaacgugaccggcgugaucccccugaccaccacccccaccaagagcuacuucgccaaccugaagggcaccagaaccagaggcaagcugugccccgacugccugaacugcaccgaccuggacguggcccugggcagacccaugugcgugggcaccacccccagcgccaaggccagcauccugcacgaggugagacccgugaccagcggcugcuuccccaucaugcacgacagaaccaagaucagacagcugcccaaccugcugagaggcuacgagaacaucagacugagcacccagaacgugaucgacgccgagaaggcccccggcggccccuacagacugggcaccagcggcagcugccccaacgccaccagcaagaucggcuucuucgccaccauggccugggccgugcccaaggacaacuacaagaacgccaccaacccccugaccguggaggugcccuacaucugcaccgagggcgaggaccagaucaccguguggggcuuccacagcgacaacaagacccagaugaagaaccuguacggcgacagcaacccccagaaguucaccagcagcgccaacggcgugaccacccacuacgugagccagaccggcgacuuccccgaccagaccgaggacggcggccugccccccagcggcagaaucgugguggacuacaugaugcagaagcccggcaagaccggcaccaucguguaccagagaggcgugcugcugccccagaagguguggugcgccagcggcagaagcaaggugaucaagggcagccugccccugaucggcgaggccgacugccugcacgagaaguacggcggccugaacaagagcaagcccagcuacaccggcgagcacgccaaggccaucggcaacugccccaucugggugaagaccccccugaagcuggccaacggcaccaaguacagacccagcgccaagcugcugaaggagagaggcuucuucggcgccaucgccggcuuccuggagggcggcugggagggcaugaucgccggcuggcacggcuacaccagccacggcgcccacggcguggccguggccgccgaccugaagagcacccaggaggccaucaacaagaucaccaagaaccugaacagccugagcgagcuggaggugaagaaccugcagagacugagcggcgccauggacgagcugcacaacgagauccuggagcuggacgagaagguggacgaccugagagccgacaccaucagcagccagaucgagcuggccgugcugcugagcaacgagggcaucaucaacagcgaggacgagcaccugcuggcccuggagagaaagcugaagaagaugcugggccccagcgccguggacaucggcaacggcugcuucgagaccaagcacaagugcaaccagaccugccuggacagaaucgccgccggcaccuucaacgccggcgaguucagccugcccaccuucgacagccugaacaucaccgccgccagccugaacgacgacggccuggacaaccacaccauccugcuguacuacagcaccgccgccagcagccuggccgugacccugaugcuggccaucuucaucguguacauggugagcagagacaacgugagcugcagcaucugccuguga

SEQ ID NO: 186659 - RNA, 1758 nt, Artificial Sequence
  derived and/or modified CDS sequence (opt4) from hemagglutinin__InfluenzaB__AEG21021
augaaggccaucaucgugcugcugaugguggugaccagcaacgccgacagaaucugcaccggcaucaccagcagcaacagcccccacguggugaagaccgccacccagggcgaggugaacgugaccggcgugaucccccugaccaccacccccaccaagagccacuucgccaaccugaagggcaccgagaccagaggcaagcugugccccaagugccugaacugcaccgaccuggacguggcccugggcagacccaagugcaccggcaagauccccagcgccagagugagcauccugcacgaggugagacccgugaccagcggcugcuuccccauccugcacgacagaaccaagaucagacagcugcccaaccugcugagaggcuacgagcacaucagacugagcacccacaacgugaucaacgccgagaacgcccccggcggccccuacaagaucggcaccagcggcagcugccccaacaucaccaacggcaacggcuucuucgccaccauggccugggccgugcccaagaacgacaagaacaagaccgccaccaacccccugagcaucgaggugcccuacaucugcaccgagggcgaggaccagaucaccguguggggcuuccacagcgacaacgagacccagauggccaagcuguacggcgacagcaagccccagaaguucaccagcagcgccaacggcguggccacccacuacgugagccagaucggcggcuuccccaaccagaccgaggacggcggccugccccagagcggcagaaucgugguggacuacauggugcagaagagcggcaagaccggcaccaucaccuaccagagaggcauccugcugccccagaagguguggugcgccagcggcagaagcaaggugaucaagggcagccugccccuguucggcgaggccgacugccugcacgagaaguacggcggcuucaacaagagcaagcccuacuacaccggcgagcacgccaaggccaucggcaacugccccaucugggugaagaccccccugaagcuggccaacggcaccaaguacagaccccccgccaagcuguucaaggagagaggcuucuucggcgccaucgccggcuuccuggagggcggcugggagggcaugaucgccggcuggcacggcuacaccagccacggcgcccacggcguggccguggccgccgaccugaagagcacccaggaggccaucaacaagaucaccaagaaccugaacagccugagcgagcuggaggugaagaaccugcagagacugagcggcgccauggacgagcugcacaacgagauccuggagcuggacgagaagguggacgaccugagagccgacaccaucagcagccagaucgagcuggccgugcugcugagcaacgagggcaucaucaacagcgaggacgagcaccugcuggcccuggagagaaagcugaagaagaugcugggccccagcgccguggagaucggcaacggcugcuucgagaccaagcacaagugcaaccagaccugccuggacagaaucgccgccggcaccuucgacgccggcgaguucagccugcccaccuucgacagccugaacaucaccgccgccagccugaacgacgacggccuggacaaccacaccauccugcuguacuacagcaccgccgccagcagccuggccgugacccugaugaucgccaucuucgugguguacauggugagcagagacaacgugagcugcagcaucugccuguga

SEQ ID NO: 186660 - RNA, 1758 nt, Artificial Sequence
  derived and/or modified CDS sequence (opt4) from hemagglutinin__InfluenzaB__AEG21022
augaaggccaucaucgugcugcugaugguggugaccagcaacgccgacagaaucugcaccggcaucaccagcagcaacagcccccacguggugaagaccgccacccagggcgaggugaacgugaccggcgugaucccccugaccaccacccccaccaagagccacuucgccaaccugaagggcaccgagaccagaggcaagcugugccccaagugccugaacugcaccgaccuggacguggcccugggcagacccaagugcaccggcaccacccccagcgccagagccagcauccugcacgaggugagacccgugaccagcggcugcuuccccauccugcacgacagaaccaagaucagacagcugcccaaccugcugagaggcuacgagcacaucagacugagcacccacaacgugaucaacgccgagaacgcccccggcggccccuacaagaucggcaccagcggcagcugccccaacaucaccaacggcaacggcuucuucgccaccauggccugggccgugcccaagaacgacaagaacaagaccgccaccaacccccugagcguggaggugcccuacaucugcaccgagggcgaggaccagaucaccguguggggcuuccacagcgacaacgagacccagauggccaagcuguacggcgacagcaagccccagaaguucaccagcagcgccaacggcguggccacccacuacgugagccagaucggcggcuuccccaaccagaccgaggacggcggccugccccagagcggcagaaucgugguggacuacauggugcagaagagcggcaagaccggcaccaucaccuaccagagaggcauccugcugccccagagaggcuggugcgccagcggcagaagcaaggugaucaagggcagccugccccuguucggcgaggccgacugccugcacgagaaguacggcggccugaacaagagcaagcccuacuacaccggcgagcacgccaaggccaucggcaacugccccaucugggugaagaccccccugaagcuggccaacggcaccaaguacagaccccccgccaagcuguucaaggagagaggcuucuucggcgccaucgccggcuuccuggagggcggcugggagggcaugaucgccggcuggcacggcuacaccagccacggcgcccacggcgugcccguggccgccgaccugaagagcacccaggaggccaucaacaagaucaccaagaaccugaacagccugagcgagcuggaggugaagaaccugcagagacugagcggcgccauggacgagcugcacaacgagauccuggagcuggacgagaagguggacgaccugagagccgacaccaucagcagccagaucgagcuggccgugcugcugagcaacgagggcaucaucaacagcgaggacgagcaccugcuggcccuggagagaaagcugaagaagaugcugggccccagcgccguggagaucggcaacggcugcuucgagaccaagcacaagugcaaccagaccugccuggacagaaucgccgccggcaccuucgacgccggcgaguucagccugcccaccuucgacagccugaacaucaccgccgccagccugaacgacgacggccuggacaaccacaccauccugcuguacuacagcaccgccgccagcagccuggccgugacccugaugaucgccaucuucgugguguacauggugagcagagacaacgugagcugcagcaucugccuguga

SEQ ID NO: 186661 - RNA, 1755 nt, Artificial Sequence
  derived and/or modified CDS sequence (opt4) from hemagglutinin__InfluenzaB__AEG21023
augaaggccaucaucgugcugcugaugguggugaccagcaacgccgacagaaucugcaccggcaucaccagcagcaacagcccccacguggugaagaccgccacccugggcgaggugaacgagaccggcgugaucccccugaccaccacccccaccaagagcuacuucgccaaccugaagggcaccagaaccagaggcaagcugugccccgacugccugaacugcaccgaccuggacguggcccugggcagacccaugugcgugggcaccacccccagcgccaaggccagcauccugcacgaggugagacccgugaccagcggcugcuuccccaucaugcacgacagaaccaagaucagacagcugcccaaccugcugagaggcuacgagaacaucagacugagcacccagaacgugaucgacgccgagaaggcccccggcggccccuacagacugggcaccagcggcagcugccccaacgccaccagcaagaucggcuucuucgccaccauggccugggccgugcccaaggacaacuacaagaacgccaccaacccccugaccguggaggugcccuacaucugcaccgagggcgaggaccagaucaccguguggggcuuccacagcgacaacaagacccagaugaagaaccuguacggcgacagcaacccccagaaguucaccagcagcgccaacggcgugcccacccacuacgugagccagaucggcgacuuccccgaccccaccgaggacggcggccugccccagagcggcagaaucggcguggacuacaugaugcagaagcccggcaagaccggcaccaucguguaccagagaggcgugcugcugccccagaagguguggugcgccagcggcagaagcaaggugaucaagggcagccugccccugaucggcgaggccgacugccugcacgagaaguacggcggccugaacaagagcaagcccuacuacaccggcgagcacgccaaggccaucggcaacugccccaucugggugaagaccccccugaagcuggccaacggcaccaaguacagaccccccgccaagcugcugaaggagagaggcuucuucggcgccaucagcggcuuccuggagggcggcugggagggcaugaucgccggcuggcacggcuacaccagccacggcgcccacggcguggccguggccgccgaccugaagagcacccaggaggccaucaacaagaucaccaagaaccugaacagccugagcgagcuggaggugaagaaccugcagagacugagcggcgccauggacgagcugcacaacgagauccuggagcuggacgagaagguggacgaccugagagccgacaccaucagcagccagaucgagcuggccgugcugcugagcaacgagggcaucaucaacagcgaggacgagcaccugcuggcccuggagagaaagcugaagaagaugcugggccccagcgccguggagaucggcaacggcugcuucgagaccaagcacaagugcaaccagaccugcagcgacagaaucgccgccggcaccuucgacgccggcgaguucagccugcccaccuucgacagccugaacaucaccgccgccagccugaacgacgacggccuggacaaccacaccauccugcuguacuacagcaccgccgccagcagccuggccgugacccugaugaucgccaucuucgugguguacauggugagcagagacaacgugagcugcagcaucugccuguga

SEQ ID NO: 186662 - RNA, 1758 nt, Artificial Sequence
  derived and/or modified CDS sequence (opt4) from hemagglutinin__InfluenzaB__AEG21024
augaaggccaucaucgugcugcugaugguggugaccagcaacgccgacagaaucugcaccggcaucaccagcagcagcagcccccacguggugaagaccgccacccagggcgaggugaacgugaccggcgugaucccccugaccaccacccccaccaagagcuacuucgccaaccugaagggcaccgagaccagaggcaagcugugccccgacugccccaacugcaccgaccuggacguggcccugggcagacccaacugcuggggcaacauccccagcgccagagugagcauccugcacgaggugagacccgugaccagcggcugcuuccccaucaugcacgacagaaccaagaucagacagcugcccaaccugcugagaggcuacgagcacaucagacugagcacccacaacgugaucaacgccgagaacgcccccggcggccccuacaagaucggcaccagcggcagcugccccaacgugaccaacggcaacggcuucuucgccaccauggccugggccgugcccaaggacgacaagaacaacgccgccacccaccugcugaccaucgaggugcccuucuucugcaccggcggcgagcaccacaucgccguguggggcuuccccagcgacaacgacacccugauggccaagcuguucggcgacagcaacccccagauguucagcagcagcgccaacggcaccaccacccacuacgugagccagaucggcggcuuccccaaccagaccgaggacggcggccugccccagagcggcagaaucgugguggacuacauggugcagaagagcggcaagaccggcaccaucgccuaccagagaggcgugcugcugccccagaagguguggugcgccagcggcagaagcaaggugaucaagggcagccugccccugaucggcgaggccgacugccugcacgagaaguacggcggccugaacaagagcaagcccuacuacaccggcgagcacgccaaggccaucggcaacugccccaucugggugaagaccccccugaagcuggccaacggcaccaaguacagaccccccgccaagcugcugaaggagagaggcuucuucggcgccaucgccggcuuccuggagggcggcugggagggcaugaucgccggcuggcacggcuacaccagccacggcgcccacggcguggccguggccgccgaccugaagagcacccaggaggccaucaacaagaucaccaagaaccugaacagccugagcgagcuggaggugaagaaccugcagagacugagcggcgccauggacgagcugcacaacgagauccuggagcuggacgagaagguggacgaccugagagccgacaccaucagcagccagaucgagcuggccgugcugcugagcaacgagggcaucaucaacagcgaggacgagcaccugcuggcccuggagagaaagcugaagaagaugcugggccccagcgccguggagaucggcaacggcugcuucgagaccaagcacaagugcaaccagaccugccuggacagaaucgccgccggcaccuucgacgccggcgaguucagccugcccaccuucgacagccugaacaucaccgccgccagccugaacgacgacggccuggacaaccacaccauccugcuguacuacagcaccgccgccagcagccuggccgugacccugaugaucgccaucuucgugguguacauggugagcagagacaacgugagcugcagcaucugccuguga

SEQ ID NO: 186663 - RNA, 1755 nt, Artificial Sequence
  derived and/or modified CDS sequence (opt4) from hemagglutinin__InfluenzaB__AEG21025
augaaggccaucaucgugcugcugaugguggugaccagcaacgccgacagaaucugcaccggcaucaccagcagcaacagcccccacguggugaagaccgccacccugggcgaggugaacgagaccggcgugaucccccugaccaccacccccaccaagagcuacuucgccaaccugaagggcaccagaaccagaggcaagcugugccccgacugccugaacugcaccgaccuggacguggcccugggcagacccaugugcgugggcaccacccccagcgccaaggccagcauccugcacgaggugagacccgugaccagcggcugcuuccccaucaugcacgacagaaccaagaucagacagcugcccaaccugcugagaggcuacgagaacaucagacugagcacccagaacgugaucgacgccgagaaggcccccggcggccccuacagacugggcaccagcggcagcugccccaacgccaccagcaagaucggcuucuucgccaccauggccugggccgugcccaaggacaacuacaagaacgccaccaacccccugaccguggaggugcccuacaucugcaccgagggcgaggaccagaucaccguguggggcuuccacagcgacaucaagacccagaugaagaaccuguacggcgacagcaacccccagaaguucaccagcagcgccaacggcgugcccacccacuacgugagccagaucggcgacuuccccgaccccaccgaggacggcggccugccccagagcggcagaaucggcguggacuacaugaugcagaagcccggcaagaccggcaccaucguguaccagagaggcgugcugcugccccagaagguguggugcgccagcggcagaagcaaggugaucaagggcagccugccccugaucggcgaggccgacugccugcacgagaaguacggcggccugaacaagagcaagcccuacuacaccggcgagcacgccaaggccaucggcaacugccccaucugggugaagaccccccugaagcuggccaacggcaccaaguacagaccccccgccaagcugcugaaggagagaggcuucuucggcgccaucagcggcuuccuggagggcggcugggagggcaugaucgccggcuggcacggcuacaccagccacggcgcccacggcguggccguggccgccgaccugaagagcacccaggaggccaucaacaagaucaccaagaaccugaacagccugagcgagcuggaggugaagaaccugcagagacugagcggcgccauggacgagcugcacaacgagauccuggagcuggacgagaagguggacgaccugagagccgacaccaucagcagccagaucgagcuggccgugcugcugagcaacgagggcaucaucaacagcgaggacgagcaccugcuggcccuggagagaaagcugaagaagaugcugggccccagcgccguggagaucggcaacggcugcuucgagaccaagcacaagugcaaccagaccugcagcgacagaaucgccgccggcaccuucgacgccggcgaguucagccugcccaccuucgacagccugaacaucaccgccgccagccugaacgacgacggccuggacaaccacaccauccugcuguacuacagcaccgccgccagcagccuggccgugacccugaugaucgccaucuucgugguguacauggugagcagagacaacgugagcugcagcaucugccuguga

SEQ ID NO: 186664 - RNA, 1758 nt, Artificial Sequence
  derived and/or modified CDS sequence (opt4) from hemagglutinin__InfluenzaB__AEG21026
augaaggccaugauggugcugcugaugguggugaccagcaacgccgacagaaucugcaccggcaucaccagcagcaacagcccccacguggugaagaccgccacccagggcgaggugaacgugaccggcgugaucccccugaccaucacccccaccaagagccacuucgccaaccugaaggugaaggagaccagaggcaagcugugccccaagugccccaacugcaccgaccuggacguggcccugggcagacccaagugcaccggcaagauccccagcgccagagugagcauccugcacgaggacacccccgugaccagcggcugcauccccaucaugcacgacagaaccaagaucagacagcugcccaaccugcugagaggcuacgagcacaucagacugagcacccacaacgugaucaacgccgagagcgcccccggcggccccuacaagaucggcaccagcggcagcugccccaacgugaccaacggcaucggcuucuucgccaccauggccugggccgugcccaagaacgacaagaacaagaccgccaccaacccccugaccaucgaggugcccuacaucugcaccgagggcgaggaccagaucaccguguggggcuuccacuucgacaacgagacccagauggccaagcuguacggcgacagcaagccccagguguucaccagcagcgccaacggcgugaacgccgacuucgugagccagaucagaggcuuccccaaccagaccgaggacggcggccugccccagagcggcagaaucgugguggacuacauggugcagaagagcggcaagaccggcaccaucaccuaccagagaggcauccugcugccccagaagguguggugcgccagcggcagaagcaaggugaucaaggagagccugccccugaucggcgaggccuacuuccagcaggaggaguacggcggccugaacaagagcaagagcuacuacaccgaggagcacgccaaggccaucggcaucugccccaucugggugaagaccccccugaagcuggccaacaagaccaaguacagaccccccgcccaccugagcuacuucugcggcuucuucggcgccaucgccggcuuccuggagggcggcugggagggcaugaucgccggcuggaacggcuacaccagccacggcgcccacggcguggccgugguggccgaccugaagagcacccaggaggccaucaacaagaucaccaagaaccugaacagccugagcgagcuggagguggagacccugcagagacugagcggcgccauggacgagcugcacaacgagauccuggagcuggacgagaagguggacgaccacagagccgacaccaucagcagccagaucgagcugcccgaccagcugagcaacgacggcagcaucaacagcgaggacgagcaccugcuggcccuggagagaaagcugaagaagaugcugggccccagcaacggcgacaagggcagcggcggcaucgagaccaagcacaagugcaaccagaccugccuggacagaaucgccgccggcaccuucgacgccggcggcuucagccaccccaccuucgacagcaagaacgugaccgccgccagccugaacgacgacggccuggacagcggcaccauccugcuguacuacagcaccgacgugagcaaccuggccgugaccgugaugaugggcaucuucgugaaguacauggugagcagagacaacgugagcugcagcaucugccuguga

SEQ ID NO: 186665 - RNA, 1758 nt, Artificial Sequence
  derived and/or modified CDS sequence (opt4) from hemagglutinin__InfluenzaB__AEG21027
augaaggccaucaucgugcugcugaugguggugaccagcaacgccgacagaaucugcaccggcaucaccagcagcaacagcccccacguggugaagaccgccacccagggcgaggugaacgugaccggcgugaucccccugaccaucacccccaccaagagccacuucgccaaccugaagggcaccgagaccagaggcaagcugugccccaagugccccaacugcaccgaccuggacguggcccugggcagacccaagugcaccggcaagauccccagcgccagagugagcauccugcacgaggugagacccgugaccagcggcugcuuccccaucaugcacgacagaaccaagaucagacagcugcccaaccugcugagaggcuacgagcacaucagacugagcacccacaacgugaucaacgccgagaacgcccccggcggccccuacaagaucggcaccagcggcagcugccccaacgugaccaacggcaucggcuucuucgccaccauggccugggccgugcccaagaacgacaagaacaagaccgccaccaacccccugaccaucgaggugcccuacaucugcaccgagggcgaggaccagaucaccguguggggcuuccacuucgacaacgagacccagauggccaagcuguacggcgacagcaagccccagaaguucaccagcagcgccaacggcgugaacgccgacuucgugagccagaucggcggcuuccccaaccagaccgaggacggcggccugccccagagcggcagaaucgugguggacuacauggugcagaagagcggcaagaccggcaccaucaccuaccagagaggcauccugcugccccagaagguguggugcgccagcggcagaagcaaggugaucaaggagagccugccccugaucggcgaggccuacuuccagcaggaggaguacggcggccugaacaagagcaagagcuacuacaccggcgagcacgccaaggccaucggcaacugccccaucugggugaagaccccccugaagcuggccaacggcaccaaguacagaccccccgcccaccugagcuacuucugcggcuucuucggcgccaucgccggcuuccuggagggcggcugggagggcaugaucgccggcuggaacggcuacaccagccacggcgcccacggcguggccgugguggccgaccugaagagcacccaggaggccaucaacaagaucaccaagaaccugaacagccugagcgagcuggagguggagacccugcagagacugagcggcgccauggacgagcugcacaacgagauccuggagaucgacgagaagguggacgaccacagagccgacaccaucagcagccagaucgagcuggccgugcugcugagcaacgagggcaucaucaacagcgaggacgagcaccugcuggcccuggagagaaagcugaagaagaugcugggccccagcaacggcgacaagggcagcggcggcaucgagaccaagcacaagugcaaccagaccugccuggacagaaucgccgccggcaccuucgacgccggcgaguucagccugcccaccuucgacagccugaacaucaccgccgccagccugaacgacgacggccuggacagcggcaccauccugcuguacuacagcaccgacgugagcaaccuggccgugaccgugaugaugggcaucuucgugaaguacauggugagcagagacaacgugagcugcagcaucugccuguga

SEQ ID NO: 186666 - RNA, 1758 nt, Artificial Sequence
  derived and/or modified CDS sequence (opt4) from hemagglutinin__InfluenzaB__AEG21028
augaaggccaucaucgugcugcugaugguggugaccagcaacgccgacagaaucugcaccggcaucaccgccagccagagccccaacaucgacaagagcagcacccagggcgaggugaacgugagcugcgugaucccccugaccaccacccccaccaagagccacuucgccaaccugaaggugaaggagaccagaggcaagcugugccccaagugccccaacugcaccgaccuggacgugagccugggcagacccaagugcaccggcaagauccccagcgccagagugagcauccugcacgaggugagacccguggccagcggcggcuuccccaucaugcacgacagaaccaagaucagacagcugcccaaccugcugagaggcuacgagcacaucagacugagcacccacaacgugaucaacgccgagaacgcccccggcggccccuacaagaucggcaccagcggcagcugccccaacgugaccaacggcaucggcuucuucgccaccauggccugggccgugcccaagaacgacaagaacaagaccgccaccaacccccugaccaucgaggugcccuacaucugcaccgagggcgaggaccagaucaccguguggggcuuccacagcgacaacgagacccagauggccaagcuguacggcgacagcaagccccagaaguucaccagcagcgccaacggcgugaccacccacuacgccgccaagagacccugcuuccccaaccagaccgaggacggcggccugccccagagcggcagaaucgugguggacuacauggugcagaagagcggcaagaccggcaccaucaccuaccagagaggcauccugcugccccagaagguguggugcgccagcggcagaagcaaggugaucaagggcagccugccccugaucggcgaggccgacugccugcacgagaaguacggcggccugaacaagagcaagagcuacuacaccggcgagcacgccaaggccaucggcaacugccccaucugggugaagaccccccugaagcuggccagcagaaccaugagcaagacccccgcccaccugagcuacuucugcggcuucuucggcgccaucgccggcuuccuggagggcggcugggagggcaugaucgccggcuggaacggcuacaccagccacggcgcccacggcguggccgugguggccgaccugaagagcacccaggaggccaucaacaagaucaccaagaaccugaacagccugagcgagcuggaggugaagaaccugcagagacugagcggcgccauggacgagcugcacaacgagauccuggagcuggacgagaagguggacgaccugagagccgacaccaucagcagccagaucgagcuggccgugcugcugagcaacgagggcaucaucaacagcgaggacgagcaccugcuggcccuggagagaaagcugaagaagaugcugggccccagcgccguggagaucggcaacggcugcuucgagaccaagcacaagugcaaccagaccugccuggacagaaucgccgccggcaccuucgacgccggcgaguucagccugcccaccuucgacagccugaacaucaccgccgccagccugaacgacgacggccuggacaaccacaccauccugcuguacuacagcaccgccgccagcagccuggccgugacccugaugaucgccaucuucgugguguacauggugagcagagacaacgugagcugcagcaucugccuguga

SEQ ID NO: 186667 - RNA, 1758 nt, Artificial Sequence
  derived and/or modified CDS sequence (opt4) from hemagglutinin__InfluenzaB__AEG21029
augaaggccaucaucgugcugcugaugguggugaccagcaacgccgacagaaucugcaccggcaucaccagcagcaacagcccccacguggugaagaccgccacccagggcgaggugaacgugaccggcgugaucccccugaccaccacccccaccaagagccacuucgccaaccugaagggcaccgagaccagaggcaagcugugccccaagugccccaacugcaccgaccuggacguggcccugggcagacccaagugcaccggcaagauccccagcgccagagugagcauccugcacgaggugagacccgugaccagcggcugcuuccccaucaugcacgacagaaccaagaucagacagcugcccaaccugcugagaggcuacgagcacaucagacugagcacccacaacgugaucaacgccgagaacgcccccggcggccccuacaagaucggcaccagcggcagcugccccaacgugaccaacggcaucggcuucuucgccaccauggccugggccgugcccaagaacgacaagaacaagaccgccaccaacccccugaccaucgaggugcccuacaucugcaccgagggcgaggaccagaucaccguguggggcuuccacagcgacagcgagacccagauggccaagcuguacggcgacagcaagccccagaaguucaccagcagcgccaacggcgugaccacccacuacgugagccagaucggcggcuuccccaaccagaccgaggacggcggccugccccagagcggcagaaucgugguggacuacauggugcagaagagcggcaagaccggcaccaucaccuaccagagaggcauccugcugccccagaagguguggugcgccagcggcagaagcaaggugaucaagggcagccugccccugaucggcgaggccgacugccugcacgagaaguacggcggccugaacaagagcaagcccuacuacaccggcgagcacgccaaggccaucggcaacugccccaucugggugaagaccccccugaagcuggccaacggcaccaaguacagaccccccgccaagcugcugaaggagagaggcuucuucggcgccaucgccggcuuccuggagggcggcugggagggcaugaucgccggcuggcacggcuacaccagccacggcgcccacggcguggccguggccgccgaccugaagagcacccaggaggccaucaacaagaucaccaagaaccugaacagccugagcgagcuggaggugaagaaccugcagagacugagcggcgccauggacgagcugcacaacgagauccuggagcuggacgagaagguggacgaccugagagccgacaccaucagcagccagaucgagcuggccgugcugcugagcaacgagggcaucaucaacagcgaggacgagcaccugcuggcccuggagagaaagcugaagaagaugcugggccccagcgccguggagaucggcaacggcugcuucgagaccaagcacaagugcaaccagaccugccuggacagaaucgccgccggcaccuucgacgccggcgaguucagccugcccaccuucgacagccugaacaucaccgccgccagccugaacgacgacggccuggacaaccacaccauccugcuguacuacagcaccgccgccagcagccuggccgugacccugaugaucgccaucuucgugguguacauggugagcagagacaacgugagcugcagcaucugccuguga

SEQ ID NO: 186668 - RNA, 1758 nt, Artificial Sequence
  derived and/or modified CDS sequence (opt4) from hemagglutinin__InfluenzaB__AEO80052
augaaggccaucaucgugcugcugaugguggugaccagcaacgccgacagaaucugcaccggcaucaccagcagcaacagcccccacguggugaagaccgccacccagggcgaggugaacgugaccggcgugaucccccugaccaccacccccaccaagagccacuucgccaaccugaagggcaccgagaccagaggcaagcugugccccaagugccccaacugcaccgaccuggacguggcccugggcagacccaagugcaccggcaagauccccagcgccagagugagcauccugcacgaggugagacccgugaccagcggcugcuuccccaucaugcacgacagaaccaagaucagacagcugcccaaccugcugagaggcuacgagcacaucagacugagcacccacaacgugaucaacgccgagaacgcccccggcggccccuacaagaucggcaccagcggcagcugccccaacgugaccaacggcaacggcuucuucgccaccauggccugggccgugcccaagaacgacaagaacaagaccgccaccaacccccugaccaucgaggugcccuacaucugcaccgagggcgaggaccagaucaccguguggggcuuccacagcgacaacgagacccagauggccaagcuguacggcgacagcaagccccagaaguucaccagcagcgccaacggcgugaccacccacuacgugagccagaucggcggcuuccccaaccagaccgaggacggcggccugccccagagcggcagaaucgugguggacuacauggugcagaagagcggcaagaccggcaccaucaccuaccagagaggcauccugcugccccagaagguguggugcgccagcggcagaagcaaggugaucaagggcagccugccccugaucggcgaggccgacugccugcacgagaaguacggcggccugaacaagagcaagcccuacuacaccggcgagcacgccaaggccaucggcaacugccccaucugggugaagaccccccugaagcuggccaacggcaccaaguacagaccccccgccaagcugcugaaggagagaggcuucuucggcgccaucgccggcuuccuggagggcggcugggagggcaugaucgccggcuggcacggcuacaccagccacggcgcccacggcguggccguggccgccgaccugaagagcacccaggaggccaucaacaagaucaccaagaaccugaacagccugagcgagcuggaggugaagaaccugcagagacugagcggcgccauggacgagcugcacaacgagauccuggagcuggacgagaagguggacgaccugagagccgacaccaucagcagccagaucgagcuggccgugcugcugagcaacgagggcaucaucaacagcgaggacgagcaccugcuggcccuggagagaaagcugaagaagaugcugggccccagcgccguggagaucggcaacggcugcuucgagaccaagcacaagugcaaccagaccugccuggacagaaucgccgccggcaccuucgacgccggcgaguucagccugcccaccuucgacagccugaacaucaccgccgccagccugaacgacgacggccuggacaaccacaccauccugcuguacuacagcaccgccgccagcagccuggccgugacccugaugaucgccaucuucgugguguacauggugagcagagacaacgugagcugcagcaucugccuguga

SEQ ID NO: 186669 - RNA, 1758 nt, Artificial Sequence; identical to SEQ ID NO: 186574
  derived and/or modified CDS sequence (opt4) from hemagglutinin__InfluenzaB__AEO80067

SEQ ID NO: 186670 - RNA, 1755 nt, Artificial Sequence
  derived and/or modified CDS sequence (opt4) from hemagglutinin__InfluenzaB__AEO80078
augaaggagaucaucgugcugcugaugguggugaccagcaacgccgacagaaucugcaccggcaucaccagcagcaacagcccccacguggugaagaccgccacccagggcgaggugaacgugaccggcgugaucccccugaccaccacccccaccaagagcuacuucgccaaccugaagggcaccagaaccagaggcaagcugugccccgacugccugaacugcaccgaccuggacguggcccugggcagacccaugugcgugggcaccacccccagcgccaaggccagcauccugcacgaggugagacccgugaccagcggcugcuuccccaucaugcacgacagaaccaagaucagacagcuggccaaccugcugagaggcuacgagaacaucagacugagcacccagaacgugaucgacgccgagaaggcccccggcggccccuacagacugggcaccagcggcagcugccccaacgccaccagcaagagcggcuucuucgccaccauggccugggccgugcccaaggacaacaacaagaacgccaccaacccccugaccguggaggugcccuacaucugcaccgagggcgaggaccagaucaccguguggggcuuccacagcgacaacaagacccagaugaagaaccuguacggcgacagcaacccccagaaguucaccagcagcgccaacggcgugaccacccacuacgugagccagaucggcggcuuccccgaccagaccgaggacggcggccugccccagagcggcagaaucgugguggacuacaugaugcagaagcccggcaagaccggcaccaucguguaccagagaggcgugcugcugccccagaagguguggugcgccagcggcagaagcaaggugaucaagggcagccugccccugaucggcgaggccgacugccugcacgagaaguacggcggccugaacaagagcaagcccuacuacaccggcgagcacgccaaggccaucggcaacugccccaucugggugaagaccccccugaagcuggccaacggcaccaaguacagaccccccgccaagcugcugaaggagagaggcuucuucggcgccaucgccggcuuccuggagggcggcugggagggcaugaucgccggcuggcacggcuacaccagccacggcgcccacggcguggccguggccgccgaccugaagagcacccaggaggccaucaacaagaucaccaagaaccugaacagccugagcgagcuggaggugaagaaccugcagagacugagcggcgccauggacgagcugcacaacgagauccuggagcuggacgagaagguggacgaccugagagccgacaccaucagcagccagaucgagcuggccgugcugcugagcaacgagggcaucaucaacagcgaggacgagcaccugcuggcccuggagagaaagcugaagaagaugcugggccccagcgccguggacaucggcaacggcugcuucgagaccaagcacaagugcaaccagaccugccuggacagaaucgccgccggcaccuucaacgccggcgaguucagccugcccaccuucgacagccugaacaucaccgccgccagccugaacgacgacggccuggacaaccacaccauccugcuguacuacagcaccgccgccagcagccuggccgugacccugaugcuggccaucuucaucguguacauggugagcagagacaacgugagcugcagcaucugccuguga

SEQ ID NO: 186671 - RNA, 1758 nt, Artificial Sequence
  derived and/or modified CDS sequence (opt4) from hemagglutinin__InfluenzaB__AEO80086
augaaggccaucaucgugcugcugaugguggugaccagcaacgccgacagaaucugcaccggcaucaccagcagcaacagcccccacguggugaagaccgccacccagggcgaggugaacgugaccggcgugaucccccugaccaccacccccaccaagagccacuucgccaaccugaagggcaccaagaccagaggcaagcugugccccaagugccugaacugcaccgaccuggacguggcccugggcagacccaagugcaccggcaacauccccagcgccaaggugagcauccugcacgaggugagacccgugaccagcggcugcuuccccaucaugcacgacagaaccaagaucagacagcugcccaaccugcugagaggcuacgagcacaucagacugagcacccacaacgugaucaacgccgagaaggcccccggcggccccuacaagaucggcaccagcggcagcugccccaacgugaccaacggcaacggcuucuucgccaccauggccugggccgugcccaagaacgacaacaacaagaccgccaccaacagccugaccaucgaggugcccuacaucugcaccgagggcgaggaccagaucaccaucuggggcuuccacagcgacaacgagacccagauggccaagcuguacggcgacagcaagccccagaaguucaccagcagcgccaacggcgugaccacccacuacgugagccagaucggcggcuuccccaaccagaccgaggacggcggccugccccagagcggcagaaucgugguggacuacauggugcagaagagcggcaagaccggcaccaucaccuaccagagaggcauccugcugccccagaagguguggugcgccagcggcagaagcaaggugaucaagggcagccugccccugaucggcgaggccgacugccugcacgagaaguacggcggccugaacaagagcaagcccuacuacaccggcgagcacgccaaggccaucggcaacugccccaucugggugaagaccccccugaagcuggccaacggcaccaaguacagaccccccgccaagcugcugaaggagagaggcuucuucggcgccaucgccggcuuccuggagggcggcugggagggcaugaucgccggcuggcacggcuacaccagccacggcgcccacggcguggccguggccgccgaccugaagagcacccaggaggccaucaacaagaucaccaagaaccugaacagccugagcgagcuggaggugaagaaccugcagagacugagcggcgccauggacgagcugcacaacgagauccuggagcuggacgagaagguggacgaccugagagccgacaccaucagcagccagaucgagcuggccgugcugcugagcaacgagggcaucaucaacagcgaggacgagcaccugcuggcccuggagagaaagcugaagaagaugcugggccccagcgccguggagaucggcaacggcugcuucgagaccaagcacaagugcaaccagaccugccuggacagaaucgccgccggcaccuucgacgccggcgaguucagccugcccaccuucgacagccugaacaucaccgccgccagccugaacgacgacggccuggacaaccacaccauccugcuguacuacagcaccgccgccagcagccuggccgugacccugaugaucgccaucuucgugguguacauggugagcagagacaacgugagcugcagcaucugccuguga

SEQ ID NO: 186672 - RNA, 1755 nt, Artificial Sequence
  derived and/or modified CDS sequence (opt4) from hemagglutinin__InfluenzaB__AEO80097
augaaggccaucaucgugcugcugaugguggugaccagcaacgccgacagaaucugcaccggcaucaccagcagcaacagcccccacguggugaagaccgccacccagggcgaggugaacgugaccggcgugaucccccugaccaccacccccaccaagagccacuucgccaaccugaagggcaccagaaccagaggcaagcugugccccgacugccugaacugcaccgaccuggacguggcccugggcagacccaugugcgugggcaccacccccagcgccaaggccagcauccugcacgaggugagacccgugaccagcggcugcuuccccaucaugcacgacagaaccaagaucagacagcuggccaaccugcugagaggcuacgagaacaucagacugagcacccagaacgugaucgacgccgagaaggcccccggcggccccuacagacugggcaccagcggcagcugccccaacgccaccagcaagagcggcuucuucgccaccauggccugggccgugcccaaggacaacaacaagaacgccaccaacccccugaccguggaggugcccuacaucugcaccgagggcgaggaccagaucaccguguggggcuuccacagcgacaacaagacccagaugaagaaccuguacggcgacagcaacccccagaaguucaccagcagcgccaacggcgugaccacccacuacgugagccagaucggcggcuuccccgaccagaccgaggacggcggccugccccagagcggcagaaucgugguggacuacaugaugcagaagcccggcaagaccggcaccaucguguaccagagaggcgugcugcugccccagaagguguggugcgccagcggcagaagcaaggugaucaagggcagccugccccugaucggcgaggccgacugccugcacgagaaguacggcggccugaacaagagcaagcccuacuacaccggcgagcacgccaaggccaucggcaacugccccaucugggugaagaccccccugaagcuggccaacggcaccaaguacagaccccccgccaagcugcugaaggagagaggcuucuucggcgccaucgccggcuuccuggagggcggcugggagggcaugaucgccggcuggcacggcuacaccagccacggcgcccacggcguggccguggccgccgaccugaagagcacccaggaggccaucaacaagaucaccaagaaccugaacagccugagcgagcuggaggugaagaaccugcagagacugagcggcgccauggacgagcugcacaacgagauccuggagcuggacgagaagguggacgaccugagagccgacaccaucagcagccagaucgagcuggccgugcugcugagcaacgagggcaucaucaacagcgaggacgagcaccugcuggcccuggagagaaagcugaagaagaugcugggccccagcgccguggacaucggcaacggcugcuucgagaccaagcacaagugcaaccagaccugccuggacagaaucgccgccggcaccuucaacgccggcgaguucagccugcccaccuucgacagccugaacaucaccgccgccagccugaacgacgacggccuggacaaccacaccauccugcuguacuacagcaccgccgccagcagccuggccgugacccugaugcuggccaucuucaucguguacauggugagcagagacaacgugagcugcagcaucugccuguga

SEQ ID NO: 186673 - RNA, 1755 nt, Artificial Sequence; identical to SEQ ID NO: 186486
  derived and/or modified CDS sequence (opt4) from hemagglutinin__InfluenzaB__AEO80108

SEQ ID NO: 186674 - RNA, 1758 nt, Artificial Sequence; identical to SEQ ID NO: 186574
  derived and/or modified CDS sequence (opt4) from hemagglutinin__InfluenzaB__AEO80145

SEQ ID NO: 186675 - RNA, 1758 nt, Artificial Sequence; identical to SEQ ID NO: 186633
  derived and/or modified CDS sequence (opt4) from hemagglutinin__InfluenzaB__AEO80154

SEQ ID NO: 186676 - RNA, 1758 nt, Artificial Sequence
  derived and/or modified CDS sequence (opt4) from hemagglutinin__InfluenzaB__AEO80183
augaaggccaucaucgugcugcugaugguggugaccagcaacgccgacagaaucugcaccggcaucaccagcagcaacagcccccacguggugaagaccgccacccagggcgaggugaacgugaccggcgugaucccccugaccaccacccccaccaagagccacuucgccaaccugaagggcaccgagaccagaggcaagcugugccccaagugccugaacugcaccgaccuggacguggcccugggcagacccaagugcaccggcaacauccccagcgccagagugagcauccugcacgaggugagacccgugaccagcggcugcuuccccaucaugcacgacagaaccaagaucagacagcugcccaaccugcugagaggcuacgagcacaucagacugagcacccacaacgugaucaacgccgagaacgcccccggcggccccuacaagaucggcaccagcggcagcugccccaacgugaccaacggcaacggcuucuucgccaccauggccugggccgugcccaagaacgacaacaacaagaccgccaccaacagccugaccaucgaggugcccuacaucugcaccgagggcgaggaccagaucaccguguggggcuuccacagcgacaucgagacccagauggccaagcuguacggcgacagcaagccccagaaguucaccagcagcgccaacggcgugaccacccacuacgugagccagaucggcggcuuccccaaccagaccgaggacggcggccugccccagagcggcagaaucgugguggacuacauggugcagaagagcggcaagaccggcaccaucaccuaccagagaggcauccugcugccccagaagguguggugcgccagcggcagaagcaaggugaucaagggcagccugccccugaucggcgaggccgacugccugcacgagaaguacggcggccugaacaagagcaagcccuacuacaccggcgagcacgccaaggccaucggcaacugccccaucugggugaagaccccccugaagcuggccaacggcaccaaguacagaccccccgccaagcugcugaaggagagaggcuucuucggcgccaucgccggcuuccuggagggcggcugggagggcaugaucgccggcuggcacggcuacaccagccacggcgcccacggcguggccguggccgccgaccugaagagcacccaggaggccaucaacaagaucaccaagaaccugaacagccugagcgagcuggaggugaagaaccugcagagacugagcggcgccauggacgagcugcacaacgagauccuggagcuggacgagaagguggacgaccugagagccgacaccaucagcagccagaucgagcuggccgugcugcugagcaacgagggcaucaucaacagcgaggacgagcaccugcuggcccuggagagaaagcugaagaagaugcugggccccagcgccguggagaucggcaacggcugcuucgagaccaagcacaagugcaaccagaccugccuggacagaaucgccgccggcaccuucgacgccggcgaguucagccugcccaccuucgacagccugaacaucaccgccgccagccugaacgacgacggccuggacaaccacaccauccugcuguacuacagcaccgccgccagcagccuggccgugacccugaugaucgccaucuucgugguguacauggugagcagagacaacgugagcugcagcaucugccuguga

SEQ ID NO: 186677 - RNA, 1758 nt, Artificial Sequence
  derived and/or modified CDS sequence (opt4) from hemagglutinin__InfluenzaB__AEO80194
augaaggccaucaucgugcugcugaugguggugaccagcaacgccgacagaaucugcaccggcaucaccagcagcaacagcccccacguggugaagaccgccacccagggcgaggugaacgugaccggcgugaucccccugaccaccacccccaccaagagccacuucgccaaccugaagggcaccgagaccagaggcaagcugugccccaagugccugaacugcaccgaccuggacguggcccugggcagacccaagugcaccggcaacauccccagcgccagagugagcauccugcacgaggugagacccgugaccagcggcugcuuccccaucaugcacgacagaaccaagaucagacagcugcccaaccugcugagaggcuacgagcacaucagacugagcacccacaacgugaucaacgccgagaacgcccccggcggccccuacaagaucggcaccagcggcagcugccccaacgugaccaacggcaacggcuucuucgccaccauggccugggccgugcccaagaacgacaacaacaagaccgccaccaacagccugaccaucgaggugcccuacaucugcaccgagggcgaggaccagaucaccguguggggcuuccacagcgacaacgaggcccagauggccaagcuguacggcgacagcaagccccagaaguucaccagcagcgccaacggcgugaccacccacuacgugagccagaucggcggcuuccccaaccagaccgaggacggcggccugccccagagcggcagaaucgugguggacuacauggugcagaagagcggcaagaccggcaccaucaccuaccagagaggcauccugcugccccagaagguguggugcgccagaggcagaagcaaggugaucaagggcagccugccccugaucggcgaggccgacugccugcacgagaaguacggcggccugaacaagagcaagcccuacuacaccggcgagcacgccaaggccaucggcaacugccccaucugggugaagaccccccugaagcuggccaacggcaccaaguacagaccccccgccaagcugcugaaggagagaggcuucuucggcgccaucgccggcuuccuggagggcggcugggagggcaugaucgccggcuggcacggcuacaccagccacggcgcccacggcguggccguggccgccgaccugaagagcacccaggaggccaucaacaagaucaccaagaaccugaacagccugagcgagcuggaggugaagaaccugcagagacugagcggcgccauggacgagcugcacaacgagauccuggagcuggacgagaagguggacgaccugagagccgacaccaucagcagccagaucgagcuggccgugcugcugagcaacgagggcaucaucaacagcgaggacgagcaccugcuggcccuggagagaaagcugaagaagaugcugggccccagcgccguggagaucggcaacggcugcuucgagaccaagcacaagugcaaccagaccugccuggacagaaucgccgccggcaccuucgacgccggcgaguucagccugcccaccuucgacagccugaacaucaccgccgccagccugaacgacgacggccuggacaaccacaccauccugcuguacuacagcaccgccgccagcagccuggccgugacccugaugaucgccaucuucgugguguacaugaucagcagagacaacgugagcugcagcaucugccuguga

SEQ ID NO: 186678 - RNA, 1758 nt, Artificial Sequence; identical to SEQ ID NO: 186625
  derived and/or modified CDS sequence (opt4) from hemagglutinin__InfluenzaB__AEO80205

SEQ ID NO: 186679 - RNA, 1758 nt, Artificial Sequence; identical to SEQ ID NO: 186625
  derived and/or modified CDS sequence (opt4) from hemagglutinin__InfluenzaB__AEO80216

SEQ ID NO: 186680 - RNA, 1755 nt, Artificial Sequence
  derived and/or modified CDS sequence (opt4) from hemagglutinin__InfluenzaB__AEO80227
augaaggccaucaucgugcugcugaugguggugaccagcaacgccgacagaaucugcaccggcaucaccagcagcaacagcccccacguggugaagaccgccacccagggcgaggugaacgugaccggcgugaucccccugaccaccacccccaccaagagcuacuucgccaaccugaagggcaccagaaccagaggcaagcugugccccgacugccugaacugcaccgaccuggacguggcccugggcagacccaugugcgugggcaccacccccagcgccaaggccagcauccugcacgaggugagacccgugaccagcggcugcuuccccaucaugcacgacagaaccaagaucagacagcuggccaaccugcugagaggcuacgagaacaucagacugagcacccagaacgugaucgacgccgagaaggcccccggcggccccuacagacugggcaccagcggcagcugccccaacgccaccagcaagagcggcuucuucgccaccauggccugggccgugcccaaggacaacaacaagaacgccaccaacccccugaccguggaggugcccuacaucugcaccgagggcgaggaccagaucaccguguggggcuuccacagcgacaacaagauccagaugaagaaccuguacggcgacagcaacccccagaaguucaccagcagcgccaacggcgugaccacccacuacgugagccagaucggcggcuuccccgaccagaccgaggacggcggccugccccagagcggcagaaucgugguggacuacaugaugcagaagcccggcaagaccggcaccaucguguaccagagaggcgugcugcugccccagaagguguggugcgccagcggcagaagcaaggugaucaagggcagccugccccugaucggcgaggccgacugccugcacgagaaguacggcggccugaacaagagcaagcccuacuacaccggcgagcacgccaaggccaucggcaacugccccaucugggugaagaccccccugaagcuggccaacggcaccaaguacagaccccccgccaagcugcugaaggagagaggcuucuucggcgccaucgccggcuuccuggagggcggcugggagggcaugaucgccggcuggcacggcuacaccagccacggcgcccacggcguggccguggccgccgaccugaagagcacccaggaggccaucaacaagaucaccaagaaccugaacagccugagcgagcuggaggugaagaaccugcagagacugagcggcgccauggacgagcugcacaacgagauccuggagcuggacgagaagguggacgaccugagagccgacaccaucagcagccagaucgagcuggccgugcugcugagcaacgagggcaucaucaacagcgaggacgagcaccugcuggcccuggagagaaagcugaagaagaugcugggccccagcgccguggacaucggcaacggcugcuucgagaccaagcacaagugcaaccagaccugccuggacagaaucgccgccggcaccuucaacgccggcgaguucagccugcccaccuucgacagccugaacaucaccgccgccagccugaacgacgacggccuggacaaccacaccauccugcuguacuacagcaccgccgccagcagccuggccgugacccugaugcuggccaucuucaucguguacauggugagcagagacaacgugagcugcagcaucugccuguga

SEQ ID NO: 186681 - RNA, 1758 nt, Artificial Sequence; identical to SEQ ID NO: 186642
  derived and/or modified CDS sequence (opt4) from hemagglutinin__InfluenzaB__AEO80238

SEQ ID NO: 186682 - RNA, 1758 nt, Artificial Sequence
  derived and/or modified CDS sequence (opt4) from hemagglutinin__InfluenzaB__AEP20178
augaaggccaucaucgugcugcugaugguggugaccagcaacgccgacagaaucugcaccggcaucaccagcagcaacagcccccacguggugaagaccgccacccagggcgaggugaacgugaccggcgugaucccccugaccaccacccccaccaagagccacuucagcaaccugaagggcaccgagaccagaggcaagcugugccccaagugccugaacugcaccgaccuggacguggcccugggcagacccaagugcaccggcaacauccccagcgccagagugagcauccugcacgaggugagacccgugaccagcggcugcuuccccaucaugcacgacagaaccaagaucagacagcugcccaaccugcugagaggcuacgagcacaucagacugagcacccacaacgugaucaacgccgagaacgcccccggcggccccuacaagaucggcaccagcggcagcugccccaacgugaccaacggcaacggcuucuucgccaccauggccugggccgugcccaagaacgacaacaacaagaccgccaccaacagccugaccaucgaggugcccuacaucugcaccgagggcgaggaccagaucaccguguggggcuuccacagcgacaacgagacccagauggccaagcuguacggcgacagcaagccccagaaguucaccagcagcgccaacggcgugaccacccacuacgugagccagaucggcggcuuccccaaccagaccgaggacggcggccugccccagagcggcagaaucgugguggacuacauggugcagaagagcggcaagaccggcaccaucaccuaccagagaggcauccugcugccccagaagguguggugcgccagcggcagaagcaaggugaucaagggcagccugccccugaucggcgaggccgacugccugcacgagaaguacggcggccugaacaagagcaagcccuacuacaccggcgagcacgccaaggccaucggcaacugccccaucugggugaagaccccccugaagcuggccaacggcaccaaguacagaccccccgccaagcugcugaaggagagaggcuucuucggcgccaucgccggcuuccuggagggcggcugggagggcaugaucgccggcuggcacggcuacaccagccacggcgcccacggcguggccguggccgccgaccugaagagcacccaggaggccaucaacaagaucaccaagaaccugaacagccugagcgagcuggaggugaagaaccugcagagacugagcggcgccauggacgagcugcacaacgagauccuggagcuggacgagaagguggacgaccugagagccgacaccaucagcagccagaucgagcuggccgugcugcugagcaacgagggcaucaucaacagcgaggacgagcaccugcuggcccuggagagaaagcugaagaagaugcugggccccagcgccguggagaucggcaacggcugcuucgagaccaagcacaagugcaaccagaccugccuggacagaaucgccgccggcaccuucgacgccggcgaguucagccugcccaccuucgacagccugaacaucaccgccgccagccugaacgacgacggccuggacaaccacaccauccugcuguacuacagcaccgccgccagcagccuggccgugacccugaugaucgccaucuucgugguguacauggugagcagagacaacgugagcugcagcaucugccuguga

SEQ ID NO: 186683 - RNA, 1758 nt, Artificial Sequence
  derived and/or modified CDS sequence (opt4) from hemagglutinin__InfluenzaB__AEP20189
augaaggccaucaucgugcugcugaugguggugaccagcaacgccgacagaaucugcaccggcaucaccagcagcaacagcccccacguggugaagaccgccacccagggcgaggugaacgugaccggcgugaucccccugaccaccacccccaccaagagccacuucgccaaccugaagggcaccgagaccagaggcaagcugugccccaagugccugaacugcaccgaccuggacguggcccugggcagacccaagugcaccggcaacauccccagcgccagagugagcauccugcacgaggugagacccgugaccagcggcugcuuccccaucaugcacgacagaaccaagaucagacagcugcccaaccugcugagaggcuacgagcacaucagacugagcacccacaacgugaucaacgccgagaacgcccccggcggccccuacaagaucggcaccagcggcagcugccccaacgugaccaacggcaacggcuucuucgccaccauggccugggccgugcccaagaacgacaacaacaagaccgccaccaacagccugaccaucgaggugcccuacaucugcaccgagggcgaggaccagaucaccguguggggcuuccacagcgacaacgagacccagauggccaagcuguacggcgacagcaagccccagaaguucaccagcagcgccaacggcgugaccacccacuacgugagccagaucggcggcuuccccaaccagaccgaggacggcggccugccccagagcggcagaaucgugguggacuacauggugcagaagagcggcaagaccggcaccaucaccuaccagagaggcauccugcugccccagaagguguggugcgccagcggcagaagcaaggugaucaagggcagccugccccugaucggcgaggccgacugccugcacgagaaguacggcggccugaacaagagcaagcccuacuacaccggcgagcacgccaaggccaucggcaacugccccaucugggugaagaccccccugaagcuggccaacggcaccaaguacagaccccccgccaagcugcugaaggagagaggcuucuucggcgccaucgccggcuuccuggagggcggcugggagggcaugaucgccggcuggcacggcuacaccagccacggcgcccacggcguggccguggccgccgaccugaagagcacccaggaggccaucaacaagaucaccaagaaccugaacagccugagcgagcuggaggugaagaaccugcagagacugagcggcgccauggacgagcugcacaacgagauccuggagcuggacgagaagguggacgaccugagagccgacaccaucagcagccagaucgagcuggccgugcugcugagcaacgagggcaucaucaacagcgaggacgagcaccugcuggcccuggagagaaagcugaagaagaugcugggccccagcgccguggagaucggcaacggcugcuucgagaccaagcacaagugcaaccagaccugccuggacagaaucgccgccggcaccuucgacgccggcgaguucagccugcccaccuucgacagccugaacaucaccgccgccagccugaacgacgacggccuggacaaccacaccgugcugcuguacuacagcaccgccgccagcagccuggccgugacccugaugaucgccaucuucgugguguacauggugagcagagacaacgugagcugcagcaucugccuguga

SEQ ID NO: 186684 - RNA, 1758 nt, Artificial Sequence; identical to SEQ ID NO: 186574
  derived and/or modified CDS sequence (opt4) from hemagglutinin__InfluenzaB__AEP20200

SEQ ID NO: 186685 - RNA, 1755 nt, Artificial Sequence; identical to SEQ ID NO: 186465
  derived and/or modified CDS sequence (opt4) from hemagglutinin__InfluenzaB__AEP20211

SEQ ID NO: 186686 - RNA, 1755 nt, Artificial Sequence
  derived and/or modified CDS sequence (opt4) from hemagglutinin__InfluenzaB__AEP20222
augaaggccaucaucgugcugcugaugguggugaccagcaacgccgacagaaucugcaccggcaucaccagcagcaacagcccccacguggugaagaccgccacccagggcgaggugaacgugaccggcgccaucccccugaccaccacccccaccaagagccacuucgccaaccugaagggcaccaagaccagaggcaagcugugccccaccugcuucaacugcaccgaccuggacguggcccugggcagacccaugugcgugggcaucacccccagcgccaaggccagcauccugcacgaggugagacccgugaccagcggcugcuuccccaucaugcacgacagaaccaagaucagacagcugcccaaccugcugagaggcuacgagaagaucagacugagcacccagaacgugaucgacgccgagaaggcccccggcggccccuacagacugggcaccagcggcagcugccccaacgccaccagcaagagcggcuucuucgccaccauggccugggccgugcccagagacaacaacaagaccgccaccaacccccugaccguggaggugcccaacaucugcaccaaggaggaggaccagaucaccguguggggcuuccacagcgacaacaagacccagaugaagaaccuguacggcgaccccaacccccagaaguucaccagcagcgccaacggcaucaccacccacuacgugagccagaucggcggcuuccccgaccagaccgaggacggcggccugccccagagcggcagaaucgugguggacuacauggugcagaagcccggcaagaccggcaccaucguguaccagagaggcauccugcugccccagaagguguggugcgccagcggcagaagcaaggugaucaagggcagccugccccugaucggcgaggccgacugccugcacgagaaguacggcggccugaacaagagcaagcccuacuacaccggcgagcacgccaaggccaucggcaacugccccaucugggugaagaccccccugaagcuggccaacggcaccaaguacagaccccccgccaagcugcugaaggagagaggcuucuucggcgccaucgccggcuuccuggagggcggcugggagggcaugaucgccggcuggcacggcuacaccagccacggcgcccacggcguggccguggccgccgaccugaagagcacccaggaggccaucaacaagaucaccaagaaccugaacagccugagcgagcuggaggugaagaaccugcagagacugagcggcgccauggacgagcugcacaacgagauccuggagcuggacgagaagguggacgaccugagagccgacaccaucagcagccagaucgagcuggccgugcugcugagcaacgagggcaucaucaacagcgaggacgagcaccugcuggcccuggagagaaagcugaagaagaugcugggccccagcgccguggacaucggcaacggcugcuucgagaccaagcacaagugcaaccagaccugccuggacagaaucgccgccggcaccuucaacgccggcgaguucagccugcccaccuucgacagccugaacaucaccgccgccagccugaacgacgacggccuggacaaccacaccauccugcuguacuacagcaccgccgccagcagccuggccgugacccugaugaucgccaucuucaucguguacaugaucagcagagacaacgugagcugcagcaucugccuguga

SEQ ID NO: 186687 - RNA, 1755 nt, Artificial Sequence; identical to SEQ ID NO: 186571
  derived and/or modified CDS sequence (opt4) from hemagglutinin__InfluenzaB__AEP20233

SEQ ID NO: 186688 - RNA, 1755 nt, Artificial Sequence
  derived and/or modified CDS sequence (opt4) from hemagglutinin__InfluenzaB__AEP20244
augaaggccaucaucgugcugcugaugguggugaccagcaacgccgacagaaucugcaccggcaucaccagcagcaacagcccccacguggugaagaccgccacccagggcgaggugaacgugaccggcgccaucccccugaccaccacccccaccaagagccacuucgccaaccugaagggcaccaagaccagaggcaagcugugccccaccugcuucaacugcaccgaccuggacguggcccugggcagacccaugugcaugggcaucacccccagcgccaaggccagcauccugcacgaggugagacccgugaccagcggcugcuuccccaucaugcacgacagaaccaagaucagacagcugcccaaccugcugagaggcuacgagaagaucagacugagcacccagaacgugaucgacgccgagaaggcccccggcggccccuacagacugggcaccagcggcagcugccccaacgccaccagcaagagcggcuucuucgccaccauggccugggccgugcccagaggcaacaacaagaccgccaccaacccccugaccguggaggugccccacaucugcaccaaggaggaggaccagaucaccguguggggcuuccacagcgacaacaagacccagaugaagaaccuguacggcgacagcaacccccagaaguucaccagcagcgccaacggcaucaccacccacuacgugagccagaucggcggcuuccccgaccagaccgaggacggcggccugccccagagcggcagaaucgugguggacuacauggugcagaagcccggcaagaccggcaccaucguguaccagagaggcauccugcugccccagaagguguggugcgccagcggcagaagcaaggugaucaagggcagccugccccugaucggcgaggccgacugccugcacgagaaguacggcggccugaacaagagcaagcccuacuacaccggcgagcacgccaaggccaucggcaacugccccaucugggugaagaccccccugaagcuggccaacggcaccaaguacagaccccccgccaagcugcugaaggagagaggcuucuucggcgccaucgccggcuuccuggagggcggcugggagggcaugaucgccggcuggcacggcuacaccagccacggcgcccacggcguggccguggccgccgaccugaagagcacccaggaggccaucaacaagaucaccaagaaccugaacagccugagcgagcuggaggugaagaaccugcagagacugagcggcgccauggacgagcugcacaacgagauccuggagcuggacgagaagguggacgaccugagagccgacaccaucagcagccagaucgagcuggccgugcugcugagcaacgagggcaucaucaacagcgaggacgagcaccugcuggcccuggagagaaagcugaagaagaugcugggccccagcgccguggacaucggcaacggcugcuucgagaccaagcacaagugcaaccagaccugccuggacagaaucgccgccggcaccuucaacgccggcgaguucagccugcccaccuucgacagccugaacaucaccgccgccagccugaacgacgacggccuggacaaccacaccauccugcuguacuacagcaccgccgccagcagccuggccgugacccugaugaucgccaucuucaucguguacaugaucagcagagacaacgugagcugcagcaucugccuguga

SEQ ID NO: 186689 - RNA, 1758 nt, Artificial Sequence; identical to SEQ ID NO: 186479
  derived and/or modified CDS sequence (opt4) from hemagglutinin__InfluenzaB__AEP20255

SEQ ID NO: 186690 - RNA, 1758 nt, Artificial Sequence
  derived and/or modified CDS sequence (opt4) from hemagglutinin__InfluenzaB__AEP20277
augaaggccaucaucgugcugcugaugguggugaccagcaacgccgacagaaucugcaccggcaucaccagcagcaacagcccccacguggugaagaccgccacccagggcgaggugaacgugaccggcgugaucccccugaccaccacccccaccaagagccacuucgccaaccugaagggcaccaagaccagaggcaagcugugccccaagugccugaacugcaccgaccuggacguggcccugggcagacccaagugcaccggcaacauccccagcgccgaggugagcauccugcacgaggugagacccgugaccagcggcugcuuccccaucaugcacgacagaaccaagaucagacagcugcccaaccugcugagaggcuacgagcacaucagacugagcacccacaacgugaucaacgccgagaaggcccccggcggccccuacaagaucggcaccagcggcagcugccccaacgugaccaacggcaacggcuucuucgccaccauggccugggccgugcccaagaacgacaacaacaagaccgccaccaacagccugaccaucgaggugcccuacaucugcaccgagggcgaggaccagaucaccguguggggcuuccacagcgacaacgagacccagauggccaagcuguacggcgacagcaagccccagaaguucaccagcagcgccaacggcgugaccacccacuacgugagccagaucggcggcuuccccaaccagaccgaggacggcggccugccccagagcggcagaaucgugguggacuacauggugcagaagagcggcaagaccggcaccaucaccuaccagagaggcauccugcugccccagaagguguggugcgccagcggcagaagcaaggugaucaagggcagccugccccugaucggcgaggccgacugccugcacgagaaguacggcggccugaacaagagcaagcccuacuacaccggcgagcacgccaaggccaucggcaacugccccaucugggugaagaccccccugaagcuggccaacggcaccaaguacagaccccccgccaagcugcugaaggagagaggcuucuucggcgccaucgccggcuuccuggagggcggcugggagggcaugaucgccggcuggcacggcuacaccagccacggcgcccacggcguggccguggccgccgaccugaagagcacccaggaggccaucaacaagaucaccaagaaccugaacagccugagcgagcuggaggugaagaaccugcagagacugagcggcgccauggacgagcugcacaacgagauccuggagcuggacgagaagguggacgaccugagagccgacaccaucagcagccagaucgagcuggccgugcugcugagcaacgagggcaucaucaacagcgaggacgagcaccugcuggcccuggagagaaagcugaagaagaugcugggccccagcgccguggagaucggcaacggcugcuucgagaccaagcacaagugcaaccagaccugccuggacaagaucgccgccggcaccuucgacgccggcgaguucagccugcccaccuucgacagccugaacaucaccgccgccagccugaacgacgacggccuggacaaccacaccauccugcuguacuacagcaccgccgccagcagccuggccgugacccugaugaucgccaucuucgugguguacauggugagcagagacaacgugagcugcagcaucugccuguga

SEQ ID NO: 186691 - RNA, 1755 nt, Artificial Sequence
  derived and/or modified CDS sequence (opt4) from hemagglutinin__InfluenzaB__AEP20299
augaaggccaucaucgugcugcugaugguggugaccagcaacgccgacagaaucugcaccggcaucaccagcagcaacagcccccacguggugaagaccgccacccagggcgaggugaacgugaccggcgugaucccccugaccaccacccccaccaagagcuacuucgccaaccugaagggcaccagaaccagaggcaagcugugccccgacugccugaacugcaccgaccuggacguggcccugggcagacccaugugcgugggcaccacccccagcgccaaggccagcauccugcacgaggugagacccgugaccagcggcugcuuccccaucaugcacgacagaaccaagaucagacagcuggccaaccugcugagaggcuacgagaacaucagacugagcacccagaacgugaucgacgccgagaaggcccccggcggccccuacagacugggcaccagcggcagcugccccaacgccaccagcaagagcggcuucuucgccaccauggccugggccgugcccaagaacaacaacaagaacgccaccaacccccugaccguggaggugcccuacaucugcaccgagggcgaggaccagaucaccguguggggcuuccacagcgacaacaagacccagaugaagaaccuguacggcgacagcaacccccagaaguucaccagcagcgccaacggcgugaccacccacuacgugagccagaucggcggcuuccccgaccagaccgaggacggcggccugccccagagcggcagaaucgugguggacuacaugaugcagaagcccggcaagaccggcaccaucguguaccagagaggcgugcugcugccccagaagguguggugcgccagcggcagaagcaaggugaucaagggcagccugccccugaucggcgaggccgacugccugcacgagaaguacggcggccugaacaagagcaagcccuacuacaccggcgagcacgccaaggccaucggcaacugccccaucugggugaagaccccccugaagcuggccaacggcaccaaguacagaccccccgccaagcugcugaaggagagaggcuucuucggcgccaucgccggcuuccuggagggcggcugggagggcaugaucgccggcuggcacggcuacaccagccacggcgcccacggcguggccguggccgccgaccugaagagcacccaggaggccaucaacaagaucaccaagaaccugaacagccugagcgagcuggaggugaagaaccugcagagacugagcggcgccauggacgagcugcacaacgagauccuggagcuggacgagaagguggacgaccugagagccgacaccaucagcagccagaucgagcuggccgugcugcugagcaacgagggcaucaucaacagcgaggacgagcaccugcuggcccuggagagaaagcugaagaagaugcugggccccagcgccguggacaucggcaacggcugcuucgagaccaagcacaagugcaaccagaccugccuggacagaaucgccgccggcaccuucaacgccggcgaguucagccugcccaccuucgacagccugaacaucaccgccgccagccugaacgacgacggccuggacaaccacaccauccugcuguacuacagcaccgccgccagcagccuggccgugacccugaugcuggccaucuucaucguguacauggugagcagagacaacgugagcugcagcaucugccuguga

SEQ ID NO: 186692 - RNA, 1755 nt, Artificial Sequence
  derived and/or modified CDS sequence (opt4) from hemagglutinin__InfluenzaB__AEP20310
augaaggccaucaucgugcugcugaugguggugaccagcaacgccgacagaaucugcaccggcaucaccagcagcaacagcccccacguggugaagaccgccacccagggcgaggugaacgugaccggcgugaucccccugaccaccacccccaccaagagcuacuucgccaaccugaagggcaccagaaccagaggcaagcugugccccgacugccugaacugcaccgaccuggacguggcccugggcagacccaugugcgugggcaccacccccagcgccaaggccagcauccugcacgaggugagacccgugaccagcggcugcuuccccaucaugcacgacagaaccaagaucagacagcugcccaaccugcugagaggcuacgagaacaucagacugagcacccagaacgugaucgacgccgagaaggcccccggcggccccuacagacugggcaccagcggcagcugccccaacgccaccagcaagagcggcuucuucgccaccauggccugggccgugcccaaggacaacaacaagaacgccaccaacccccugaccguggaggugcccuacaucugcaccgagggcgaggaccagaucaccguguggggcuuccacagcgacaacaagacccagaugaagaaccuguacggcgacagcaacccccagaaguucaccagcagcgccaacggcgugaccgcccacuacgugagccagaucggcggcuuccccgaccagaccgaggacggcggccugccccagagcggcagaaucgugguggacuacaugaugcagaagcccggcaagaccggcaccaucguguaccagagaggcgugcugcugccccagaagguguggugcgccagcggcagaagcaaggugaucaagggcagccugccccugaucggcgaggccgacugccugcacgagaaguacggcggccugaacaagagcaagcccuacuacaccggcgagcacgccaaggccaucggcaacugccccaucugggugaagaccccccugaagcuggccaacggcaccaaguacagaccccccgccaagcugcugaaggagagaggcuucuucggcgccaucgccggcuuccuggagggcggcugggagggcaugaucgccggcuggcacggcuacaccagccacggcgcccacggcguggccguggccgccgaccugaagagcacccaggaggccaucaacaagaucaccaagaaccugaacagccugagcgagcuggaggugaagaaccugcagagacugagcggcgccauggacgagcugcacaacgagauccuggagcuggacgagaagguggacgaccugagagccgacaccaucagcagccagaucgagcuggccgugcugcugagcaacgagggcaucaucaacagcgaggacgagcaccugcuggcccuggagagaaagcugaagaagaugcugggccccagcgccguggacaucggcaacggcugcuucgagaccaagcacaagugcaaccagaccugccuggacagaaucgccgccggcaccuucaacgccggcgaguucagccugcccaccuucgacagccugaacaucaccgccgccagccugaacgacgacggccuggacaaccacaccauccugcuguacuacagcaccgccgccagcagccuggccgugacccugaugcuggccaucuucaucguguacauggugagcagagacaacgugagcugcagcaucugccuguga

SEQ ID NO: 186693 - RNA, 1758 nt, Artificial Sequence
  derived and/or modified CDS sequence (opt4) from hemagglutinin__InfluenzaB__AEP20332
augaaggccaucaucgugcugcugaugguggugaccagcaacgccgacagaaucugcaccggcaucaccagcagcaacagcccccacguggugaagaccgccacccagggcgaggugaacgugaccggcgugaucccccugaccaccacccccaccaagagccacuucgccaaccugaagggcaccaagaccagaggcaagcugugccccaagugccugaacugcaccgaccuggacguggcccugggcagacccaagugcaccggcaacauccccagcgccgaggugagcauccugcacgaggugagacccgugaccagcggcugcuuccccaucaugcacgacagaaccaagaucagacagcugcccaaccugcugagaggcuacgagcacaucagacugagcacccacaacgugaucaacgccgagaaggcccccggcggccccuacaagaucggcaccagcggcagcugccccaacgugaccaacggcaacggcuucuucgccaccauggccugggccgugcccaagaacgacaacaacaagaccgccaccaacccccugaccaucgaggugcccuacaucugcaccgagggcgaggaccagaucaccguguggggcuuccacagcgacaacgagacccagauggccaagcuguacggcgacagcaagccccagaaguucaccagcagcgccaacggcgugaccacccacuacgugagccagaucggcggcuuccccaaccagaccgaggacggcggccugccccagagcggcagaaucgugguggacuacauggugcagaagagcggcaagaccggcaccaucaccuaccagagaggcauccugcugccccagaagguguggugcgccagcggcagaagcaaggugaucaagggcagccugccccugaucggcgaggccgacugccugcacgagaaguacggcggccugaacaagagcaagcccuacuacaccggcgagcacgccaaggccaucggcaacugccccaucugggugaagaccccccugaagcuggccaacggcaccaaguacagaccccccgccaagcugcugaaggagagaggcuucuucggcgccaucgccggcuuccuggagggcggcugggagggcaugaucgccggcuggcacggcuacaccagccacggcgcccacggcguggccguggccgccgaccugaagagcacccaggaggccaucaacaagaucaccaagaaccugaacagccugagcgagcuggaggugaagaaccugcagagacugagcggcgccauggacgagcugcacaacgagauccuggagcuggacgagaagguggacgaccugagagccgacaccaucagcagccagaucgagcuggccgugcugcugagcaacgagggcaucaucaacagcgaggacgagcaccugcuggcccuggagagaaagcugaagaagaugcugggccccagcgccguggagaucggcaacggcugcuucgagaccaagcacaagugcaaccagaccugccuggacagaaucgccgccggcaccuucgacgccggcgaguucagccugcccaccuucgacagccugaacaucaccgccgccagccugaacgacgacggccuggacaaccacaccauccugcuguacuacagcaccgccgccagcagccuggccgugacccugaugaucgccaucuucgugguguacauggugagcagagacaacgugagcugcagcaucugccuguga

SEQ ID NO: 186694 - RNA, 1755 nt, Artificial Sequence; identical to SEQ ID NO: 186486
  derived and/or modified CDS sequence (opt4) from hemagglutinin__InfluenzaB__AEP20343

SEQ ID NO: 186695 - RNA, 1755 nt, Artificial Sequence; identical to SEQ ID NO: 186486
  derived and/or modified CDS sequence (opt4) from hemagglutinin__InfluenzaB__AEP20354

SEQ ID NO: 186696 - RNA, 1755 nt, Artificial Sequence; identical to SEQ ID NO: 186486
  derived and/or modified CDS sequence (opt4) from hemagglutinin__InfluenzaB__AEP20365

SEQ ID NO: 186697 - RNA, 1755 nt, Artificial Sequence; identical to SEQ ID NO: 186486
  derived and/or modified CDS sequence (opt4) from hemagglutinin__InfluenzaB__AEP20376

SEQ ID NO: 186698 - RNA, 1758 nt, Artificial Sequence
  derived and/or modified CDS sequence (opt4) from hemagglutinin__InfluenzaB__AEP20398
augaaggccaucaucgugcugcugaugguggugaccagcaacgccgacagaaucugcaccggcaucaccagcagcaacagcccccacguggugaagaccgccacccagggcgaggugaacgugaccggcgugaucccccugaccaccacccccaccaagagccacuucgccaaccugaagggcaccaagaccagaggcaagcugugccccaagugccugaacugcaccgaccuggacguggcccugggcagacccaagugcaccggcaacauccccagcgccgaggugagcauccugcacgaggugagacccgugaccagcggcugcuuccccaucaugcacgacagaaccaagaucagacagcugcccaaccugcugagaggcuacgagcacaucagacugagcacccacaacgugaucaacgccgagaaggcccccggcggccccuacaagaucggcaccagcggcagcugccccaacgugaccaacggcaacggcuucuucgccaccauggccugggccgugcccaagaacgacaacaacaagaccgccaccaacagccugaccaucgaggugcccuacaucugcaccgagggcgaggaccagaucaccaucuggggcuuccacagcgacaacgagacccagauggccaagcuguacggcgacagcaagccccagaaguucaccagcagcgccaacggcgugaccacccacuacgugagccagaucggcggcuuccccaaccagaccgaggacggcggccugccccagagcggcagaaucgugguggacuacauggugcagaagagcggcaagaccggcaccaucaccuaccagagaggcauccugcugccccagaagguguggugcgccagcggcagaagcaaggugaucaagggcagccugccccugaucggcgaggccgacugccugcacgagaaguacggcggccugaacaagagcaagcccuacuacaccggcgagcacgccaaggccaucggcaacugccccaucugggugaagaccccccugaagcuggccaacggcaccaaguacagaccccccgccaagcugcugaaggagagaggcuucuucggcgccaucgccggcuuccuggagggcggcugggagggcaugaucgccggcuggcacggcuacaccagccacggcgcccacggcguggccguggccgccgaccugaagagcacccaggaggccaucaacaagaucaccaagaaccugaacagccugagcgagcuggaggugaagaaccugcagagacugagcggcgccauggacgagcugcacaacgagauccuggagcuggacgagaagguggacgaccugagagccgacaccaucagcagccagaucgagcuggccgugcugcugagcaacgagggcaucaucaacagcgaggacgagcaccugcuggcccuggagagaaagcugaagaagaugcugggccccagcgccguggagaucggcaacggcugcuucgagaccaagcacaagugcaaccagaccugccuggacagaaucgccgccggcaccuucgacgccggcgaguucagccugcccaccuucgacagccugaacaucaccgccgccagccugaacgacgacggccuggacaaccacaccauccugcuguacuacagcaccgccgccagcagccuggccgugacccugaugaucgccaucuucgugguguacauggugagcagagacaacgugagcugcagcaucugccuguga

SEQ ID NO: 186699 - RNA, 1758 nt, Artificial Sequence; identical to SEQ ID NO: 186668
  derived and/or modified CDS sequence (opt4) from hemagglutinin__InfluenzaB__AEP20409

SEQ ID NO: 186700 - RNA, 1758 nt, Artificial Sequence; identical to SEQ ID NO: 186668
  derived and/or modified CDS sequence (opt4) from hemagglutinin__InfluenzaB__AEP20420

SEQ ID NO: 186701 - RNA, 1758 nt, Artificial Sequence; identical to SEQ ID NO: 186668
  derived and/or modified CDS sequence (opt4) from hemagglutinin__InfluenzaB__AEP20431

SEQ ID NO: 186702 - RNA, 1758 nt, Artificial Sequence; identical to SEQ ID NO: 186668
  derived and/or modified CDS sequence (opt4) from hemagglutinin__InfluenzaB__AEP20442

SEQ ID NO: 186703 - RNA, 1758 nt, Artificial Sequence; identical to SEQ ID NO: 186668
  derived and/or modified CDS sequence (opt4) from hemagglutinin__InfluenzaB__AEP20453

SEQ ID NO: 186704 - RNA, 1755 nt, Artificial Sequence; identical to SEQ ID NO: 186486
  derived and/or modified CDS sequence (opt4) from hemagglutinin__InfluenzaB__AEQ39027

SEQ ID NO: 186705 - RNA, 1758 nt, Artificial Sequence
  derived and/or modified CDS sequence (opt4) from hemagglutinin__InfluenzaB__AEQ39260
augaaggccaucaucgugcugcugaugguggugaccagcaacgccgacagaaucugcaccggcaucaccagcagcaacagcccccacguggugaagaccgccacccagggcgaggugaacgugaccggcgugaucccccugaccaccacccccaccaagagccacuucgccaaccugaagggcaccgagaccagaggcaagcugugccccaagugccugaacugcaccgaccuggacguggcccugggcagacccaagugcaccggcaagauccccagcgccagagugagcauccugcacgaggugagacccgugaccagcggcugcuuccccaucaugcacgacagaaccaagaucagacagcugcccaaccugcugagaggcuacgagcacaucagacugagcacccacaacgugaucaacgccgagaacgcccccggcggccccuacaagaucggcaccagcggcagcugccccaacgugaccaacggcaacggcuucuucgccaccauggccugggccgugcccaagaacgacaagaacaagaccgccaccaacccccugaccaucgaggugcccuacaucugcaccgagggcgaggaccagaucaccguguggggcuuccacagcgacaacgagacccagauggccaagcuguacggcgacagcaagccccagaaguucaccagcagcgccaacggcgugaccacccacuacgugagccagaucggcggcuuccccaaccagaccgaggacggcggccugccccagagcggcagaaucgugguggacuacauggugcagaagagcggcaagaccggcaccaucaccuaccagagaggcauccugcugccccagaagguguggugcgccagcggcagaagcaaggugaucaagggcagccugccccugaucggcgaggccgacugccugcacgagaaguacggcggccugaacaagagcaagcccuacuacaccggcgagcacgccaaggccaucggcaacugccccaucugggugaagaccccccugaagcuggccaacggcaccaaguacagaccccccgccaagcugcugaaggagagaggcuucuucggcgccaucgccggcuuccuggagggcggcugggagggcaugaucgccggcuggcacggcuacaccagccacggcgcccacggcguggccguggccgccgaccugaagagcacccaggaggccaucaacaagaucaccaagaaccugaacagccugagcgagcuggaggugaagaaccugcagagacugagcggcgccauggacgagcugcacaacgagauccuggagcuggacgagaagguggacgaccugagagccgacaccaucagcagccagaucgagcuggccgugcugcugagcaacgagggcaucaucaacagcgaggacgagcaccugcuggcccuggagagaaagcugaagaagaugcugggccccagcgccguggagaucggcaacggcugcuucgagaccaagcacaagugcaaccagaccugccuggacagaaucgccgccggcaccuucgacgccggcgaguucagccugcccaccuucgacagccugaacaucaccgccgccagccugaacgacgacggccuggacaaccacaccauccugcuguacuacagcaccgccgccagcagccuggccgugacccugaugaucgccaucuucgugguguacauggugagcagagacaacgugagcugcagcaucugccuguga

SEQ ID NO: 186706 - RNA, 1758 nt, Artificial Sequence; identical to SEQ ID NO: 186705
  derived and/or modified CDS sequence (opt4) from hemagglutinin__InfluenzaB__AEQ39271

SEQ ID NO: 186707 - RNA, 1758 nt, Artificial Sequence
  derived and/or modified CDS sequence (opt4) from hemagglutinin__InfluenzaB__AEQ39282
augaaggccaucaucgugcugcugaugguggugaccagcaacgccgacagaaucugcaccggcaucaccagcagcaacagcccccacguggugaagaccgccacccagggcgaggugaacgugaccggcgugaucccccugaccaccacccccaccaagagccacuucgccaaccugaagggcaccgagaccagaggcaagcugugccccaagugccugaacugcaccgaccuggacguggcccugggcagacccaagugcaccggcaagauccccagcgccagagugagcauccugcacgaggugagacccgugaccagcggcugcuuccccaucaugcacgacagaaccaagaucagacagcugcccaaccugcugagaggcuacgagcacaucagacugagcacccacaacgugaucaacgccgagaacgcccccggcggccccuacaagaucggcaccagcggcagcugccccaacgugaccaacggcaacggcuucuucgccaccauggccugggccgugcccaagaacgacaagaacaagaccgccaccaacccccugaccaucgaggugcccuacaucugcaccgagggcgaggaccagaucaccguguggggcuuccacagcgacaacgagacccagauggccaagcuguacggcgacagcaagccccagaaguucaccagcagcgccaacggcgugaccacccacuacgugagccagaucggcggcuuccccaaccagaccgaggacggcggccugccccagagcggcagaaucgugguggacuacauggugcagaagagcggcaagaccggcaccaucaccuaccagagaggcauccugcugccccagaagguguggugcgccagcggcagaagcaaggugaucaagggcagccugccccugaucggcgaggccgacugccugcacgagaaguacggcggccugaacaagagcaagcccuacuacaccggcgagcacgccaaggccaucggcaacugccccaucugggugaagaccccccugaagcuggccaacggcaccaaguacagaccccccgccaagcugcugaaggagagaggcuucuucggcgccaucgccggcuuccuggagggcggcugggagggcaugaucgccggcuggcacggcuacaccagccacggcgcccacggcguggccguggccgccgaccugaagagcacccaggaggccaucaacaagaucaccaagaaccugaacagccugagcgagcuggaggugaagaaccugcagagacugagcggcgccauggacgagcugcacaacgagauccuggagcuggacgagaagguggacgaccugagagccgacaccaucagcagccagaucgagcuggccgugcugcugagcaacgagggcaucaucaacagcgaggacgagcaccugcuggcccuggagagaaagcugaagaagaugcugggccccagcgccguggagaucggcaacggcugcuucgagaccaagcacaagugcaaccagaccugccuggacagaaucgccgccggcaccuucgacgccggcgaguucagccugcccaccuucgacagccugaacaucaccgccgccagccugaacggcgacgagcuggacaaccacaccauccugcuguacuacagcaccgccgccagcagccuggccgugacccugaugaucgccaucuucgugguguacauggugagcagagacaacgugagcugcagcaucugccuguga

SEQ ID NO: 186708 - RNA, 1758 nt, Artificial Sequence
  derived and/or modified CDS sequence (opt4) from hemagglutinin__InfluenzaB__AEQ39315
augaaggccaucaucgugcugcugaugguggugaccagcaacgccgacagaaucugcaccggcaucaccagcagcaacagcccccacguggugaagaccgccacccagggcgaggugaacgugaccggcgugaucccccugaccaccacccccaccaagagccacuucgccaaccugaagggcaccgagaccagaggcaagcugugccccaagugccugaacugcaccgaccuggacguggcccugggcagacccaagugcaccggcaagauccccagcgccagagugagcauccugcacgaggugagacccgugaccagcggcugcuuccccaucaugcacgacagaaccaagaucagacagcugcccaaccugcugagaggcuacgagcacaucagacugagcacccacaacgugaucaacgccgagaacgcccccggcggccccuacaagaucggcaccagcggcagcugccccaacgugaccaacggcaacggcuucuucgccaccauggccugggccgugcccaagaacgacaagaacaagaccgccaccaacccccugaccaucgaggugcccuacaucugcaccgagggcgaggaccagaucaccguguggggcuuccacagcgacaacgagacccagauggccaagcuguacggcgacagcaagccccagaaguucaccagcagcgccaacggcgugaccacccacuacgugagccagaucggcggcuuccccaaccagaccgaggacggcggccugccccagagcggcagaaucgugguggacuacauggugcagaagagcggcaagaccggcaccaucaccuaccagagaggcauccugcugccccagaagguguggugcgccagcggcagaagcaaggugaucaagggcagccugccccugaucggcgaggccgacugccugcacgagaaguacggcggccugaacaagagcaagcccuacuacaccggcgagcacgccaaggccaucggcaacugccccaucugggugaagaccccccugaagcuggccaacggcaccaaguacagaccccccgccaagcugcugaaggagagaggcuucuucggcgccaucgccggcuuccuggagggcggcugggagggcaugaucgccggcuggcacggcuacaccagccacggcgcccacggcguggccguggccgccgaccugaagagcacccaggaggccaucaacaagaucaccaagaaccugaacagccugagcgagcuggaggugaagaaccugcagagacugagcggcgccauggacgagcugcacaacgagauccuggagcuggacgagaagguggacgaccugagagccgacaccaucagcagccagaucgagcuggccgugcugcugagcaacgagggcaucaucaacagcgaggacgagcaccugcuggcccuggagagaaagcugaagaagaugcugggccccagcgccguggagaucggcaacggcugcuucgagaccaagcacaagugcaaccagaccugccuggacagaaucgccgccggcaccuucgacgccggcgaguucagccugcccaccuucgacagccugaacaucaccgccgccagccugaacggcgacggccuggacaaccacaccauccugcuguacuacagcaccgccgccagcagccuggccgugacccugaugaucgccaucuucgugguguacauggugagcagagacaacgugagcugcagcaucugccuguga

SEQ ID NO: 186709 - RNA, 1758 nt, Artificial Sequence; identical to SEQ ID NO: 186708
  derived and/or modified CDS sequence (opt4) from hemagglutinin__InfluenzaB__AEQ39326

SEQ ID NO: 186710 - RNA, 1758 nt, Artificial Sequence
  derived and/or modified CDS sequence (opt4) from hemagglutinin__InfluenzaB__AEQ39337
augaaggccaucaucgugcugcugaugguggugaccagcaacgccgacagaaucugcaccggcaucaccagcagcaacagcccccacguggugaagaccgccacccagggcgaggugaacgugaccggcgugaucccccugaccaccacccccaccaagagccacuucgccaaccugaagggcaccgagaccagaggcaagcugugccccaagugccugaacugcaccgaccuggacguggcccugggcagacccaagugcaccggcaagauccccagcgccagagugagcauccugcacgaggugagacccgugaccagcggcugcuuccccaucaugcacgacagaaccaagaucagacagcugcccaaccugcugagaggcuacgagcacaucagacugagcacccacaacgugaucaacgccggcaacgcccccggcggccccuacaagaucggcaccagcggcagcugccccaacgugaccaacggcaacggcuucuucgccaccauggccugggccgugcccaagaacgacaagaacaagaccgccaccaacccccugaccaucgaggugcccuacaucugcaccgagggcgaggaccagaucaccguguggggcuuccacagcgacaacgagacccagauggccaagcuguacggcgacagcaagccccagaaguucaccagcagcgccaacggcgugaccacccacuacgugagccagaucggcggcuuccccaaccagaccgaggacggcggccugccccagagcggcagaaucgugguggacuacauggugcagaagagcggcaagaccggcaccaucaccuaccagagaggcauccugcugccccagaagguguggugcgccagcggcagaagcaaggugaucaagggcagccugccccugaucggcgaggccgacugccugcacgagaaguacggcggccugaacaagagcaagcccuacuacaccggcgagcacgccaaggccaucggcaacugccccaucugggugaagaagccccugaagcuggccaacggcaccaaguacagaccccccgccaagcugcugaaggagagaggcuucuucggcgccaucgccggcuuccuggagggcggcugggagggcaugaucgccggcuggcacggcuacaccagccacggcgcccacggcguggccguggccgccgaccugaagagcacccaggaggccaucaacaagaucaccaagaaccugaacagccugagcgagcuggaggugaagaaccugcagagacugagcggcgccauggacgagcugcacaacgagauccuggagcuggacgagaagguggacgaccugagagccgacaccaucagcagccagaucgagcuggccgugcugcugagcaacgagggcaucaucaacagcgaggacgagcaccugcuggcccuggagagaaagcugaagaagaugcugggccccagcgccguggagaucggcaacggcugcuucgagaccaagcacaagugcaaccagaccugccuggacagaaucgccgccggcaccuucgacgccggcgaguucagccugcccaccuucgacagccugaacaucaccgccgccagccugaacgacgacggccuggacaaccacaccauccugcuguacuacagcaccgccgccagcagccuggccgugacccugaugaucgccaucuucgugguguacauggugagcagagacaacgugagcugcagcaucugccuguga

SEQ ID NO: 186711 - RNA, 1758 nt, Artificial Sequence
  derived and/or modified CDS sequence (opt4) from hemagglutinin__InfluenzaB__AEQ39348
augaaggccaucaucgugcugcugaugguggugaccagcaacgccgacagaaucugcaccggcaucaccagcagcaacagcccccacguggugaagaccgccacccagggcgaggugaacgugaccggcgugaucccccugaccaccacccccaccaagagccacuucgccaaccugaagggcaccgagaccagaggcaagcugugccccaagugccugaacugcaccgaccuggacguggcccugggcagacccaagugcaccggcaagauccccagcgccagagugagcauccugcacgaggugagacccgugaccagcggcugcuuccccaucaugcacgacagaaccaagaucagacagcugcccaaccugcugagaggcuacgagcacaucagacugagcacccacaacgugaucaacgccgagaacgcccccggcggccccuacaagaucggcaccagcggcagcugccccaacgugaccaacggcaacggcuucuucgccaccauggccugggccgugcccaagaacgacaagaacaagaccgccaccaacccccugaccaucgaggugcccuacaucugcaccgagggcgaggaccagaucaccguguggggcuuccacagcgacaacgagacccagauggccaagcuguacggcgacagcaagccccagaaguucaccagcagcgccaacggcgugaccacccacuacgugagccagaucggcggcuuccccaaccagaccgaggacggcggccugccccagagcggcagaaucgugguggacuacauggugcagaagagcggcaagaccggcaccaucaccuaccagagaggcauccugcugccccagaagguguggugcgccagcggcagaagcaaggugaucaagggcagccugccccugaucggcgaggccgacugccugcacgagaaguacggcggccugaacaagagcaagcccuacuacaccggcgagcacgccaaggccaucggcaacugccccaucugggugaagaccccccugaagcuggccaacggcaccaaguacagaccccccgccaagcugcugaaggagagaggcuucuucggcgccaucgccggcuuccuggagggcggcugggagggcaugaucgccggcuggcacggcuacaccagccacggcgcccacggcguggccguggccgccgaccugaagagcacccaggaggccaucaacaagaucaccaagaaccugaacagccugagcgagcuggaggugaagaaccugcagagacugagcggcgccauggacgagcugcacaacgagauccuggagcuggacgagaagguggacgaccugagagccgacaccaucagcagccagaucgagcuggccgugcugcugagcaacgagggcaucaucaacagcgaggacgagcaccugcuggcccuggagagaaagcugaagaagaugcugggccccagcgccguggagaucggcaacggcugcuucgagaccaagcacaagugcaaccagaccugccuggacagaaucgccgccggcaccuucgacgccggcgaguucagccugcccaccuucgacagccugaacaucaccgccgccagccugaacgacgacggccuggacaaccacaucauccugcuguacuacagcaccgccgccagcagccuggccgugacccugaugaucgccaucuucgugguguacauggugagcagagacaacgugagcugcagcaucugccuguga

SEQ ID NO: 186712 - RNA, 1758 nt, Artificial Sequence; identical to SEQ ID NO: 186708
  derived and/or modified CDS sequence (opt4) from hemagglutinin__InfluenzaB__AEQ39359

SEQ ID NO: 186713 - RNA, 1758 nt, Artificial Sequence
  derived and/or modified CDS sequence (opt4) from hemagglutinin__InfluenzaB__AEQ39370
augaaggccaucaucgugcugcugaugguggugaccagcaacgccgacagaaucugcaccggcaucaccagcagcaacagcccccacguggugaagaccgccacccagggcgaggugaacgugaccggcgugaucccccugaccaccacccccaccaagagccacuucgccaaccugaagggcaccgagaccagaggcaagcugugccccaagugccugaacugcaccgaccuggacguggcccugggcagacccaagugcaccggcaacauccccagcgccagagugagcauccugcacgaggugagacccgugaccagcggcugcuuccccaucaugcacgacagaaccaagaucagacagcugcccaaccugcugagaggcuacgagcacaucagacugagcacccacaacguggugaacgccgagaacgcccccggcggccccuacaagaucggcaccagcggcagcugccccaacgugaccaacggcaacggcuucuucgccaccauggccugggccgugcccaagaacgacaacaacaagaccgccaccaacagccugaccaucgaggugcccuacaucugcaccgagggcgaggaccagaucaccguguggggcuuccacagcgacaacgagacccagauggccaagcuguacggcgacagcaagccccagaaguucaccagcagcgccaacggcgugaccacccacuacgugagccagaucggcggcuuccccaaccagaccgaggacggcggccugccccagagcggcagaaucgugguggacuacauggugcagaagagcggcaagaccggcaccaucaccuaccagagaggcauccugcugccccagaagguguggugcgccagcggcagaagcaaggugaucaagggcagccugccccugaucggcgaggccgacugccugcacgagaaguacggcggccugaacaagagcaagcccuacuacaccggcgagcacgccaaggccaucggcaacugccccaucugggugaagaccccccugaagcuggccaacggcaccaaguacagaccccccgccaagcugcugaaggagagaggcuucuucggcgccaucgccggcuuccuggagggcggcugggagggcaugaucgccggcuggcacggcuacaccagccacggcgcccacggcguggccguggccgccgaccugaagagcacccaggaggccaucaacaagaucaccaagaaccugaacagccugagcgagcuggaggugaagaaccugcagagacugagcggcgccauggacgagcugcacaacgagauccuggagcuggacgagaagguggacgaccugagagccgacaccaucagcagccagaucgagcuggccgugcugcugagcaacgagggcaucaucaacagcgaggacgagcaccugcuggcccuggagagaaagcugaagaagaugcugggccccagcgccguggagaucggcaacggcugcuucgagaccaagcacaagugcaaccagaccugccuggacagaaucgccgccggcaccuucgacgccggcgaguucagccugcccaccuucgacagccugaacaucaccgccgccagccugaacgacgacggccuggacaaccacaccauccugcuguacuacagcaccgccgccagcagccuggccgugacccugaugaucgccaucuucgugguguacauggugagcagagacaacgugagcugcagcaucugccuguga

SEQ ID NO: 186714 - RNA, 1755 nt, Artificial Sequence; identical to SEQ ID NO: 186486
  derived and/or modified CDS sequence (opt4) from hemagglutinin__InfluenzaB__AEQ39392

SEQ ID NO: 186715 - RNA, 1755 nt, Artificial Sequence; identical to SEQ ID NO: 186486
  derived and/or modified CDS sequence (opt4) from hemagglutinin__InfluenzaB__AEQ39429

SEQ ID NO: 186716 - RNA, 1755 nt, Artificial Sequence; identical to SEQ ID NO: 186486
  derived and/or modified CDS sequence (opt4) from hemagglutinin__InfluenzaB__AEQ39440

SEQ ID NO: 186717 - RNA, 1755 nt, Artificial Sequence; identical to SEQ ID NO: 186486
  derived and/or modified CDS sequence (opt4) from hemagglutinin__InfluenzaB__AEQ39451

SEQ ID NO: 186718 - RNA, 1758 nt, Artificial Sequence; identical to SEQ ID NO: 186698
  derived and/or modified CDS sequence (opt4) from hemagglutinin__InfluenzaB__AEQ39462

SEQ ID NO: 186719 - RNA, 1758 nt, Artificial Sequence; identical to SEQ ID NO: 186705
  derived and/or modified CDS sequence (opt4) from hemagglutinin__InfluenzaB__AEQ39484

SEQ ID NO: 186720 - RNA, 1755 nt, Artificial Sequence; identical to SEQ ID NO: 186465
  derived and/or modified CDS sequence (opt4) from hemagglutinin__InfluenzaB__AEQ39506

SEQ ID NO: 186721 - RNA, 1758 nt, Artificial Sequence
  derived and/or modified CDS sequence (opt4) from hemagglutinin__InfluenzaB__AEQ39517
augaaggccaucaucgugcugcugaugguggugaccagcaacgccgacagaaucugcaccggcaucaccagcagcaacagcccccacguggugaagaccgccacccagggcgaggugaacgugaccggcgugaucccccugaccaccacccccaccaagagccacuucgccaaccugaagggcaccaagaccagaggcaagcugugccccaagugccugaacugcaccgaccuggacguggcccugggcagacccaagugcaccggcaacauccccagcgccgaggugagcauccugcacgaggugagacccgugaccagcggcugcuuccccaucaugcacgacagaaccaagaucagacagcugcccaaccugcugagaggcuacgagcacaucagacugagcacccacaacgugaucaacgccgagaaggcccccggcggccccuacaagaucggcaccagcggcagcugccccaacgugaccaacggcaacggcuucuucgccaccauggccugggccgugcccaagaacgacaacaacaagaccgccaccaacagccugaccaucgaggugcccuacaucugcaccgagggcgaggaccagaucaccaucuggggcuuccacagcgacaacgagacccagauggccaagcuguacggcgacagcaagccccagaaguucaccagcagcgccaacggcgugaccacccacuacgugagccagaucggcggcuuccccaaccagaccgaggacggcggccugccccagagcggcagaaucgugguggacuacauggugcagaagagcggcaagaccggcaccaucaccuaccagagaggcauccugcugccccagaagguguggugcgccagcggcagaagcaaggugaucaagggcagccugccccugaucggcgaggccgacugccugcacgagaaguacggcggccugaacaagagcaagcccuacuacaccggcgagcacgccaaggccaucggcaacugccccaucugggugaagaccccccugaagcuggccaacggcaccaaguacagaccccccgccaagcugcugaaggagagaggcuucuucggcgccaucgccggcuuccuggagggcggcugggagggcaugaucgccggcuggcacggcuacaccagccacggcgcccacggcguggccguggccgccgaccugaagagcacccaggaggccaucaacaagaucaccaagaaccugaacagccugagcgagcuggaggugaagaaccugcagagacugagcggcgccauggacgagcugcacaacgagauccuggagcuggacgagaagguggacgaccugagagccgacaccaucagcagccagaucgagcuggccgugcugcugagcaacgagggcaucaucaacagcgaggacgagcaccugcuggcccuggagagaaagcugaagaagaugcugggccccagcgccguggagaucggcaacggcugcuucgagaccaagcacaagugcaaccagaccugccuggacagaaucgccgccggcaccuucgacgccggcgaguucagccugcccaccuucgacagccugaacaucaccgccgccagccugaacgacaacggccuggacaaccacaccauccugcuguacuacagcaccgccgccagcagccuggccgugacccugaugaucgccaucuucgugguguacauggugagcagagacaacgugagcugcagcaucugccuguga

SEQ ID NO: 186722 - RNA, 1758 nt, Artificial Sequence
  derived and/or modified CDS sequence (opt4) from hemagglutinin__InfluenzaB__AER27038
augaaggccaucaucgugcugcugaugguggugaccagcaacgccgacagaaucugcaccggcaucaccagcagcaacagcccccacguggugaagaccgccacccagggcgaggugaacgugaccggcgugaucccccugaccaccacccccaccaagagccacuucgccaaccugaagggcaccgagaccagaggcaagcugugccccaagugccccaacugcaccgaccuggacguggcccugggcagacccaagugcaccggcaagauccccagcgccagagugagcauccugcacgaggugagacccgugaccagcggcugcuuccccaucaugcacgacagaaccaagaucagacagcugcccaaccugcugagaggcuacgagcacaucagacugagcacccacaacgugaucaacgccgagaacgcccccggcggccccuacaagaucggcaccagcggcagcugccccaacgugaccaacggcaacggcuucuucgccaccauggccugggccgugcccaagaacgacaagaacaagaccgccaccaacccccugaccaucgaggugcccuacaucugcaccaagggcgaggaccagaucaccguguggggcuuccacagcgacaacgagacccagauggccaagcuguacggcgacagcaagccccagaaguucaccagcagcgccaacggcgugaccacccacuacgugagccagaucggcggcuuccccaaccagaccgaggacggcggccugccccagagcggcagaaucgugguggacuacauggugcagaagagcggcaagaccggcaccaucaccuaccagagaggcauccugcugccccagaagguguggugcgccagcggcagaagcaaggugaucaagggcagccugccccugaucggcgaggccgacugccugcacgagaaguacggcggccugaacaagagcaagcccuacuacaccggcgagcacgccaaggccaucggcaacugccccaucugggugaagaccccccugaagcuggccaacggcaccaaguacagaccccccgccaagcugcugaaggagagaggcuucuucggcgccaucgccggcuuccuggagggcggcugggagggcaugaucgccggcuggcacggcuacaccagccacggcgcccacggcaucgccguggccgccgaccugaagagcacccaggaggccaucaacaagaucaccaagaaccugaacagccugagcgagcuggaggugaagaaccugcagagacugagcggcgccauggacgagcugcacaacgagauccuggagcuggacgagaagguggacgaccugagagccgacaccaucagcagccagaucgagcuggccgugcugcugagcaacgagggcaucaucaacagcgaggacgagcaccugcuggcccuggagagaaagcugaagaagaugcugggccccagcgccguggagaucggcaacggcugcuucgagaccaagcacaagugcaaccagaccugccuggacagaaucgccgccggcaccuucgacgccggcgaguucagccugcccaccuucgacagccugaacaucaccgccgccagccugaacgacgacggccuggacaaccacaccauccugcuguacuacagcaccgccgccagcagccuggccgugacccugaugaucgccaucuucgugguguacauggugagcagagacaacgugagcugcagcaucugccuguga

SEQ ID NO: 186723 - RNA, 1758 nt, Artificial Sequence; identical to SEQ ID NO: 186668
  derived and/or modified CDS sequence (opt4) from hemagglutinin__InfluenzaB__AER27060

SEQ ID NO: 186724 - RNA, 1758 nt, Artificial Sequence
  derived and/or modified CDS sequence (opt4) from hemagglutinin__InfluenzaB__AET10061
augaaggccaucaucgugcugcugaugguggugaccagcaacgccgacagaaucugcaccggcaucaccagcagcaacagcccccacguggugaagaccgccacccagggcgaggugaacgugaccggcgugaucccccugaccaccacccccaccaagagccacuucgccaaccugaagggcaccgagaccagaggcaagcugugccccaagugccugaacugcaccgaccuggacguggcccugggcagacccaagugcaccggcaacauccccagcgccagagugagcauccugcacgaggugagacccgugaccagcggcugcuuccccaucaugcacgacagaaccaagaucagacagcugcccaaccugcugagaggcuacgagcacaucagacugagcacccacaacgugaucaacgccaagaacgcccccggcggccccuacaagaucggcaccagcggcagcugccccaacgugaccaacggcaacggcuucuucgccaccauggccugggccgugcccaagaacgacaagaacagaaccgccaccaacagccugaccaucgaggugcccuacaucugcaaggagggcgaggaccagaucaccguguggggcuuccacagcgacaacgagacccagauggccaagcuguacggcgacagcaagccccagaaguucaccagcagcgccaacggcgugaccacccacuacgugagccagaucggcggcuuccccaaccagaccgaggacggcggccugccccagagcggcagaaucgugguggacuacauggugcagaagagcggcaagaccggcaccaucaccuaccagagaggcauccugcugccccagaagguguggugcgccagcggcagaagcaaggugaucaagggcagccugccccugaucggcgaggccgacugccugcacgagaaguacggcggccugaacaagagcaagcccuacuacaccggcgagcacgccaaggccaucggcaacugccccaucugggugaagaccccccugaagcuggccaacggcaccaaguacagaccccccgccaagcugcugaaggagagaggcuucuucggcgccaucgccggcuuccuggagggcggcugggagggcaugaucgccggcuggcacggcuacaccagccacggcgcccacggcguggccguggccgccgaccugaagagcacccaggaggccaucaacaagaucaccaagaaccugaacagccugagcgagcuggaggugaagaaccugcagagacugagcggcgccauggacgagcugcacaacgagauccuggagcuggacgagaagguggacgaccugagagccgacaccaucagcagccagaucgagcuggccgugcugcugagcaacgagggcaucaucaacagcgaggacgagcaccugcuggcccuggagagaaagcugaagaagaugcugggccccagcgccguggagaucggcaacggcugcuucgagaccaagcacaagugcaaccagaccugccuggacagaaucgccgccggcaccuucgacgccggcgaguucagccugcccaccuucgacagccugaacaucaccgccgccagccugaacgacgacggccuggacaaccacaccauccugcuguacuacagcaccgccgccagcagccuggccgugacccugaugaucgccaucuucgugguguacauggugagcagagacaacgugagcugcagcaucugccuguga

SEQ ID NO: 186725 - RNA, 1755 nt, Artificial Sequence
  derived and/or modified CDS sequence (opt4) from hemagglutinin__InfluenzaB__AET10062
augaaggccaucaucgugcugcugaugguggugaccagcaacgccgacagaaucugcaccggcaucaccagcagcaacagcccccacguggugaagaccgccacccagggcgaggugaacgugaccggcgugaucccccugaccaucacccccaccaagagcuacuucgccaaccugaagggcaccagaaccagaggcaagcugugccccgacugccugaacugcaccgaccuggacguggcccugggcagacccaugugcgugggcaccacccccagcgccaaggccagcauccugcacgaggugagacccgugaccagcggcugcuuccccaucaugcacgacagaaccaagaucagacagcugcccaaccugcugagaggcuacgagaacaucagacugagcacccagaacgugaucgacgccgagaaggcccccggcggccccuacagacugggcaccagcggcagcugccccaacgccaccagcaagaucggcuucuucgccaccauggccugggccgugcccaaggacaacuacaagaacgccaccaacccccugaccguggaggugcccuacaucugcaaggagggcgaggaccagaucaccguguggggcuuccacagcgacaacaagacccagaugaagaaccuguacggcgacagcaacccccagaaguucaccagcagcgccaacggcgugaccacccacuacgugagccagaucggcgacuuccccgaccagaccgaggacggcggccugccccagagcggcagaaucgugguggacuacaugaugcagaagcccggcaagaccggcaccaucguguaccagagaggcgugcugcugccccagaagguguggugcgccagcggcagaagcaaggugaucaagggcagccugccccugaucggcgaggccgacugccugcacgagaaguacggcggccugaacaagagcaagcccuacuacaccggcgagcacgccaaggccaucggcaacugccccaucugggugaagaccccccugaagcuggccaacggcaccaaguacagaccccccgccaagcugcugaaggagagaggcuucuucggcgccaucgccggcuuccuggagggcggcugggagggcaugaucgccggcuggcacggcuacaccagccacggcgcccacggcguggccguggccgccgaccugaagagcacccaggaggccaucaacaagaucaccaagaaccugaacagccugagcgagcuggaggugaagaaccugcagagacugagcggcgccauggacgagcugcacaacgagauccuggagcuggacgagaagguggacgaccugagagccgacaccaucagcagccagaucgagcuggccgugcugcugagcaacgagggcaucaucaacagcgaggacgagcaccugcuggcccuggagagaaagcugaagaagaugcugggccccagcgccguggacaucggcaacggcugcuucgagaccaagcacaagugcaaccagaccugccuggacagaaucgccgccggcaccuucaacgccggcgaguucagccugcccaccuucgacagccugaacaucaccgccgccagccugaacgacgacggccuggacaaccacaccauccugcuguacuacagcaccgccgccagcagccuggccgugacccugaugcuggccaucuucaucguguacauggugagcagagacaacgugagcugcagcaucugccuguga

SEQ ID NO: 186726 - RNA, 1755 nt, Artificial Sequence
  derived and/or modified CDS sequence (opt4) from hemagglutinin__InfluenzaB__AET10064
augaaggccaucaucgugcugcugaugguggugaccagcaacgccgacagaaucugcaccggcaucaccagcagcaacagcccccacguggugaagaccgccacccagggcgaggugaacgugaccggcgugaucccccugaccaccacccccaccaagagcuacuucgccaaccugaagggcaccagaaccagaggcaagcugugccccgacugccugaacugcaccgaccuggacguggcccugggcagacccaugugcgugggcaccacccccagcgccaaggccagcauccugcacgaggugagacccgugaccagcggcugcuuccccaucaugcacgacagaaccaagaucagacagcugcccaaccugcugagaggcuacgagaacaucagacugagcacccagaacgugaucgacgccgagaaggcccccggcggccccuacagacugggcaccagcggcagcugccccaacgccaccagcaagaucggcuucuucgccaccauggccugggccgugcccaaggacaacuacaagaacgccaccaacccccugaccguggaggugcccuacaucugcaccgagggcgaggaccagaucaccaucuggggcuuccacagcgacaacaagacccagaugaagaaccuguacggcgacagcaacccccagaaguucaccagcagcgccaacggcgugaccacccacuacgugagccagaucggcgacuuccccgaccagaccgaggacggcggccugccccagagcggcagaaucgugguggacuacaugaugcagaagcccggcaagaccggcaccaucguguaccagagaggcgugcugcugccccagaagguguggugcgccagcggcagaagcaaggugaucaagggcagccugccccugaucggcgaggccgacugccugcacgagaaguacggcggccugaacaagagcaagcccuacuacaccggcgagcacgccaaggccaucggcaacugccccaucugggugaagaccccccugaagcuggccaacggcaccaaguacagaccccccgccaagcugcugaaggagagaggcuucuucggcgccaucgccggcuuccuggagggcggcugggagggcaugaucgccggcuggcacggcuacaccagccacggcgcccacggcguggccguggccgccgaccugaagagcacccaggaggccaucaacaagaucaccaagaaccugaacagccugagcgagcuggaggugaagaaccugcagagacugagcggcgccauggacgagcugcacaacgagauccuggagcuggacgagaagguggacgaccugagagccgacaccaucagcagccagaucgagcuggccgugcugcugagcaacgagggcaucaucaacagcgaggacgagcaccugcuggcccuggagagaaagcugaagaagaugcugggccccagcgccguggacaucggcaacggcugcuucgagaccaagcacaagugcaaccagaccugccuggacagaaucgccgccggcaccuucaacgccggcgaguucagccugcccaccuucgacagccugaacaucaccgccgccagccugaacgacgacggccuggacaaccacaccauccugcuguacuacagcaccgccgccagcagccuggccgugacccugaugcuggccaucuucaucguguacauggugagcagagacaacgugagcugcagcaucugccuguga

SEQ ID NO: 186727 - RNA, 1755 nt, Artificial Sequence
  derived and/or modified CDS sequence (opt4) from hemagglutinin__InfluenzaB__AET10065
augaaggccaucaucgugcugcugaugguggugaccagcaacgccgacagaaucugcaccggcaucaccagcagcaacagcccccacguggugaagaccgccacccagggcgaggugaacgugaccggcgugaucccccugaccaccacccccaccaagagcuacuucgccaaccugaagggcaccagaaccagaggcaagcugugccccgacugccugaacugcaccgaccuggacguggcccugggcagacccaugugcgugggcaccacccccagcgccaaggccagcauccugcacgaggugagacccgugaccagcggcugcuuccccaucaugcacgacagaaccaagaucagacagcugcccaaccugcugagaggcuacgagaacaucagacugagcacccagaacgugaucgacgccgagaaggcccccggcggccccuacagacugggcaccagcggcagcugccccaacgccaccagcaagaucggcuucuucgccaccauggccugggccgugcccaaggacaacuacaagaacgccaccaacccccugaccguggaggugcccuacaucugcaaggagggcgaggaccagaucaccguguggggcuuccacagcgacaacaagacccagaugaagaaccuguacggcgacagcaacccccagaaguucaccagcagcgccaacggcgugaccacccacuacgugagccagaucggcgacuuccccgaccagaccgaggacggcggccugccccagagcggcagaaucgugguggacuacaugaugcagaagcccggcaagaccggcaccaucguguaccagagaggcgugcugcugccccagaagguguggugcgccagcggcagaagcaaggugaucaagggcagccugccccugaucggcgaggccgacugccugcacgagaaguacggcggccugaacaagagcaagcccuacuacaccggcgagcacgccaaggccaucggcaacugccccaucugggugaagaccccccugaagcuggccaacggcaccaaguacagaccccccgccaagcugcugaaggagagaggcuucuucggcgccaucgccggcuuccuggagggcggcugggagggcaugaucgccggcuggcacggcuacaccagccacggcgcccacggcguggccguggccgccgaccugaagagcacccaggaggccaucaacaagaucaccaagaaccugaacagccugagcgagcuggaggugaagaaccugcagagacugagcggcgccauggacgagcugcacaacgagauccuggagcuggacgagaagguggacgaccugagagccgacaccaucagcagccagaucgagcuggccgugcugcugagcaacgagggcaucaucaacagcgaggacgagcaccugcuggcccuggagagaaagcugaagaagaugcugggccccagcgccguggacaucggcaacggcugcuucgagaccaagcacaagugcaaccagaccugccuggacagaaucgccgccggcaccuucaacgccggcgaguucagccugcccaccuucgacagccugaacaucaccgccgccagccugaacgacgacggccuggacaaccacaccauccugcuguacuacagcaccgccgccagcagccuggccgugacccugaugcuggccaucuucaucguguacauggugagcagagacaacgugagcugcagcaucugccuguga

SEQ ID NO: 186728 - RNA, 1755 nt, Artificial Sequence; identical to SEQ ID NO: 186727
  derived and/or modified CDS sequence (opt4) from hemagglutinin__InfluenzaB__AET10066

SEQ ID NO: 186729 - RNA, 1755 nt, Artificial Sequence
  derived and/or modified CDS sequence (opt4) from hemagglutinin__InfluenzaB__AET10067
augaaggccaucaucgugcugcugaugguggugaccagcaacgccgacagaaucugcaccggcaucaccagcagcaacagcccccacguggugaagaccgccacccagggcgaggugaacgugaccggcgugaucccccugaccgccacccccaccaagagcuacuucgccaaccugaagggcaccagaaccagaggcaagcugugccccgacugccugaacugcaccgaccuggacguggcccugggcagacccaugugcgugggcaccacccccagcgccaaggccagcauccugcacgaggugagacccgugaccagcggcugcuuccccaucaugcacgacagaaccaagaucagacagcugcccaaccugcugagaggcuacgagaacaucagacugagcacccagaacgugaucgacgccgagaaggcccccggcggccccuacagacugggcaccagcggcagcugccccaacgccaccagcaagaucggcuucuucgccaccauggccugggccgugcccaaggacaacuacaagaacgccaccaacccccugaccguggaggugcccuacaucugcaaggagggcgaggaccagaucaccguguggggcuuccacagcgacaacaagacccagaugaagaaccuguacggcgacagcaacccccagaaguucaccagcagcgccaacggcgugaccacccacuacgugagccagaucggcgacuuccccgaccagaccgaggacggcggccugccccagagcggcagaaucgugguggacuacaugaugcagaagcccggcaagaccggcaccaucguguaccagagaggcgugcugcugccccagaagguguggugcgccagcggcagaagcaaggugaucaagggcagccugccccugaucggcgaggccgacugccugcacgagaaguacggcggccugaacaagagcaagcccuacuacaccggcgagcacgccaaggccaucggcaacugccccaucugggugaagaccccccugaagcuggccaacggcaccaaguacagaccccccgccaagcugcugaaggagagaggcuucuucggcgccaucgccggcuuccuggagggcggcugggagggcaugaucgccggcuggcacggcuacaccagccacggcgcccacggcguggccguggccgccgaccugaagagcacccaggaggccaucaacaagaucaccaagaaccugaacagccugagcgagcuggaggugaagaaccugcagagacugagcggcgccauggacgagcugcacaacgagauccuggagcuggacgagaagguggacgaccugagagccgacaccaucagcagccagaucgagcuggccgugcugcugagcaacgagggcaucaucaacagcgaggacgagcaccugcuggcccuggagagaaagcugaagaagaugcugggccccagcgccguggacaucggcaacggcugcuucgagaccaagcacaagugcaaccagaccugccuggacagaaucgccgccggcaccuucaacgccggcgaguucagccugcccaccuucgacagccugaacaucaccgccgccagccugaacgacgacggccuggacaaccacaccauccugcuguacuacagcaccgccgccagcagccuggccgugacccugaugcuggccaucuucaucguguacauggugagcagagacaacgugagcugcagcaucugccuguga

SEQ ID NO: 186730 - RNA, 1755 nt, Artificial Sequence
  derived and/or modified CDS sequence (opt4) from hemagglutinin__InfluenzaB__AET10068
augaaggccaucaucgugcugcugaugguggugaccagcaacgccgacagaaucugcaccggcaucaccagcagcaacagcccccacguggugaagaccgccacccagggcgaggugaacgugaccggcgugaucccccugaccaccgcccccaccaagagcuacuucgccaaccugaagggcaccagaaccagaggcaagcugugccccgacugccugaacugcaccgaccuggacguggcccugggcagacccaugugcgccggcaccacccccagcgccaaggccagcauccugcacgaggugagacccgugaccagcggcugcuuccccaucaugcacgacagaaccaagaucagacagcugcccaaccugcugagaggcuacgagaacaucagacugagcacccagaacgugaucgacgccgagaaggcccccggcggccccuacagacugggcaccagcggcagcugccccaacgccaccagcaagaucggcuucuucgccaccauggccugggccgugcccaaggacaacuacaagaacgccaccaacccccugaccguggaggugcccuacaucugcaaggagggcgaggaccagaucaccguguggggcuuccacagcgacaacaagacccagaugaagaaccuguacggcgacagcaacccccagaaguucaccagcagcgccaacggcgugaccacccacuacgugagccagaucggcgacuuccccgaccagaccgaggacggcggccugccccagagcggcagaaucgugguggacuacaugaugcagaagcccggcaagaccggcaccaucguguaccagagaggcgugcugcugccccagaagguguggugcgccagcggcagaagcaaggugaucaagggcagccugccccugaucggcgaggccgacugccugcacgagaaguacggcggccugaacaagagcaagcccuacuacaccggcgagcacgccaaggccaucggcaacugccccaucugggugaagaccccccugaagcuggccaacggcaccaaguacagaccccccgccaagcugcugaaggagagaggcuucuucggcgccaucgccggcuuccuggagggcggcugggagggcaugaucgccggcuggcacggcuacaccagccacggcgcccacggcguggccguggccgccgaccugaagagcacccaggaggccaucaacaagaucaccaagaaccugaacagccugagcgagcuggaggugaagaaccugcagagacugagcggcgccauggacgagcugcacaacgagauccuggagcuggacgagaagguggacgaccugagagccgacaccaucagcagccagaucgagcuggccgugcugcugagcaacgagggcaucaucaacagcgaggacgagcaccugcuggcccuggagagaaagcugaagaagaugcugggccccagcgccguggacaucggcaacggcugcuucgagaccaagcacaagugcaaccagaccugccuggacagaaucgccgccggcaccuucaacgccggcgaguucagccugcccaccuucgacagccugaacaucaccgccgccagccugaacgacgacggccuggacaaccacaccauccugcuguacuacagcaccgccgccagcagccuggccgugacccugaugcuggccaucuucaucguguacauggugagcagagacaacgugagcugcagcaucugccuguga

SEQ ID NO: 186731 - RNA, 1755 nt, Artificial Sequence; identical to SEQ ID NO: 186727
  derived and/or modified CDS sequence (opt4) from hemagglutinin__InfluenzaB__AET10069

SEQ ID NO: 186732 - RNA, 1758 nt, Artificial Sequence
  derived and/or modified CDS sequence (opt4) from hemagglutinin__InfluenzaB__AET10070
augaaggccaucaucgugcugcugaugguggugaccagcaacgccgacagaaucugcaccggcaucaccagcagcaacagcccccacguggugaagaccgccacccagggcgaggugaaggugaccggcgugaucccccugaccaccacccccaccaagagccacuucgccaaccugaagggcaccgagaccagaggcaagcugugccccaagugccccaacugcaccgaccuggacguggcccugggcagacccaagugcaccggcaagauccccagcgccagagugagcauccugcacgaggugagacccgugaccagcggcugcuuccccaucaugcacgacagaaccaagaucagacagcugcccaaccugcugagaggcuacgagcacaucagacugagcacccacaacgugaucaacgccgagaacgcccccggcggccccuacaagaucggcaccagcggcagcugccccaacgugaccaacggcaacggcuucuucgccaccauggccugggccgugcccaagaacgacaagaacaagaccgccaccaacccccugaccaucgaggugcccuacaucugcaccgagggcgaggaccagaucaccguguggggcuuccacagcgacaacgagacccagauggccaagcuguacggcgacagcaagccccagaaguucaccagcagcgccaacggcgugaccacccacuacgugagccagaucggcggcuuccccaaccagaccgaggacggcggccugccccagagcggcagaaucgugguggacuacauggugcagaagagcggcaagaccggcaccaucaccuaccagagaggcauccugcugccccagaagguguggugcgccagcggcagaagcaaggugaucaagggcagccugccccugaucggcgaggccgacugccugcacgagaaguacggcggccugaacaagagcaagcccuacuacaccggcgagcacgccaaggccaucggcaacugccccaucugggugaagaccccccugaagcuggccaacggcaccaaguacagaccccccgccaagcugcugaaggagagaggcuucuucggcgccaucgccggcuuccuggagggcggcugggagggcaugaucgccggcuggcacggcuacaccagccacggcgcccacggcguggccguggccgccgaccugaagagcacccaggaggccaucaacaagaucaccaagaaccugaacagccugagcgagcuggaggugaagaaccugcagagacugagcggcgccauggacgagcugcacaacgagauccuggagcuggacgagaagguggacgaccugagagccgacaccaucagcagccagaucgagcuggccgugcugcugagcaacgagggcaucaucaacagcgaggacgagcaccugcuggcccuggagagaaagcugaagaagaugcugggccccagcgccguggagaucggcaacggcugcuucgagaccaagcacaagugcaaccagaccugccuggacagaaucgccgccggcaccuucgacgccggcgaguucagccugcccaccuucgacagccugaacaucaccgccgccagccugaacgacgacggccuggacaaccacaccauccugcuguacuacagcaccgccgccagcagccuggccgugacccugaugaucgccaucuucgugguguacauggugagcagagacaacgugagcugcagcaucugccuguga

SEQ ID NO: 186733 - RNA, 1758 nt, Artificial Sequence; identical to SEQ ID NO: 186668
  derived and/or modified CDS sequence (opt4) from hemagglutinin__InfluenzaB__AET10071

SEQ ID NO: 186734 - RNA, 1758 nt, Artificial Sequence; identical to SEQ ID NO: 186668
  derived and/or modified CDS sequence (opt4) from hemagglutinin__InfluenzaB__AET10072

SEQ ID NO: 186735 - RNA, 1755 nt, Artificial Sequence
  derived and/or modified CDS sequence (opt4) from hemagglutinin__InfluenzaB__AET10073
augaaggccaucaucgugcugcugaugguggugaccagcaacgccgacagaaucugcaccggcaucaccagcagcaacagcccccacguggugaagaccgccacccagggcgaggugaacgugaccggcgugaucccccugaccaccacccccaccaagagcuacuucgccaaccugaagggcaccagaaccagaggcaagcugugccccgacugccugaacugcaccgaccuggacguggcccugggcagacccaugugcgugggcaccacccccagcgccaaggccagcauccugcacgaggugagacccgugaccagcggcugcuuccccaucaugcacgacagaaccaagaucagacagcugcccaaccugcugagaggcugcgagaacaucagacugagcacccagaacgugaucgacgccgagaaggcccccggcggccccuacagacugggcaccagcggcagcugccccaacgccaccagcaagaucggcuucuucgccaccauggccugggccgugcccaaggacaacuacaagaacgccaccaacccccugaccguggaggugcccuacaucugcaaggagggcgaggaccagaucaccguguggggcuuccacagcgacaacaagacccagaugaagaaccuguacggcgacagcaacccccagaaguucaccagcagcgccaacggcgugaccacccacuacgugagccagaucggcgacuuccccgaccagaccgaggacggcggccugccccagagcggcagaaucgugguggacuacaugaugcagaagcccggcaagaccggcaccaucguguaccagagaggcgugcugcugccccagaagguguggugcgccagcggcagaagcaaggugaucaagggcagccugccccugaucggcgaggccgacugccugcacgagaaguacggcggccugaacaagagcaagcccuacuacaccggcgagcacgccaaggccaucggcaacugccccaucugggugaagaccccccugaagcuggccaacggcaccaaguacagaccccccgccaagcugcugaaggagagaggcuucuucggcgccaucgccggcuuccuggagggcggcugggagggcaugaucgccggcuggcacggcuacaccagccacggcgcccacggcguggccguggccgccgaccugaagagcacccaggaggccaucaacaagaucaccaagaaccugaacagccugagcgagcuggaggugaagaaccugcagagacugagcggcgccauggacgagcugcacaacgagauccuggagcuggacgagaagguggacgaccugagagccgacaccaucagcagccagaucgagcuggccgugcugcugagcaacgagggcaucaucaacagcgaggacgagcaccugcuggcccuggagagaaagcugaagaagaugcugggccccagcgccguggacaucggcaacggcugcuucgagaccaagcacaagugcaaccagaccugccuggacagaaucgccgccggcaccuucaacgccggcgaguucagccugcccaccuucgacagccugaacaucaccgccgccagccugaacgacgacggccuggacaaccacaccauccugcuguacuacagcaccgccgccagcagccuggccgugacccugaugcuggccaucuucaucguguacauggugagcagagacaacgugagcugcagcaucugccuguga

SEQ ID NO: 186736 - RNA, 1758 nt, Artificial Sequence
  derived and/or modified CDS sequence (opt4) from hemagglutinin__InfluenzaB__AET10074
augaaggccaucaucgugcugcugaugguggugaccagcaacgccgacagaaucugcaccggcaucaccagcagcaacagcccccacguggugaagaccgccacccagggcgaggugaacgugaccggcgugaucccccugaccaccacccccaccagaagccacuucgccaaccugaagggcaccgagaccagaggcaagcugugccccaagugccccaacugcaccgaccuggacguggcccugggcagacccaagugcaccggcaagauccccagcgccagagugagcauccugcacgaggugagacccgugaccagcggcugcuuccccaucaugcacgacagaaccaagaucagacagcugcccaaccugcugagaggcuacgagcacaucagacugagcacccacaacgugaucaacgccgagaacgcccccggcggccccuacaagaucggcaccagcggcagcugccccaacgugaccaacggcaacggcuucuucgccaccauggccugggccgugcccaagaacgacaagaacaagaccgccaccaacccccugaccaucgaggugcccuacaucugcaccgagggcgaggaccagaucaccguguggggcuuccacagcgacaacgagacccagauggccaagcuguacggcgacagcaagccccagaaguucaccagcagcgccaacggcgugaccacccacuacgugagccagaucggcggcuuccccaaccagaccgaggacggcggccugccccagagcggcagaaucgugguggacuacauggugcagaagagcggcagaaccggcaccaucaccuaccagagaggcauccugcugccccagaagguguggugcgccagcggcagaagcaaggugaucaagggcagccugccccugaucggcgaggccgacugccugcacgagaaguacggcggccugaacaagagcaagcccuacuacaccggcgagcacgccaaggccaucggcaacugccccaucugggugaagaccccccugaagcuggccaacggcaccaaguacagaccccccgccaagcugcugaaggagagaggcuucuucggcgccaucgccggcuuccuggagggcggcugggagggcaugaucgccggcuggcacggcuacaccagccacggcgcccacggcguggccguggccgccgaccugaagagcacccaggaggccaucaacaagaucaccaagaaccugaacagccugagcgagcuggaggugaagaaccugcagagacugagcggcgccauggacgagcugcacaacgagauccuggagcuggacgagaagguggacgaccugagagccgacaccaucagcagccagaucgagcuggccgugcugcugagcaacgagggcaucaucaacagcgaggacgagcaccugcuggcccuggagagaaagcugaagaagaugcugggccccagcgccguggagaucggcaacggcugcuucgagaccaagcacaagugcaaccagaccugccuggacagaaucgccgccggcaccuucgacgccggcgaguucagccugcccaccuucgacagccugaacaucaccgccgccagccuggacgacgacggccuggacaaccacaccauccugcuguacuacagcaccgccgccagcagccuggccgugacccugaugaucgccaucuucgugguguacauggugagcagagacaacgugagcugcagcaucugccuguga

SEQ ID NO: 186737 - RNA, 1758 nt, Artificial Sequence; identical to SEQ ID NO: 186668
  derived and/or modified CDS sequence (opt4) from hemagglutinin__InfluenzaB__AET10076

SEQ ID NO: 186738 - RNA, 1758 nt, Artificial Sequence; identical to SEQ ID NO: 186668
  derived and/or modified CDS sequence (opt4) from hemagglutinin__InfluenzaB__AET10077

SEQ ID NO: 186739 - RNA, 1758 nt, Artificial Sequence
  derived and/or modified CDS sequence (opt4) from hemagglutinin__InfluenzaB__AET10078
augaaggccaucaucgugcugcugaugguggugaccagcaacgccgacagaaucugcaccggcaucaccagcagcaacagcccccacguggugaagaccgccacccagggcgaggugaacgugaccggcgugaucccccugaccaccacccccaccaagagccacuucgccaaccugaagggcaccgagaccagaggcaagcugugccccaagugccugaacugcaccgaccuggacguggcccugggcagacccaagugcaccggcaagauccccagcgccagagugagcgugcugcacgaggugagacccgugaccagcggcugcuuccccaucaugcacgacagaaccaagaucagacagcugcccaaccugcugagaggcuacgagcacaucagacugagcacccacaacgugaucaacgccgagaacgcccccggcggccccuacaagaucggcaccagcggcagcugccccaacgugaccaacggcaacggcuucuucgccaccauggccugggccgugcccaagaacgacaagaacaagaccgccaccaacccccugaccaucgaggugcccuacaucugcaccgagggcgaggaccagaucaccguguggggcuuccacagcgacaacgagacccagauggccaagcuguacggcgacagcaagccccagaaguucaccagcagcgccaacggcgugaccacccacuacgugagccagaucggcggcuuccccaaccagaccgaggacggcggccugccccagagcggcagaaucgugguggacuacauggugcagaagagcggcaagaccggcaccaucaccuaccagagaggcauccugcugccccagaagguguggugcgccagcggcagaagcaaggugaucaagggcagccugccccugaucggcgaggccgacugccugcacgagaaguacggcggccugaacaagagcaagcccuacuacaccggcgagcacgccaaggccaucggcaacugccccaucugggugaagaccccccugaagcuggccaacggcaccaaguacagaccccccgccaagcugcugaaggagagaggcuucuucggcgccaucgccggcuuccuggagggcggcugggagggcaugaucgccggcuggcacggcuacaccagccacggcgcccacggcguggccguggccgccgaccugaagagcacccaggaggccaucaacaagaucaccaagaaccugaacagccugagcgagcuggaggugaagaaccugcagagacugagcggcgccauggacgagcugcacaacgagauccuggagcuggacgagaagguggacgaccugagagccgacaccaucagcagccagaucgagcuggccgugcugcugagcaacgagggcaucaucaacagcgaggacgagcaccugcuggcccuggagagaaagcugaagaagaugcugggccccagcgccguggagaucggcaacggcugcuucgagaccaagcacaagugcaaccagaccugccuggacagaaucgccgccggcaccuucaacgccggcgaguucagccugcccaccuucgacagccugaacaucaccgccgccagccugaacgaggacggccuggacaaccacgccauccugcuguacuacagcaccgccgccagcagccuggccgugacccugaugaucgccaucuucgugguguacauggugagcagagacaacgugagcugcagcaucugccuguga

SEQ ID NO: 186740 - RNA, 1758 nt, Artificial Sequence
  derived and/or modified CDS sequence (opt4) from hemagglutinin__InfluenzaB__AET10079
augaaggccaucaucgugcugcugaugguggugaccagcaacgccgacggcaucugcaccggcaucaccagcagcaacagcccccacguggugaagaccgccacccagggcgaggugaacgugaccggcgugaucccccugaccaccacccccaccaagagccacuucgccaaccugaagggcaccgagaccagaggcaagcugugccccaagugccccaacugcaccgaccuggacguggcccugggcagacccaagugcaccggcaagauccccagcgccagagugagcauccugcacgaggugagacccgugaccagcggcugcuuccccaucaugcacgacagaaccaagaucagacagcugcccaaccugcugagaggcuacgagcacaucagacugagcacccacaacgugaucaacgccgagaacgcccccggcggccccuacaagaucggcaccagcggcagcugccccaacgugaccaacggcaacggcuucuucaccaccauggccugggccgugcccaagaacgacaagaacaagaccgccaccaacccccugaccaucgaggugcccuacaucugcaccgagggcgaggaccagaucaccguguggggcuuccacagcgacaacgagacccagauggccaagcuguacggcgacagcaagccccagaaguucaccagcagcgccaacggcgugaccacccacuacgugagccagaucggcggcuuccccaaccagaccgaggacggcggccugccccagagcggcagaaucgugguggacuacauggugcagaagagcggcaagaccggcaccaucaccuaccagagaggcauccugcugccccagaagguguggugcgccagcggcagaagcaaggugaucaagggcagccugccccugaucggcgaggccgacugccugcacgagaaguacggcggccugaacaagagcaagcccuacuacaccggcgagcacgccaaggccaucggcaacugccccaucugggugaagaccccccugaagcuggccaacggcaccaaguacagaccccccgccaagcugcugaaggagagaggcuucuucggcgccaucgccggcuuccuggagggcggcugggagggcaugaucgccggcuggcacggcuacaccagccacggcgcccacggcguggccguggccgccgaccugaagagcacccaggaggccaucaacaagaucaccaagaaccugaacagccugagcgagcuggagguggagaaccugcagagacugagcggcgccauggacgagcugcacaacgagauccuggagcuggacgagaagguggacgaccugagagccgacaccaucagcagccagaucgagcuggccgugcugcugagcaacgagggcaucaucaacagcgaggacgagcaccugcuggcccuggagagaaagcugaagaagaugcugggccccagcgccguggagaucggcaacggcugcuucgagaccaagcacaagugcaaccagaccugccuggacagaaucgccgccggcaccuucgacgccggcgaguucagccugcccaccuucgacagccugaacaucaccgccgccagccugaacgacgacggccuggacaaccacaccauccugcuguacuacagcaccgccgccagcagccuggccgugacccugaugaucgccaucuucgugguguacauggugagcagagacaacgugagcugcagcaucugccuguga

SEQ ID NO: 186741 - RNA, 1758 nt, Artificial Sequence; identical to SEQ ID NO: 186668
  derived and/or modified CDS sequence (opt4) from hemagglutinin__InfluenzaB__AET10080

SEQ ID NO: 186742 - RNA, 1758 nt, Artificial Sequence; identical to SEQ ID NO: 186668
  derived and/or modified CDS sequence (opt4) from hemagglutinin__InfluenzaB__AET10081

SEQ ID NO: 186743 - RNA, 1758 nt, Artificial Sequence
  derived and/or modified CDS sequence (opt4) from hemagglutinin__InfluenzaB__AET10082
augaaggccaucaucgugcugcugaugguggugaccagcaacgccgacagaaucugcaccggcaucaccagcagcaacagcccccacaucgugaagaccgccacccagggcgaggugaacgugaccggcgugaucccccugaccaccacccccaccaagagccacuucgccaaccugaagggcaccgagaccagaggcaagcugugccccaagugccugaacugcaccgaccuggacguggcccugggcagacccaagugcaccggcaagauccccagcgccagagugagcauccugcacgaggugagacccgugaccagcggcugcuuccccaucaugcacgacagaaccaagaucagacagcugcccaaccugcugagaggcuacgagcacaucagacugagcacccacaacgugaucaacgccgagaacgcccccggcggccccuacaagaucggcaccagcggcagcugccccaacaucaccaacggcaacggcuucuucgccaccauggccugggccgugcccaagaacgacaagaacaagaccgccaccaacccccugaccaucgaggugcccuacaucugcaccgagggcgaggaccagaucaccguguggggcuuccacagcgacaacgagacccagauggccaagcuguacggcgacagcaagccccagaaguucaccagcagcgccaacggcgugaccacccacuacgugagccagaucggcggcuuccccaaccagaccgaggacggcggccugccccagagcggcagaaucgugguggacuacauggugcagaagagcggcaagaccggcaccaucaccuaccagagaggcauccugcugccccagaagguguggugcgccagcggcagaagcaaggugaucaagggcagccugccccugaucggcgaggccgacugccugcacgagaaguacggcggccugaacaagagcaagcccuacuacaccggcgagcacgccaaggccaucggcaacugccccaucugggugaagaccccccugaagcuggccaacggcaccaaguacagaccccccgccaagcugcugaaggagagaggcuucuucggcgccaucgccggcuuccuggagggcggcugggagggcaugaucgccggcuggcacggcuacaccagccacggcgcccacggcguggccguggccgccgaccugaagagcacccaggaggccaucaacaagaucaccaagaaccugaacagccugagcgagcuggaggugaagaaccugcagagacugagcggcgccauggacgagcugcacaacgagauccuggagcuggacgagaagguggacgaccugagagccgacaccaucagcagccagaucgagcuggccgugcugcugagcaacgagggcaucaucaacagcgaggacgagcaccugcuggcccuggagagaaagcugaagaagaugcugggccccagcgccguggagaucggcaacggcugcuucgagaccaagcacaagugcaaccagaccugccuggacagaaucgccgccggcaccuucgacgccggcgaguucagccugcccaccuucgacagccugaacaucaccgccgccagccugaacgacgacggccuggacaaccacaccauccugcuguacuacagcaccgccgccagcagccuggccgugacccugaugaucgccaucuucgugguguacauggugagcagagacaacgugagcugcagcaucugccuguga

SEQ ID NO: 186744 - RNA, 1758 nt, Artificial Sequence
  derived and/or modified CDS sequence (opt4) from hemagglutinin__InfluenzaB__AET10083
augaaggccaucaucgugcugcugaugguggugaccagcaacgccgacagaaucugcaccggcaucaccagcagcaacagcccccacguggugaagaccgccacccagggcgaggugaacgugaccggcgugaucccccugaccaccacccccaccaagagccacuucgccaaccugaagggcaccgagaccagaggcaagcugugccccaagugccugaacugcaccgaccuggacguggcccugggcagacccaagugcaccggcaaggugcccagcgccagagugagcauccugcacgaggugagacccgugaccagcggcugcuuccccaucaugcacgacagaaccaagaucagacagcugcccaaccugcugagaggcuacgagcacaucagacugagcacccacaacgugaucaacgccgagaacgcccccggcggccccuacaagaucggcaccagcggcagcugccccaacaucaccaacggcaacggcuucuucgccaccauggccugggccgugcccaagaacgacaagaacaagaccgccaccaacccccugaccaucgaggugcccuacaucugcaccgagggcgaggaccagaucaccguguggggcuuccacagcgacaacgagacccagauggccaagcuguacggcgacagcaagccccagaaguucaccagcagcgccaacggcgugaccacccacuacgugagccagaucggcggcuuccccaaccagaccgaggacggcggccugccccagagcggcagaaucgugguggacuacauggugcagaagagcggcaagaccggcaccaucaccuaccagagaggcauccugcugccccagaagguguggugcgccagcggcagaagcaaggugaucaagggcagccugccccugaucggcgaggccgacugccugcacgagaaguacggcggccugaacaagagcaagcccuacuacaccggcgagcacgccaaggccaucggcaacugccccaucugggugaagaccccccugaagcuggccaacggcaccaaguacagaccccccgccaagcugcugaaggagagaggcuucuucggcgccaucgccggcuuccuggagggcggcugggagggcaugaucgccggcuggcacggcuacaccagccacggcgcccacggcguggccguggccgccgaccugaagagcacccaggaggccaucaacaagaucaccaagaaccugaacagccugagcgagcuggaggugaagaaccugcagagacugagcggcgccauggacgagcugcacaacgagauccuggagcuggacgagaagguggacgaccugagagccgacaccaucagcagccagaucgagcuggccgugcugcugagcaacgagggcaucaucaacagcgaggacgagcaccugcuggcccuggagagaaagcugaagaagaugcugggccccagcgccguggagaucggcaacggcugcuucgagaccaagcacaagugcaaccagaccugccuggacagaaucgccgccggcaccuucgacgccggcgaguucagccugcccaccuucgacagccugaacaucaccgccgccagccugaacgacgacggccuggacaaccacaccauccugcuguacuacagcaccgccgccagcagccuggccgugacccugaugaucgccaucuucgugguguacauggugagcagagacaacgugagcugcagcaucugccuguga

SEQ ID NO: 186745 - RNA, 1758 nt, Artificial Sequence; identical to SEQ ID NO: 186705
  derived and/or modified CDS sequence (opt4) from hemagglutinin__InfluenzaB__AET10084

SEQ ID NO: 186746 - RNA, 1758 nt, Artificial Sequence; identical to SEQ ID NO: 186668
  derived and/or modified CDS sequence (opt4) from hemagglutinin__InfluenzaB__AET10085

SEQ ID NO: 186747 - RNA, 1758 nt, Artificial Sequence; identical to SEQ ID NO: 186708
  derived and/or modified CDS sequence (opt4) from hemagglutinin__InfluenzaB__AET43124

SEQ ID NO: 186748 - RNA, 1758 nt, Artificial Sequence; identical to SEQ ID NO: 186708
  derived and/or modified CDS sequence (opt4) from hemagglutinin__InfluenzaB__AET43135

SEQ ID NO: 186749 - RNA, 1758 nt, Artificial Sequence; identical to SEQ ID NO: 186708
  derived and/or modified CDS sequence (opt4) from hemagglutinin__InfluenzaB__AET43146

SEQ ID NO: 186750 - RNA, 1758 nt, Artificial Sequence; identical to SEQ ID NO: 186708
  derived and/or modified CDS sequence (opt4) from hemagglutinin__InfluenzaB__AET43157

SEQ ID NO: 186751 - RNA, 1758 nt, Artificial Sequence
  derived and/or modified CDS sequence (opt4) from hemagglutinin__InfluenzaB__AET43168
augaaggccaucaucgugcugcugaugguggugaccagcaacgccgacagaaucugcaccggcaucaccagcagcaacagcccccacguggugaagaccgccacccagggcgaggugaacgugaccggcgugaucccccugaccaccacccccaccaagagccacuucgccaaccugaagggcaccgagaccagaggcaagcugugccccaagugccugaacugcaccgaccuggacgugacccugggcagacccaagugcaccggcaagauccccagcgccagagugagcauccugcacgaggugagacccgugaccagcggcugcuuccccaucaugcacgacagaaccaagaucagacagcugcccaaccugcugagaggcuacgagcacaucagacugagcacccacaacgugaucaacgccgagaacgcccccggcggccccuacaagaucggcaccagcggcagcugccccaacgugaccaacggcaacggcuucuucgccaccauggccugggccgugcccaagaacgacaagaacaagaccgccaccaacccccugaccaucgaggugcccuacaucugcaccgagggcgaggaccagaucaccguguggggcuuccacagcgacaacgagacccagauggccaagcuguacggcgacagcaagccccagaaguucaccagcagcgccaacggcgugaccacccacuacgugagccagaucggcggcuuccccaaccagaccgaggacggcggccugccccagagcggcagaaucgugguggacuacauggugcagaagagcggcaagaccggcaccaucaccuaccagagaggcauccugcugccccagaagguguggugcgccagcggcagaagcaaggugaucaagggcagccugccccugaucggcgaggccgacugccugcacgagaaguacggcggccugaacaagagcaagcccuacuacaccggcgagcacgccaaggccaucggcaacugccccaucugggugaagaccccccugaagcuggccaacggcaccaaguacagaccccccgccaagcugcugaaggagagaggcuucuucggcgccaucgccggcuuccuggagggcggcugggagggcaugaucgccggcuggcacggcuacaccagccacggcgcccacggcguggccguggccgccgaccugaagagcacccaggaggccaucaacaagaucaccaagaaccugaacagccugagcgagcuggaggugaagaaccugcagagacugagcggcgccauggacgagcugcacaacgagauccuggagcuggacgagaagguggacgaccugagagccgacaccaucagcagccagaucgagcuggccgugcugcugagcaacgagggcaucaucaacagcgaggacgagcaccugcuggcccuggagagaaagcugaagaagaugcugggccccagcgccguggagaucggcaacggcugcuucgagaccaagcacaagugcaaccagaccugccuggacagaaucgccgccggcaccuucgacgccggcgaguucagccugcccaccuucgacagccugaacaucaccgccgccagccugaacgacgacggccuggacaaccacaccauccugcuguacuacagcaccgccgccagcagccuggccgugacccugaugaucgccaucuucgugguguacauggugagcagagacaacgugagcugcagcaucugccuguga

SEQ ID NO: 186752 - RNA, 1758 nt, Artificial Sequence; identical to SEQ ID NO: 186708
  derived and/or modified CDS sequence (opt4) from hemagglutinin__InfluenzaB__AET43179

SEQ ID NO: 186753 - RNA, 1758 nt, Artificial Sequence; identical to SEQ ID NO: 186708
  derived and/or modified CDS sequence (opt4) from hemagglutinin__InfluenzaB__AET43190

SEQ ID NO: 186754 - RNA, 1758 nt, Artificial Sequence
  derived and/or modified CDS sequence (opt4) from hemagglutinin__InfluenzaB__AET43201
augaaggccaucaucgugcugcugaugguggugaccagcaacgccgacagaaucugcaccggcaucaccagcagcaacagcccccacguggugaagaccgccacccagggcgaggugaacgugaccggcgugaucccccugaccaccacccccaccaagagccacuucgccaaccugaagggcaccgagaccagaggcaagcugugccccaagugccugaacugcaccgaccuggacguggcccugggcagacccaagugcaccggcaagauccccagcgccagagugagcauccugcacgaggugagacccgugaccagcggcugcuuccccaucaugcacgacagaaccaagaucagacagcugcccaaccugcugagaggcuacgagcacaucagacugagcacccacaacgugaucaacgccggcaacgcccccggcggccccuacaagaucggcaccagcggcagcugccccaacgugaccaacggcaacggcuucuucgccaccauggccugggccgugcccaagaacgacaagaacaagaccgccaccaacccccugaccaucgaggugcccuacaucugcaccgagggcgaggaccagaucaccguguggggcuuccacagcgacaacgagacccagauggccaagcuguacggcgacagcaagccccagaaguucaccagcagcgccaacggcgugaccacccacuacgugagccagaucggcggcuuccccaaccagaccgaggacggcggccugccccagagcggcagaaucgugguggacuacauggugcagaagagcggcaagaccggcaccaucaccuaccagagaggcauccugcugccccagaagguguggugcgccagcggcagaagcaaggugaucaagggcagccugccccugaucggcgaggccgacugccugcacgagaaguacggcggccugaacaagagcaagcccuacuacaccggcgagcacgccaaggccaucggcaacugccccaucugggugaagaccccccugaagcuggccaacggcaccaaguacagaccccccgccaagcugcugaaggagagaggcuucuucggcgccaucgccggcuuccuggagggcggcugggagggcaugaucgccggcuggcacggcuacaccagccacggcgcccacggcguggccguggccgccgaccugaagagcacccaggaggccaucaacaagaucaccaagaaccugaacagccugagcgagcuggaggugaagaaccugcagagacugagcggcgccauggacgagcugcacaacgagauccuggagcuggacgagaagguggacgaccugagagccgacaccaucagcagccagaucgagcuggccgugcugcugagcaacgagggcaucaucaacagcgaggacgagcaccugcuggcccuggagagaaagcugaagaagaugcugggccccagcgccguggagaucggcaacggcugcuucgagaccaagcacaagugcaaccagaccugccuggacagaaucgccgccggcaccuucgacgccggcgaguucagccugcccaccuucgacagccugaacaucaccgccgccagccugaacgacgacggccuggacaaccacaccauccugcuguacuacagcaccgccgccagcagccuggccgugacccugaugaucgccaucuucgugguguacauggugagcagagacaacgugagcugcagcaucugccuguga

SEQ ID NO: 186755 - RNA, 1758 nt, Artificial Sequence; identical to SEQ ID NO: 186708
  derived and/or modified CDS sequence (opt4) from hemagglutinin__InfluenzaB__AET43212

SEQ ID NO: 186756 - RNA, 1758 nt, Artificial Sequence; identical to SEQ ID NO: 186708
  derived and/or modified CDS sequence (opt4) from hemagglutinin__InfluenzaB__AET43223

SEQ ID NO: 186757 - RNA, 1758 nt, Artificial Sequence; identical to SEQ ID NO: 186754
  derived and/or modified CDS sequence (opt4) from hemagglutinin__InfluenzaB__AET50943

SEQ ID NO: 186758 - RNA, 1758 nt, Artificial Sequence; identical to SEQ ID NO: 186708
  derived and/or modified CDS sequence (opt4) from hemagglutinin__InfluenzaB__AET50954

SEQ ID NO: 186759 - RNA, 1758 nt, Artificial Sequence; identical to SEQ ID NO: 186708
  derived and/or modified CDS sequence (opt4) from hemagglutinin__InfluenzaB__AET50965

SEQ ID NO: 186760 - RNA, 1758 nt, Artificial Sequence; identical to SEQ ID NO: 186708
  derived and/or modified CDS sequence (opt4) from hemagglutinin__InfluenzaB__AET50976

SEQ ID NO: 186761 - RNA, 1758 nt, Artificial Sequence; identical to SEQ ID NO: 186708
  derived and/or modified CDS sequence (opt4) from hemagglutinin__InfluenzaB__AET74255

SEQ ID NO: 186762 - RNA, 1758 nt, Artificial Sequence; identical to SEQ ID NO: 186754
  derived and/or modified CDS sequence (opt4) from hemagglutinin__InfluenzaB__AET74277

SEQ ID NO: 186763 - RNA, 1758 nt, Artificial Sequence; identical to SEQ ID NO: 186708
  derived and/or modified CDS sequence (opt4) from hemagglutinin__InfluenzaB__AET74288

SEQ ID NO: 186764 - RNA, 1758 nt, Artificial Sequence
  derived and/or modified CDS sequence (opt4) from hemagglutinin__InfluenzaB__AET74299
augaaggccaucaucgugcugcugaugguggugaccagcaacgccgacagaaucugcaccggcaucaccagcagcaacagcccccacguggugaagaccgccacccagggcgaggugaacgugaccggcgugaucccccugaccaccacccccaccaagagccacuucgccaaccugaagggcaccgagaccagaggcaagcugugccccaagugccugaacugcaccgaccuggacgugacccugggcagacccaagugcaccggcaagauccccagcgccagagugagcauccugcacgaggugagacccgugaccagcggcugcuuccccaucaugcacgacagaaccaagaucagacagcugcccaaccugcugagaggcuacgagcacaucagacugagcacccacaacgugaucaacgccgagaacgcccccggcggccccuacaagaucggcaccagcggcagcugccccaacgugaccaacggcaacggcuucuucgccaccauggccugggccgugcccaagaacgacaagaacaagaccgccaccaacccccugaccaucgaggugcccuacaucugcaccgagggcgaggaccagaucaccguguggggcuuccacagcgacaacgagacccagauggccaagcuguacggcgacagcaagccccagaaguucaccagcagcgccaacggcgugaccacccacuacgugagccagaucggcggcuuccccaaccagaccgaggacggcggccugccccagagcggcagaaucgugguggacuacauggugcagaagagcggcaagaccggcaccaucaccuaccagagaggcauccugcugccccagaagguguggugcgccagcggcagaagcaaggugaucaagggcagccugccccugaucggcgaggccgacugccugcacgagaaguacggcggccugaacaagagcaagcccuacuacaccggcgagcacgccaaggccaucggcaacugccccaucugggugaagaccccccugaagcuggccaacggcaccaaguacagaccccccgccaagcugcugaaggagagaggcuucuucggcgccaucgccggcuuccuggagggcggcugggagggcaugaucgccggcuggcacggcuacaccagccacggcgcccacggcguggccguggccgccgaccugaagagcacccaggaggccaucaacaagaucaccaacaaccugaacagccugagcgagcuggaggugaagaaccugcagagacugagcggcgccauggacgagcugcacaacgagauccuggagcuggacgagaagguggacgaccugagagccgacaccaucagcagccagaucgagcuggccgugcugcugagcaacgagggcaucaucaacagcgaggacgagcaccugcuggcccuggagagaaagcugaagaagaugcugggccccagcgccguggagaucggcaacggcugcuucgagaccaagcacaagugcaaccagaccugccuggacagaaucgccgccggcaccuucgacgccggcgaguucagccugcccaccuucgacagccugaacaucaccgccgccagccugaacgacgacggccuggacaaccacaccauccugcuguacuacagcaccgccgccagcagccuggccgugacccugaugaucgccaucuucgugguguacauggugagcagagacaacgugagcugcagcaucugccuguga

SEQ ID NO: 186765 - RNA, 1758 nt, Artificial Sequence; identical to SEQ ID NO: 186708
  derived and/or modified CDS sequence (opt4) from hemagglutinin__InfluenzaB__AET74329

SEQ ID NO: 186766 - RNA, 1758 nt, Artificial Sequence; identical to SEQ ID NO: 186708
  derived and/or modified CDS sequence (opt4) from hemagglutinin__InfluenzaB__AET74340

SEQ ID NO: 186767 - RNA, 1758 nt, Artificial Sequence; identical to SEQ ID NO: 186708
  derived and/or modified CDS sequence (opt4) from hemagglutinin__InfluenzaB__AET74351

SEQ ID NO: 186768 - RNA, 1758 nt, Artificial Sequence; identical to SEQ ID NO: 186705
  derived and/or modified CDS sequence (opt4) from hemagglutinin__InfluenzaB__AEY69077

SEQ ID NO: 186769 - RNA, 1758 nt, Artificial Sequence; identical to SEQ ID NO: 186705
  derived and/or modified CDS sequence (opt4) from hemagglutinin__InfluenzaB__AFB77676

SEQ ID NO: 186770 - RNA, 1758 nt, Artificial Sequence
  derived and/or modified CDS sequence (opt4) from hemagglutinin__InfluenzaB__AFB77677
augaaggccaucaucgugcugcugaugguggugaccagcaacgccgacagaaucugcaccggcaucaccagcagcaacagcccccacguggugaagaccgccacccagggcgaggugaacgugaccggcgugaucccccugaccaccacccccaccaagagccacuucgccaaccugaagggcaccgagaccagaggcaagcugugccccaagugcuucaacugcaccgaccuggacguggcccugggcagacccaagugcaccggcaagauccccagcgccagagugagcauccugcacgaggugagacccgugaccagcggcugcuuccccaucaugcacgacagaaccaagaucagacagcugcccaaccugcugagaggcuacgagcacaucagacugagcacccacaacgugaucaacgccgagaacgcccccggcggccccuacaagaucggcaccagcggcagcugccccaacgugaccaacggcaacggcuucuucgccaccauggccugggccgugcccaagaacgacaagaacaagaccgccaccaacccccugaccaucgaggugcccuacaucugcaccgagggcgaggaccagaucaccguguggggcuuccacagcgacaacgagacccagauggccaagcuguacggcgacagcaagccccagaaguucaccagcagcgccaacggcgugaccacccacuacgugagccagaucggcggcuuccccaaccagaccgaggacggcggccugccccagagcggcagaaucgugguggacuacauggugcagaagagcggcaagaccggcaccaucaccuaccagagaggcauccugcugccccagaagguguggugcgccagcggcagaagcaaggugaucaagggcagccugccccugaucggcgaggccgacugccugcacgagaaguacggcggccugaacaagagcaagcccuacuacaccggcgagcacgccaaggccaucggcaacugccccaucugggugaagaccccccugaagcuggccaacggcaccaaguacagaccccccgccaagcugcugaaggagagaggcuucuucggcgccaucgccggcuuccuggagggcggcugggagggcaugaucgccggcuggcacggcuacaccagccacggcgcccacggcguggccguggccgccgaccugaagagcacccaggaggccaucaacaagaucaccaagaaccugaacagccugagcgagcuggaggugaagaaccugcagagacugagcggcgccauggacgagcugcacaacgagauccuggagcuggacgagaagguggacgaccugagagccgacaccaucagcagccagaucgagcuggccgugcugcugagcaacgagggcaucaucaacagcgaggacgagcaccugcuggcccuggagagaaagcugaagaagaugcugggccccagcgccguggagaucggcaacggcugcuucgagaccaagcacaagugcaaccagaccugccuggacagaaucgccgccggcaccuucgacgccggcgaguucagccugcccaccuucgacagccugaacaucaccgccgccagccugaacgacgacggccuggacaaccacaccauccugcuguacuacagcaccgccgccagcagccuggccgugacccugaugaucgccaucuucgugguguacauggugagcagagacaacgugagcugcagcaucugccuguga

SEQ ID NO: 186771 - RNA, 1758 nt, Artificial Sequence; identical to SEQ ID NO: 186705
  derived and/or modified CDS sequence (opt4) from hemagglutinin__InfluenzaB__AFB77678

SEQ ID NO: 186772 - RNA, 1758 nt, Artificial Sequence; identical to SEQ ID NO: 186705
  derived and/or modified CDS sequence (opt4) from hemagglutinin__InfluenzaB__AFB77679

SEQ ID NO: 186773 - RNA, 1758 nt, Artificial Sequence
  derived and/or modified CDS sequence (opt4) from hemagglutinin__InfluenzaB__AFB77680
augaaggccaucaucgugcugcugaugguggugaccagcaacgccgacagaaucugcaccggcaucaccagcagcaacagcccccacguggugaagaccgccacccagggcgaggugaacgugaccggcgugaucccccugaccaccacccccaccaagagccacuucgccaaccugaagggcaccgagaccagaggcaagcugugccccaagugccugaacugcaccgaccuggacguggcccugggcagacccaagugcaccggcaagauccccagcgccagagugagcauccugcacgaggugagacccaucaccagcggcugcuuccccaucaugcacgacagaaccaagaucagacagcugcccaaccugcugagaggcuacgagcacaucagacugagcacccacaacgugaucaacgccgagaacgcccccggcggccccuacaagaucggcaccagcggcagcugccccaacgugaccaacggcaacggcuucuucgccaccauggccugggccgugcccaagaacgacaagaacaagaccgccaccaacccccugaccaucgaggugcccuacaucugcaccgagggcgaggaccagaucaccguguggggcuuccacagcgacaacgagacccagauggccaagcuguacggcgacagcaagccccagaaguucaccagcagcgccaacggcgugaccacccacuacgugagccagaucggcggcuuccccaaccagaccgaggacggcggccugccccagagcggcagaaucgugguggacuacauggugcagaagagcggcaagaccggcaccaucaccuaccagagaggcauccugcugccccagaagguguggugcgccagcggcagaagcaaggugaucaagggcagccugccccugaucggcgaggccgacugccugcacgagaaguacggcggccugaacaagagcaagcccuacuacaccggcgagcacgccaaggccaucggcaacugccccaucugggugaagaccccccugaagcuggccaacggcaccaaguacagaccccccgccaagcugcugaaggagagaggcuucuucggcgccaucgccggcuuccuggagggcggcugggagggcaugaucgccggcuggcacggcuacaccagccacggcgcccacggcguggccguggccgccgaccugaagagcacccaggaggccaucaacaagaucaccaagaaccugaacagccugagcgagcuggaggugaagaaccugcagagacugagcggcgccauggacgagcugcacaacgagauccuggagcuggacgagaagguggacgaccugagagccgacaccaucagcagccagaucgagcuggccgugcugcugagcaacgagggcaucaucaacagcgaggacgagcaccugcuggcccuggagagaaagcugaagaagaugcugggccccagcgccguggagaucggcaacggcugcuucgagaccaagcacaagugcaaccagaccugccuggacagaaucgccgccggcaccuucgacgccggcgaguucagccugcccaccuucgacagccugaacaucaccgccgccagccugaacgacgacggccuggacaaccacaccauccugcuguacuacagcaccgccgccagcagccuggccgugacccugaugaucgccaucuucgugguguacauggugagcagagacaacgugagcugcagcaucugccuguga

SEQ ID NO: 186774 - RNA, 1758 nt, Artificial Sequence; identical to SEQ ID NO: 186705
  derived and/or modified CDS sequence (opt4) from hemagglutinin__InfluenzaB__AFB77681

SEQ ID NO: 186775 - RNA, 1758 nt, Artificial Sequence
  derived and/or modified CDS sequence (opt4) from hemagglutinin__InfluenzaB__AFB77682
augaaggccaucaucgugcugcugaugguggugaccagcaacgccgacagaaucugcaccggcaucaccagcagcaacagcccccacguggugaagaccgccacccagggcgaggugaacgugaccggcgugaucccccugaccaccacccccaccaagagccacuucgccaaccugaagggcaccgagaccagaggcaagcugugccccaagugccugaacugcaccgaccuggacguggcccugggcagacccaagugcaccggcaagauccccagcgccagagugagcauccugcacgaggugagacccgugaccagcggcugcuuccccaucaugcacgacagaaccaagaucagacagcugcccaaccugcugagaggcuacgagcacaucagacugagcacccacaacgugaucaacgccgagaacgcccccggcggccccuacaagaucggcaccagcggcagcugccccaacaucaccaacggcaacggcuucuucgccaccauggccugggccgugcccaagaacgacaagaacaagaccgccaccaacccccugaccaucgaggugcccuacaucugcaccgagggcgaggaccagaucaccguguggggcuuccacagcgacaacgagacccagauggccaagcuguacggcgacagcaagccccagaaguucaccagcagcgccaacggcgugaccacccacuacgugagccagaucggcggcuuccccaaccagaccgaggacggcggccugccccagagcggcagaaucgugguggacuacauggugcagaagagcggcaagaccggcaccaucaccuaccagagaggcauccugcugccccagaagguguggugcgccagcggcagaagcaaggugaucaagggcagccugccccugaucggcgaggccgacugccugcacgagaaguacggcggccugaacaagagcaagcccuacuacaccggcgagcacgccaaggccaucggcaacugccccaucugggugaagaccccccugaagcuggccaacggcaccaaguacagaccccccgccaagcugcugaaggagagaggcuucuucggcgccaucgccggcuuccuggagggcggcugggagggcaugaucgccggcuggcacggcuacaccagccacggcgcccacggcguggccguggccgccgaccugaagagcacccaggaggccaucaacaagaucacccagaaccugaacagccugagcgagcuggaggugaagaaccugcagagacugagcggcgccauggacgagcugcacaacgagauccuggagcuggacgagaagguggacgaccugagagccgacaccaucagcagccagaucgagcuggccgugcugcugagcaacgagggcaucaucaacagcgaggacgagcaccugcuggcccuggagagaaagcugaagaagaugcugggccccagcgccguggagaucggcaacggcugcuucgagaccaagcacaagugcaaccagaccugccuggacagaaucgccgccggcaccuucgacgccggcgaguucagccugcccaccuucgacagccugaacaucaccgccgccagccugaacgacgacggccuggacaaccacaccauccugcuguacuacagcaccgccgccagcagccuggccgugacccugaugaucgccaucuucgugguguacauggugagcagagacaacgugagcugcagcaucugccuguga

SEQ ID NO: 186776 - RNA, 1758 nt, Artificial Sequence; identical to SEQ ID NO: 186705
  derived and/or modified CDS sequence (opt4) from hemagglutinin__InfluenzaB__AFB77683

SEQ ID NO: 186777 - RNA, 1758 nt, Artificial Sequence; identical to SEQ ID NO: 186705
  derived and/or modified CDS sequence (opt4) from hemagglutinin__InfluenzaB__AFB77684

SEQ ID NO: 186778 - RNA, 1758 nt, Artificial Sequence
  derived and/or modified CDS sequence (opt4) from hemagglutinin__InfluenzaB__AFB77685
augaaggccaucaucgugcugcugaugguggugaccagcaacgccgacagaaucugcaccggcaucaccagcagcaacagcccccacguggugaagaccgccacccagggcgaggugaacgugaccggcgugaucccccugaccaccacccccaccaagagccacuucgccaaccugaagggcaccgagaccagaggcaagcugugccccaagugccugaacugcaccgaccuggacguggcccugggcagacccaagugcaccggcaagacccccagcgccagagugagcauccugcacgaggugagacccgugaccagcggcugcuuccccaucaugcacgacagaaccaagaucagacagcugcccaaccugcugagaggcuacgagcacaucagacugagcacccacaacgugaucaacgccgagaacgcccccggcggccccuacaagaucggcaccagcggcagcugccccaacaucaccaacggcaacggcuucuucgccaccauggccugggccgugcccaagaacgacaagaacaagaccgccaccaacccccugaccaucgaggugcccuacaucugcaccgagggcgaggaccagaucaccguguggggcuuccacagcgacaacgagacccagauggccaagcuguacggcgacagcaagccccagaaguucaccagcagcgccaacggcgugaccacccacuacaucagccagaucggcggcuuccccaaccagaccgaggacggcggccugccccagagcggcagaaucgugguggacuacauggugcagaagagcgagaagaccggcaccaucaccuaccagagaggcauccugcugccccagaagguguggugcgccagcggcagaagcaaggugaucaagggcagccugccccugaucggcgaggccgacugccugcacgagaaguacggcggccugaacaagagcaagcccuacuacaccggcgagcacgccaaggccaucggcaacugccccaucugggugaagaccccccugaagcuggccaacggcaccaaguacagaccccccgccaagcugcugaaggagagaggcuucuucggcgccaucgccggcuuccuggagggcggcugggagggcaugaucgccggcuggcacggcuacaccagccacggcgcccacggcguggccguggccgccgaccugaagagcacccaggaggccaucaacaagaucaccaagaaccugaacagccugagcgagcuggaggugaagaaccugcagagacugagcggcgccauggacgagcugcacaacgagauccuggagcuggacgagaagguggacgaccugagagccgacaccaucagcagccagaucgagcuggccgugcugcugagcaacgagggcaucaucaacagcgaggacgagcaccugcuggcccuggagagaaagcugaagaagaugcugggccccagcgccguggagaucggcaacggcugcuucgagaccaagcacaagugcaaccagaccugccuggacagaaucgccgccggcaccuucgacgccggcgaguucagccugcccaccuucgacagccugaacaucaccgccgccagccugaacgacgacggccuggacaaccacaccauccugcuguacuacagcaccgccgccagcagccuggccgugacccugaugaucgccaucuucgugguguacauggugagcagagacaacgugagcugcagcaucugccuguga

SEQ ID NO: 186779 - RNA, 1758 nt, Artificial Sequence
  derived and/or modified CDS sequence (opt4) from hemagglutinin__InfluenzaB__AFB77686
augaaggccaucaucgugcugcugaugguggugaccagcaacgccgacagaaucugcaccggcaucaccagcagcaacagcccccacguggugaagaccgccacccagggcgaggugaacgugaccggcgugaucccccugaccaccacccccaccaagagccacuucgccaaccugaagggcaccgagaccagaggcaagcugugccccaagugccugaacugcaccgaccuggacguggcccugggcagacccaagugcaccggcaagauccccagcgccagagugagcauccugcacgaggugagacccgugaccagcggcugcuuccccaucaugcacgacagaaccaagaucagacagcugcccaaccugcugagaggcuacgagcacaucagacugagcacccacaacgugaucaacgccgagaacgcccccggcggccccuacaagaucggcaccagcggcagcugccccaacaucaccaacggcaacggcuucuucgccaccauggccugggccgugcccaagaacgacaagaacaagaccgccaccaacccccugaccaucgaggugcccuacaucugcaccgagggcgaggaccagaucaccguguggggcuuccacagcgacaacgagacccagauggccaagcuguacggcgacagcaagccccagaaguucaccagcagcgccaacggcgugaccacccacuacgugagccagaucagcggcuuccccaaccagaccgaggacggcggccugccccagagcggcagaaucgugguggacuacauggugcagaagagcggcaagaccggcaccaucaccuaccagagaggcauccugcugccccagaagguguggugcgccagcggcagaagcaaggugaucaagggcagccugccccugaucggcgaggccgacugccugcacgagaaguacggcggccugaacaagagcaagcccuacuacaccggcgagcacgccaaggccaucggcaacugccccaucugggugaagaccccccugaagcuggccaacggcaccaaguacagaccccccgccaagcugcugaaggagagaggcuucuucggcgccaucgccggcuuccuggagggcggcugggagggcaugaucgccggcuggcacggcuacaccagccacggcgcccacggcguggccguggccgccgaccugaagagcacccaggaggccaucaacaagaucacccagaaccugaacagccugagcgagcuggaggugaagaaccugcagagacugagcggcgccauggacgagcugcacaacgagauccuggagcuggacgagaagguggacgaccugagagccgacaccaucagcagccagaucgagcuggccgugcugcugagcaacgagggcaucaucaacagcgaggacgagcaccugcuggcccuggagagaaagcugaagaagaugcugggccccagcgccguggagaucggcaacggcugcuucgagaccaagcacaagugcaaccagaccugccuggacagaaucgccgccggcaccuucgacgccggcgaguucagccugcccaccuucgacagccugaacaucaccgccgccagccugaacgacgacggccuggacaaccacaccauccugcuguacuacagcaccgccgccagcagccuggccgugacccugaugaucgccaucuucgugguguacauggugagcagagacaacgugagcugcagcaucugccuguga

SEQ ID NO: 186780 - RNA, 1758 nt, Artificial Sequence
  derived and/or modified CDS sequence (opt4) from hemagglutinin__InfluenzaB__AFB77687
augaaggccaucaucgugcugcugaugguggugaccagcaacgccgacagaaucugcaccggcaucaccagcagcaacagcccccacguggugaagaccgccacccagggcgaggugaacgugaccggcgugaucccccugaccaccacccccaccaagagccacuucgccaaccugaagggcaccgagaccagaggcaagcugugccccaagugccugaacugcaccgaccuggacguggcccugggcagacccaagugcaccggcaagauccccagcgccagagugagcauccugcacgaggugagacccgugaccagcggcugcuuccccaucaugcacgacagaaccaagaucagacagcugcccaaccugcugagaggcuacgagcacaucaagcugagcacccacaacgugaucaacgccgagaacgcccccggcggccccuacaagaucggcaccagcggcagcugccccaacgugaccaacggcaacggcuucuucgccaccauggccugggccgugcccaagaacgacaagaacaagaccgccaccaacccccugaccaucgaggugcccuacaucugcaccgagggcgaggaccagaucaccguguggggcuuccacagcgacaacgagacccagauggccaagcuguacggcgacagcaagccccagaaguucaccagcagcgccaacggcgugaccacccacuacgugagccagaucggcggcuuccccaaccagaccgaggacggcggccugccccagagcggcagaaucgugguggacuacauggugcagaagagcggcaagaccggcaccaucaccuaccagagaggcauccugcugccccagaagguguggugcgccagcggcagaagcaaggugaucaagggcagccugccccugaucggcgaggccgacugccugcacgagaaguacggcggccugaacaagagcaagcccuacuacaccggcgagcacgccaaggccaucggcaacugccccaucugggugaagaccccccugaagcuggccaacggcaccaaguacagaccccccgccaagcugcugaaggagagaggcuucuucggcgccaucgccggcuuccuggagggcggcugggagggcaugaucgccggcuggcacggcuacaccagccacggcgcccacggcguggccguggccgccgaccugaagagcacccaggaggccaucaacaagaucaccaagaaccugaacagccugagcgagcuggaggugaagaaccugcagagacugagcggcgccauggacgagcugcacaacgagauccuggagcuggacgagaagguggacgaccugagagccgacaccaucagcagccagaucgagcuggccgugcugcugagcaacgagggcaucaucaacagcgaggacgagcaccugcuggcccuggagagaaagcugaagaagaugcugggccccagcgccguggagaucggcaacggcugcuucgagaccaagcacaagugcaaccagaccugccuggacagaaucgccgccggcaccuucgacgccggcgaguucagccugcccaccuucgacagccugaacaucaccgccgccagccugaacgacgacggccuggacaaccacaccauccugcuguacuacagcaccgccgccagcagccuggccgugacccugaugaucgccaucuucgugguguacauggugagcagagacaacgugagcugcagcaucugccuguga

SEQ ID NO: 186781 - RNA, 1758 nt, Artificial Sequence
  derived and/or modified CDS sequence (opt4) from hemagglutinin__InfluenzaB__AFB77688
augaaggccaucaucgugcugcugaugguggugaccagcaacgccgacagaaucugcaccggcaucaccagcagcaacagcccccacguggugaagaccgccacccagggcgaggugaacgugaccggcgugaucccccugaccaccacccccaccaagagccacuucgccaaccugaagggcaccgagaccagaggcaagcugugccccaagugccugaacugcaccgaccuggacguggcccugggcagacccaagugcaccggcaagauccccagcgccagagugagcauccugcacgaggugagacccgugaccagcggcugcuuccccaucaugcacgacagaaccaagaucagacagcugcccaaccugcugagaggcuacgagcacaucagacugagcacccacaacgugaucaacgccgagaacgcccccggcggccccuacaagaucggcaccagcggcagcugccccaacgugaccaacggcaacggcuucuucgccaccauggccugggccgugcccaagaacgacaagaacaagaccgccaccaacccccugaccaucgaggugcccuacaucugcaccgagggcgaggaccagaucaccguguggggcuuccacagcgacaacgagacccagauggccaagcuguacggcgacagcaagccccagaaguucaccagcagcgccaacggcgugaccacccacuacgugagccagaucggcggcuuccccaaccagaccgaggacggcggccugccccagagcggcagaaucgugguggacuacauggugcagaagagcggcaagaccggcaccaucaccuaccagagaggcauccugcugccccagaagguguggugcgccagcggcagaagcaaggugaucaagggcagccugccccugaucggcgaggccgacugccugcacgagaaguacggcggccugaacaagagcaagcccuacuacaccggcgagcacgccaaggccaucggcaacugccccaucugggugaaggccccccugaagcuggccaacggcaccaaguacagaccccccgccaagcugcugaaggagagaggcuucuucggcgccaucgccggcuuccuggagggcggcugggagggcaugaucgccggcuggcacggcuacaccagccacggcgcccacggcguggccguggccgccgaccugaagagcacccaggaggccaucaacaagaucaccaagaaccugaacagccugagcgagcuggaggugaagaaccugcagagacugagcggcgccauggacgagcugcacaacgagauccuggagcuggacgagaagguggacgaccugagagccgacaccaucagcagccagaucgagcuggccgugcugcugagcaacgagggcaucaucaacagcgaggacgagcaccugcuggcccuggagagaaagcugaagaagaugcugggccccagcgccguggagaucggcaacggcugcuucgagaccaagcacaagugcaaccagaccugccuggacagaaucgccgccggcaccuucgacgccggcgaguucagccugcccaccuucgacagccugaacaucaccgccgccagccugaacgacgacggccuggacaaccacaccauccugcuguacuacagcaccgccgccagcagccuggccgugacccugaugaucgccaucuucgugguguacauggugagcagagacaacgugagcugcagcaucugccuguga

SEQ ID NO: 186782 - RNA, 1758 nt, Artificial Sequence; identical to SEQ ID NO: 186705
  derived and/or modified CDS sequence (opt4) from hemagglutinin__InfluenzaB__AFB77689

SEQ ID NO: 186783 - RNA, 1758 nt, Artificial Sequence; identical to SEQ ID NO: 186705
  derived and/or modified CDS sequence (opt4) from hemagglutinin__InfluenzaB__AFB77690

SEQ ID NO: 186784 - RNA, 1758 nt, Artificial Sequence; identical to SEQ ID NO: 186743
  derived and/or modified CDS sequence (opt4) from hemagglutinin__InfluenzaB__AFE00360

SEQ ID NO: 186785 - RNA, 1758 nt, Artificial Sequence; identical to SEQ ID NO: 186743
  derived and/or modified CDS sequence (opt4) from hemagglutinin__InfluenzaB__AFF18534

SEQ ID NO: 186786 - RNA, 1758 nt, Artificial Sequence; identical to SEQ ID NO: 186743
  derived and/or modified CDS sequence (opt4) from hemagglutinin__InfluenzaB__AFF18543

SEQ ID NO: 186787 - RNA, 1758 nt, Artificial Sequence; identical to SEQ ID NO: 186705
  derived and/or modified CDS sequence (opt4) from hemagglutinin__InfluenzaB__AFG48978

SEQ ID NO: 186788 - RNA, 1758 nt, Artificial Sequence; identical to SEQ ID NO: 186705
  derived and/or modified CDS sequence (opt4) from hemagglutinin__InfluenzaB__AFG48997

SEQ ID NO: 186789 - RNA, 1758 nt, Artificial Sequence
  derived and/or modified CDS sequence (opt4) from hemagglutinin__InfluenzaB__AFG48998
augaaggccaucaucgugcugcugaugguggugaccagcaacgccgacagaaucugcaccggcaucaccagcagcaacagcccccacguggugaagaccgccacccagggcgaggugaacgugaccggcgugaucccccugaccaccacccccaccaagagccacuucgccaaccugaagggcaccgagaccagaggcaagcugugccccaagugccccaacugcaccgaccuggacguggcccugggcagacccaagugcaccggcaagauccccagcgccagagugagcauccugcacgaggugagacccgugaccagcggcugcuuccccaucaugcacgacagaaccaagaucagacagcugcccaaccugcugagaggcuacgagcacaucagacugagcacccacaacgugaucaacgccgagaacgcccccggcggccccuacaagaucggcaccagcggcagcugccccaacgugaccaacggcaacggcuucuucgagaccauggccugggccgugcccaagaacgacaagaacaagaccgccaccaacccccugaccaucgaggugcccuacaucugcaccgagggcgaggaccagaucaccguguggggcuuccacagcgacaacgagacccagauggccaagcuguacggcgacagcaagccccagaaguucaccagcagcgccaacggcgugaccacccacuacgugagccagaucggcggcuuccccaaccagaccgaggacggcggccugccccagagcggcagaaucgugguggacuacauggugcagaagagcggcaagaccggcaccaucaccuaccagagaggcauccugcugccccagaagguguggugcgccagcggcagaagcaaggugaucaagggcagccugccccugaucggcgaggccgacugccugcacgagaaguacggcggccugaacaagagcaagcccuacuacaccggcgagcacgccaaggccaucggcaacugccccaucugggugaagaccccccugaagcuggccaacggcaccaaguacagaccccccgccaagcugcugaaggagagaggcuucuucggcgccaucgccggcuuccuggagggcggcugggagggcaugaucgccggcuggcacggcuacaccagccacggcgcccacggcguggccguggccgccgaccugaagagcacccaggaggccaucaacaagaucaccaagaaccugaacagccugagcgagcuggaggugaagaaccugcagagacugagcggcgccauggacgagcugcacaacgagauccuggagcuggacgagaagguggacgaccugagagccgacaccaucagcagccagaucgagcuggccgugcugcugagcaacgagggcaucaucaacagcgaggacgagcaccugcuggcccuggagagaaagcugaagaagaugcugggccccagcgccguggagaucggcaacggcugcuucgagaccaagcacaagugcaaccagaccugccuggacagaaucgccgccggcaccuucgacgccggcgaguucagccugcccaccuucgacagccugaacaucaccgccgccagccugaacgacgacggccuggacaaccacaccauccugcuguacuacagcaccgccgccagcagccuggccgugacccugaugaucgccaucuucgugguguacauggugagcagagacaacgugagcugcagcaucugccuguga

SEQ ID NO: 186790 - RNA, 1755 nt, Artificial Sequence
  derived and/or modified CDS sequence (opt4) from hemagglutinin__InfluenzaB__AFG49012
augaaggccaucaucgugcugcugaugguggugaccagcaacgccgacagaaucugcaccggcaucaccagcagcaacagcccccacguggugaagaccgccacccagggcgaggugaacgugaccggcgugaucccccugaccaccacccccaccaagagcuacuucgccaaccugaagggcaccaagaccagaggcaagcugugccccgacugccugaacugcaccgaccuggacguggcccugggcagacccaugugcgugggcaccacccccagcgccaaggccagcauccugcacgaggugagacccgugaccagcggcugcuuccccaucaugcacgacagaaccaagaucagacagcugcccaaccugcugagaggcuacgagaacaucagacugagcacccagaacgugaucgacgccgagaaggcccccggcggccccuacagacugggcaccagcggcagcugccccaacgccaccagcaagaucggcuucuucgccaccauggccugggccgugcccaaggacaacuacaagaacgccaccaacccccugaccguggaggugcccuacaucugcaccgagggcgaggaccagaucaccguguggggcuuccacagcgacaacaagacccagaugaagaaccuguacggcgacagcaacccccagaaguucaccagcagcgccaacggcgugaccacccacuacgugagccagaucggcgacuuccccgaccagaccgaggacggcggccugccccagagcggcagaaucgugguggacuacaugaugcagaagcccggcaagaccggcaccaucguguaccagagaggcgugcugcugccccagaagguguggugcgccagcggcagaagcaaggugaucaagggcagccugccccugaucggcgaggccgacugccugcacgagaaguacggcggccugaacaagagcaagcccuacuacaccggcgagcacgccaaggccaucggcaacugccccaucugggugaagaccccccugaagcuggccaacggcaccaaguacagaccccccgccaagcugcugaaggagagaggcuucuucggcgccaucgccagcuuccuggagggcggcugggagggcaugaucgccggcuggcacggcuacaccagccacggcgcccacggcguggccguggccgccgaccugaagagcacccaggaggccaucaacaagaucaccaagaaccugaacagccugagcgagcuggaggugaagaaccugcagagacugagcggcgccauggacgagcugcacaacgagauccuggagcuggacgagaagguggacgaccugagagccgacaccaucagcagccagaucgagcuggccgugcugcugagcaacgagggcaucaucaacagcgaggacgagcaccugcuggcccuggagagaaagcugaagaagaugcugggccccagcgccguggacaucggcaacggcugcuucgagaccaagcacaagugcaaccagaccugccuggacagaaucgccgccggcaccuucaacgccggcgaguucagccugcccaccuucgacagccugaacaucaccgccgccagccugaacgacgacggccuggacaaccacaccauccugcuguacuacagcaccgccgccagcagccuggccgugacccugaugcuggccaucuucaucguguacauggugagcagagacaacgugagcugcagcaucugccuguga

SEQ ID NO: 186791 - RNA, 1755 nt, Artificial Sequence
  derived and/or modified CDS sequence (opt4) from hemagglutinin__InfluenzaB__AFG49013
augaaggccaucaucgugcugcugaugguggugaccagcaacgccgacagaaucugcaccggcaucaccagcagcaacagcccccacguggugaagaccgccacccagggcgaggugaacgugaccggcgugaucccccugaccaccacccccaccaagagcuacuucgccaaccugaagggcaccaagaccagaggcaagcugugccccgacugccugaacugcaccgaccuggacguggcccugggcagacccaugugcgugggcaccacccccagcgccaaggccagcauccugcacgaggugagacccgugaccagcggcugcuuccccaucaugcacgacagaaccaagaucagacagcuggccaaccugcugagaggcuacgagaacaucagacugagcacccagaacgugaucgacgccgagaaggcccccggcggccccuacagacugggcaccagcggcagcugccccaacgccaccagcaagagcggcuucuucgccaccauggccugggccgugcccaaggacaacaacaagaacgccaccaacccccugaccguggaggugcccuacaucugcaccgagggcgaggaccagaucaccguguggggcuuccacagcgacaacaagacccagaugaagaaccuguacggcgacagcaacccccagaaguucaccagcagcgccaacggcgugaccacccacuacgugagccagaucggcggcuuccccgaccagaccgaggacggcggccugccccagagcggcagaaucgugguggacuacaugaugcagaagcccggcaagaccggcaccaucguguaccagagaggcgugcugcugccccagaagguguggugcgccagcggcagaagcaaggugaucaagggcagccugccccugaucggcgaggccgacugccugcacgagaaguacggcggccugaacaagagcaagcccuacuacaccggcgagcacgccaaggccaucggcaacugccccaucugggugaagaccccccugaagcuggccaacggcaccaaguacagaccccccgccaagcugcugaaggagagaggcuucuucggcgccaucgccggcuuccuggagggcggcugggagggcaugaucgccggcuggcacggcuacaccagccacggcgcccacggcguggccguggccgccgaccugaagagcacccaggaggccaucaacaagaucaccaagaaccugaacagccugagcgagcuggaggugaagaaccugcagagacugagcggcgccauggacgagcugcacaacgagauccuggagcuggacgagaagguggacgaccugagagccgacaccaucagcagccagaucgagcuggccgugcugcugagcaacgagggcaucaucaacagcgaggacgagcaccugcuggcccuggagagaaagcugaagaagaugcugggccccagcgccguggacaucggcaacggcugcuucgagaccaagcacaagugcaaccagaccugccuggacagaaucgccgccggcaccuucaacgccggcgaguucagccugcccaccuucgacagccugaacaucaccgccgccagccugaacgacgacggccuggacaaccacaccauccugcuguacuacagcaccgccgccagcagccuggccgugacccugaugcuggccaucuucaucguguacauggugagcagagacaacgugagcugcagcaucugccuguga

SEQ ID NO: 186792 - RNA, 1755 nt, Artificial Sequence
  derived and/or modified CDS sequence (opt4) from hemagglutinin__InfluenzaB__AFH57865
augaaggccaucaucgugcugcugaugguggugaccagcaacgccgacagaaucugcaccggcaucaccagcagcaacagcccccacguggugaagaccgccacccagggcgaggugaacgugaccggcgugaucccccugaccaccacccccaccaagagcuacuucgccaaccugaagggcaccagaaccagaggcaagcugugccccgacugccugaacugcaccgaccuggacguggcccugggcagacccaugugcgugggcaccacccccagcgccaaggccagcauccugcacgaggugagacccgugaccagcggcugcuuccccaucaugcacgacagaaccaagaucagacagcugcccaaccugcugagaggcuacgagaacaucagacugagcacccagaacgugaucgacgccgagaaggcccccggcggccccuacagacugggcaccagcggcagcugccccaacgccaccagcaagagcggcuucuucgccaccauggccugggccgugcccaaggacaacaacaagaacgccaccaacccccugaccguggaggugcccuacaucugcaccgagggcgaggaccagaucaccguguggggcuuccacagcgacaacaagacccccaugaagaaccuguacggcgacagcaacccccagaaguucaccagcagcgccaacggcgugaccacccacuacgugagccagaucggcggcuuccccgaccagaccgaggacggcggccugccccagagcggcagaaucgugguggacuacaugaugcagaagcccggcaagaccggcaccaucguguaccagagaggcgugcugcugccccagaagguguggugcgccagcggcagaagcaaggugaucaagggcagccugccccugaucggcgaggccgacugccugcacgagaaguacggcggccugaacaagagcaagcccuacuacaccggcgagcacgccaaggccaucggcaacugccccaucugggugaagaccccccugaagcuggccaacggcaccaaguacagaccccccgccaagcugcugaaggagagaggcuucuucggcgccaucgccggcuuccuggagggcggcugggagggcaugaucgccggcuggcacggcuacaccagccacggcgcccacggcguggccguggccgccgaccugaagagcacccaggaggccaucaacaagaucaccaagaaccugaacagccugagcgagcuggaggugaagaaccugcagagacugagcggcgccauggacgagcugcacaacgagauccuggagcuggacgagaagguggacgaccugagagccgacaccaucagcagccagaucgagcuggccgugcugcugagcaacgagggcaucaucaacagcgaggacgagcaccugcuggcccuggagagaaagcugaagaagaugcugggccccagcgccguggacaucggcaacggcugcuucgagaccaagcacaagugcaaccagaccugccuggacagaaucgccgccggcaccuucaacgccggcgaguucagccugcccaccuucgacagccugaacaucaccgccgccagccugaacgacgacggccuggacaaccacaccauccugcuguacuacagcaccgccgccagcagccuggccgugacccugaugcuggccaucuucaucguguacauggugagcagagacaacgugagcugcagcaucugccuguga

SEQ ID NO: 186793 - RNA, 1755 nt, Artificial Sequence
  derived and/or modified CDS sequence (opt4) from hemagglutinin__InfluenzaB__AFH57876
augaaggccaucaucgugcugcugaugguggugaccagcaacgccgacagaaucugcaccggcaucaccagcagcaacagcccccacguggugaagaccgccacccagggcgaggugaacgugaccggcgugaucccccugaccaccacccccaccaagagcuacuucgccaaccugaagggcaccagaaccagaggcaagcugugccccgacugccugaacugcaccgaccuggacguggcccugggcagacccaugugcgugggcaccacccccagcgccaaggccagcauccugcacgaggugagacccgugaccagcggcugcuuccccaucaugcacgacagaaccaagaucagacagcugcccaaccugcugagaggcuacgagaacaucagacugagcacccagaacgugaucgacgccgagaaggcccccggcggccccuacagacugggcaccagcggcagcugccccaacgccaccagcaagagcggcuucuucgccaccauggccugggccgugcccaaggacaacaacaagaacgccaccaacccccugaccguggaggugcccuacaucugcaccgagggcgaggaccagaucaccguguggggcuuccacagcgacaacaagaaccagaugaagaaccuguacggcgacagcaacccccagaaguucaccagcagcgccaacggcgugaccacccacuacgugagccagaucggcagcuuccccgaccagaccgaggacggcggccugccccagagcggcagaaucgugguggacuacaugaugcagaagcccggcaagaccggcaccaucguguaccagagaggcauccugcugccccagaagguguggugcgccagcggcagaagcaaggugaucaagggcagccugccccugaucggcgaggccgacugccugcacgagaaguacggcggccugaacaagagcaagcccuacuacaccggcgagcacgccaaggccaucggcaacugccccaucugggugaagaccccccugaagcuggccaacggcaccaaguacagaccccccgccaagcugcugaaggagagaggcuucuucggcgccaucgccggcuuccuggagggcggcugggagggcaugaucgccggcuggcacggcuacaccagccacggcgcccacggcguggccguggccgccgaccugaagagcacccaggaggccaucaacaagaucaccaagaaccugaacagccugagcgagcuggaggugaagaaccugcagagacugagcggcgccauggacgagcugcacaacgagauccuggagcuggacgagaagguggacgaccugagagccgacaccaucagcagccagaucgagcuggccgugcugcugagcaacgagggcaucaucaacagcgaggacgagcaccugcuggcccuggagagaaagcugaagaagaugcugggccccagcgccguggagaucggcaacggcugcuucgagaccaagcacaagugcaaccagaccugccuggacagaaucgccgccggcaccuucaacgccggcgaguucagccugcccaccuucgacagccugaacaucaccgccgccagccugaacgacgacggccuggacaaccacaccauccugcuguacuacagcaccgccgccagcagccuggccgugacccugaugcuggccaucuucaucguguacauggugagcagagacaacgugagcugcagcaucugccuguga

SEQ ID NO: 186794 - RNA, 1755 nt, Artificial Sequence
  derived and/or modified CDS sequence (opt4) from hemagglutinin__InfluenzaB__AFH57942
augaaggccaucaucgugcugcugaugguggugaccagcaacgccgacagaaucugcaccggcaucaccagcagcaacagcccccacguggugaagaccgccacccagggcgaggugaacgugaccggcgugaucccccugaccaccacccccaccaagagcuacuucgccaaccugaagggcaccagaaccagaggcaagcugugccccgacugccugaacugcaccgaccuggacguggcccugggcagacccaugugcgugggcaccacccccagcgccaaggccagcauccugcacgaggugagacccgugaccagcggcugcuuccccaucaugcacgacagaaccaagaucagacagcugcccaaccugcugagaggcuacgagaacaucagacugagcacccagaacgugaucgacgccgagaaggcccccggcggccccuacagacugggcaccagcggcagcugccccaacgccaccagcaagaucggcuucuucgccaccauggccugggccgugcccaaggacaacuacaagaacgccaccaacccccugaccguggaggugcccuacaucugcaccgagggcgaggaccagaucaccguguggggcuuccacagcgacaacaagaaccagaugaagagccuguacggcgacagcaacccccagaaguucaccagcagcgccaacggcgugaccacccacuacgugagccagaucggcgacuuccccgaccagaccgaggacggcggccugccccagagcggcagaaucgugguggacuacaugaugcagaagcccggcaagaccggcaccaucguguaccagagaggcgugcugcugccccagaagguguggugcgccagcggcagaagcaaggugaucaagggcagccugccccugaucggcgaggccgacugccugcacgagaaguacggcggccugaacaagagcaagcccuacuacaccggcgagcacgccaaggccaucggcaacugccccaucugggugaagaccccccugaagcuggccaacggcaccaaguacagaccccccgccaagcugcugaaggagagaggcuucuucggcgccaucgccggcuuccuggagggcggcugggagggcaugaucgccggcuggcacggcuacaccagccacggcgcccacggcguggccguggccgccgaccugaagagcacccaggaggccaucaacaagaucaccaagaaccugaacagccugagcgagcuggaggugaagaaccugcagagacugagcggcgccauggacgagcugcacaacgagauccuggagcuggacgagaagguggacgaccugagagccgacaccaucagcagccagaucgagcuggccgugcugcugagcaacgagggcaucaucaacagcgaggacgagcaccugcuggcccuggagagaaagcugaagaagaugcugggccccagcgccguggacaucggcaacggcugcuucgagaccaagcacaagugcaaccagaccugccuggacagaaucgccgccggcaccuucaacgccggcgaguucagccugcccaccuucgacagccugaacaucaccgccgccagccugaacgacgacggccuggacaaccacaccauccugcuguacuacagcaccgccgccagcagccuggccgugacccugaugcuggccaucuucaucguguacauggugagcagagacaacgugagcugcagcaucugccuguga

SEQ ID NO: 186795 - RNA, 1752 nt, Artificial Sequence
  derived and/or modified CDS sequence (opt4) from hemagglutinin__InfluenzaB__AFH57986
augaaggccaucaucgugcugcugaugguggugaccagcaacgccgacagaaucugcaccggcaucaccagcagcaacagcccccacguggugaagaccgccacccagggcgaggugaacgugaccggcgugaucccccugaccaccacccccaccaagagccacuucgccaaccugaagggcaccaagaccagaggcaagcugugccccaacugccugaacugcaccgaccuggacguggcccugggcagacccaugugcgugggcaccacccccagcgccaaggccagcauccugcacgaggugagacccgugaccagcggcugcuuccccaucaugcacgacagaaccaagaucagacagcugcccaaccugcugagaggcuacgagaacaucagacugagcacccagaacgugaucaacgccgagagagcccccggcggccccuacagacugggcaccagcggcagcugccccaacgugaccagcagagacggcuucuucgccaccauggccugggccgugcccagagacaacaagaccgccaccaacccccugaccguggaggugcccuacaucugcaccaagggcgaggaccagaucaccguguggggcuuccacagcgacgacaagacccagaugaagaaccuguacggcgacagcaacccccagaaguucaccagcagcgccaacggcgugaccacccacuacgugagccagaucggcggcuuccccaaccagaccgaggacggcggccugccccagagcggcagaaucgugguggacuacauggugcagaagcccggcaagaccggcaccaucguguaccagagaggcgugcugcugccccagaagguguggugcgccagcggcagaagcaaggugaucaagggcagccugccccugaucggcgaggccgacugccugcacgagaaguacggcggccugaacaagagcaagcccuacuacaccggcgagcacgccaaggccaucggcaacugccccaucugggugaagaccccccugaagcuggccaacggcaccaaguacagaccccccgccaagcugcugaaggagagaggcuucuucggcgccaucgccggcuuccuggagggcggcugggagggcaugaucgccggcuggcacggcuacaccagccacggcgcccacggcguggccguggccgccgaccugaagagcacccaggaggccaucaacaagaucaccaagaaccugaacagccugagcgagcuggaggugaagaaccugcagagacugagcggcgccauggacgagcugcacaacgagauccuggagcuggacgagaagguggacgaccugagagccgacaccaucagcagccagaucgagcuggccgugcugcugagcaacgagggcaucaucaacagcgaggacgagcaccugcuggcccuggagagaaagcugaagaagaugcugggccccagcgccguggacaucggcaacggcugcuucgagaccaagcacaagugcaaccagaccugccuggacagaaucgccgccggcaccuucaacgccggcgaguucagccugcccaccuucgacagccugaacaucaccgccgccagccugaacgacgacggccuggacaaccacaccauccugcuguacuacagcaccgccgccagcagccuggccgugacccugaugaucgccaucuucaucguguacauggugagcagagacaacgugagcugcagcaucugccuguga

SEQ ID NO: 186796 - RNA, 1758 nt, Artificial Sequence
  derived and/or modified CDS sequence (opt4) from hemagglutinin__InfluenzaB__AFH58249
augaaggccaucaucgugcugcugaugguggugaccagcaacgccgacagaaucugcaccggcaucaccagcagcaacagcccccacguggugaagaccgccacccagggcgaggugaacgugaccggcgugaucccccugaccaccacccccaccaagagccacuucgccaaccugaagggcaccaagaccagaggcaagcugugccccaagugccugaacugcaccgaccuggacguggcccugggcagacccaagugcaccggcaacaucccccccgccaaggugagcauccugcacgaggugagacccgugaccagcggcugcuuccccaucaugcacgacagaaccaagaucagacagcugcccaaccugcugagaggcuacgagagaaucagacugagcaaccacaacgugaucaacgccgaggaggcccccggcggccccuacaagaucggcaccagcggcagcugccccaacgugaccaacggcaacggcuucuucgccaccauggccugggccgugcccaagaacgagaacaacaagaccgccaccaacagccugaccaucgaggugcccuacaucugcaccgagggcgaggaccagaucaccguguggggcuuccacagcgacagcgagacccagauggccaagcuguacggcgacagcaagccccagaaguucaccagcagcgccaacggcgugaccacccacuacgugagccagaucggcggcuuccccaaccagaccgaggacggcggccugccccagagcggcagaaucgugguggacuacauggugcagaagagcggcaagaccggcaccaucaccuaccagagaggcauccugcugccccagaagguguggugcgccagcggcagaagcaaggugaucaagggcagccugccccugaucggcgaggccgacugccugcacgagaaguacggcggccugaacaagagcaagcccuacuacaccggcgagcacgccaaggccaucggcaacugccccaucugggugaagaccccccugaagcuggccaacggcaccaaguacagaccccccgccacccugcugaaggagagaggcuucuucggcgccaucgccggcuuccuggagggcggcugggagggcaugaucgccggcuggcacggcuacaccagccacggcgcccacggcguggccguggccgccgaccugaagagcacccaggaggccaucaacaagaucaccaagaaccugaacagccugagcgagcuggaggugaagaaccugcagagacugagcggcgccauggacgagcugcacaacgagauccuggagcuggacgagaagguggacgaccugagagccgacaccaucagcagccagaucgagcuggccgugcugcugagcaacgagggcaucaucaacagcgaggacgagcaccugcuggcccuggagagaaagcugaagaagaugcugggccccagcgccguggagaucggcaacggcugcuucgagaccaagcacaagugcaaccagaccugccuggacagaaucgccgccggcaccuucaacgccggcgaguucagccugcccaccuucgacagccugaacaucaccgccgccagccugaacgacgacggccuggacaaccacaccauccugcuguacuacagcaccgccgccagcagccuggccgugacccugaugaucgccaucuucgugguguacauggugagcagagacaacgugagcugcagcaucugccuguga

SEQ ID NO: 186797 - RNA, 1758 nt, Artificial Sequence
  derived and/or modified CDS sequence (opt4) from hemagglutinin__InfluenzaB__AFH58260
augaaggccaucaucgugcugcugaugguggugaccagcaacgccgacagaaucugcaccggcaucaccagcagcaacagcccccacguggugaagaccgccacccagggcgaggugaacgugaccggcgugaucccccugaccaccacccccaccaagagccacuucgccaaccugaagggcaccaagaccagaggcaagcugugccccaagugccugaacugcaccgaccuggacguggcccugggcagacccaagugcaccggcaacauccccagcgccgaggugagcauccugcacgaggugagacccgugaccagcggcugcuuccccaucaugcacgacagaaccaagaucagacagcugcccaaccugcugagaggcuacgagcacaucagacugagcacccacaacgugaucaacgccgagaaggcccccggcggccccuacaagaucggcaccagcggcagcugccccaacgugaccaacggcaacggcuucuucgccaccauggccugggccgugcccaagaacgacaacaacaagaccgccaccaacagccugaccaucgaggugcccuacaucugcaccgagggcgaggaccagaucaccguguggggcuuccacagcgacaacgagauccagauggccaagcuguacggcgacagcaagccccagaaguucaccagcagcagcaacggcgugaccacccacuacgugagccagaucggcggcuuccccaaccagaccgaggacggcggccugccccagagcggcagaaucgugguggacuacauggugcagaagagcggcaagaccggcaccaucaccuaccagagaggcauccugcugccccagaagguguggugcgccagcggcagaagcaaggugaucaagggcagccugccccugaucggcgaggccgacugccugcacgagagauacggcggccugaacaagagcaagcccuacuacaccggcgagcacgccaaggccaucggcaacugccccaucugggugaagaccccccugaagcuggccaacggcaccaaguacagaccccccgccaagcugcugaaggagagaggcuucuucggcgccaucgccggcuuccuggagggcggcugggagggcaugaucgccggcuggcacggcuacaccagccacggcgcccacggcguggccguggccgccgaccugaagagcacccaggaggccaucaacaagaucaccaagaaccugaacagccugagcgagcuggaggugaagaaccugcagagacugagcggcgccauggacgagcugcacaacgagauccuggagcuggacgagaagguggacgaccugagagccgacaccaucagcagccagaucgagcuggccgugcugcugagcaacgagggcaucaucaacagcgaggacgagcaccugcuggcccuggagagaaagcugaagaagaugcugggccccagcgccguggagaucggcaacggcugcuucgagaccaagcacaagugcaaccagaccugccuggacagaaucgccgccggcaccuucgacgccggcgaguucagccugcccaccuucgacagccugaacaucaccgccgccagccugaacgacgacggccuggacaaccacaccauccugcuguacuacagcaccgccgccagcagccuggccgugacccugaugaucgccaucuucgugguguacauggugagcagagacaacgugagcugcagcaucugccuguga

SEQ ID NO: 186798 - RNA, 1755 nt, Artificial Sequence
  derived and/or modified CDS sequence (opt4) from hemagglutinin__InfluenzaB__AFH58271
augaaggccaucaucgugcugcugaugguggugaccagcaacgccgacagaaucugcaccggcaucaccagcagcaacagcccccacguggugaagaccgccacccagggcgaggugaacgugaccggcgugaucccccugaccaccacccccaccaagagcuacuucgccaaccugaagggcaccagaaccagaggcaagcugugccccgacugccugaacugcaccgaccuggacguggcccugggcagacccaugugcgugggcaccacccccagcgccaaggccagcauccugcacgaggugaagcccgugaccagcggcugcuuccccaucaugcacgacagaaccaagaucagacagcugcccaaccugcugagaggcuacgagaacaucagacugagcacccagaacgugaucgacgccgagaaggcccccggcggccccuacagacugggcaccagcggcagcugccccaacgccaccagcaagagcggcuucuucgccaccauggccugggccgugcccaaggacaacaacaagaacgccaccaacccccugaccguggaggugcccuacaucugcaccgagggcgaggaccagaucaccguguggggcuuccacagcgacgacaagacccagaugaagaaccuguacggcgacagcaacccccagaaguucaccagcagcgccaacggcgugaccacccacuacgugagccagaucggcagcuuccccgaccagaccgaggacggcggccugccccagagcggcagaaucgugguggacuacaugaugcagaagcccggcaagaccggcaccaucguguaccagagaggcgugcugcugccccagaagguguggugcgccagcggcagaagcaaggugaucaagggcagccugccccugaucggcgaggccgacugccugcacgagaaguacggcggccugaacaagagcaagcccuacuacaccggcgagcacgccaaggccaucggcaacugccccaucugggugaagaccccccugaagcuggccaacggcaccaaguacagaccccccgccaagcugcugaaggagagaggcuucuucggcgccaucgccggcuuccuggagggcggcugggagggcaugaucgccggcuggcacggcuacaccagccacggcgcccacggcguggccguggccgccgaccugaagagcacccaggaggccaucaacaagaucaccaagaaccugaacagccugagcgagcuggaggugaagaaccugcagagacugagcggcgccauggacgagcugcacaacgagauccuggagcuggacgagaagguggacgaccugagagccgacaccaucagcagccagaucgagcuggccgugcugcugagcaacgagggcaucaucaacagcgaggacgagcaccugcuggcccuggagagaaagcugaagaagaugcugggccccagcgccguggagaucggcaacggcugcuucgagaccaagcacaagugcaaccagaccugccuggacagaaucgccgccggcaccuucaacgccggcgaguucagccugcccaccuucgacagccugaacaucaccgccgccagccugaacgacgacggccuggacaaccacaccauccugcuguacuacagcaccgccgccagcagccuggccgugacccugaugcuggccaucuucaucguguacauggugagcagagacaacgugagcugcagcaucugccuguga

SEQ ID NO: 186799 - RNA, 1755 nt, Artificial Sequence; identical to SEQ ID NO: 186798
  derived and/or modified CDS sequence (opt4) from hemagglutinin__InfluenzaB__AFH58282

SEQ ID NO: 186800 - RNA, 1758 nt, Artificial Sequence
  derived and/or modified CDS sequence (opt4) from hemagglutinin__InfluenzaB__AFH58293
augaaggccaucaucgugcugcugaugguggugaccagcaacgccgacagaaucugcaccggcaucaccagcagcaacagcccccacguggugaagaccgccacccagggcgaggugaacgugaccggcgugaucccccugaccaccacccccaccaagagccacuucgccaaccugaagggcaccgagaccagaggcaagcugugccccaagugccugaacugcaccgaccuggacguggcccugggcagacccaagugcaccggcaagauccccagcgccagagugagcauccugcacgaggugagacccgugaccagcggcugcuuccccaucaugcacgacagaaccaagaucagacagcugcccaaccugcugagaggcuacgagcacaucagacugagcacccacaacgugaucaacgccgagaacgcccccggcggccccuacaagaucggcaccagcggcagcugccccaacaucaccaacggcaacggcuucuucgccaccauggccugggccgugcccaagaacgacaagaacaagaccgccaccaacccccugaccaucgaggugcccuacaucugcaccgagggcgaggaccagaucaccguguggggcuuccacagcgacgacgagacccagauggccaagcuguacggcgacagcaagccccagaaguucaccagcagcgccaacggcgugaccacccacuacgugagccagaucggcggcuuccccaaccagaccgaggacggcggccugccccagagcggcagaaucgugguggacuacauggugcagaagagcggcaagaccggcaccaucaccuaccagagaggcauccugcugccccagaagguguggugcgccagcggcagaagcaaggugaucaagggcagccugccccugaucggcgaggccgacugccugcacgagaaguacggcggccugaacaagagcaagcccuacuacaccggcgagcacgccaaggccaucggcaacugccccaucugggugaagaccccccugaagcuggccaacggcaccaaguacagaccccccgccaagcugcugaaggagagaggcuucuucggcgccaucgccggcuuccuggagggcggcugggagggcaugaucgccggcuggcacggcuacaccagccacggcgcccacggcguggccguggccgccgaccugaagagcacccaggaggccaucaacaagaucaccaagaaccugaacagccugagcgagcuggaggugaagaaccugcagagacugagcggcgccauggacgagcugcacaacgagauccuggagcuggacgagaagguggacgaccugagagccgacaccaucagcagccagaucgagcuggccgugcugcugagcaacgagggcaucaucaacagcgaggacgagcaccugcuggcccuggagagaaagcugaagaagaugcugggccccagcgccguggagaucggcaacggcugcuucgagaccaagcacaagugcaaccagaccugccuggacagaaucgccgccggcaccuucgacgccggcgaguucagccugcccaccuucgacagccugaacaucaccgccgccagccugaacgacgacggccuggacaaccacaccauccugcuguacuacagcaccgccgccagcagccuggccgugacccugaugaucgccaucuucgugguguacauggugagcagagacaacgugagcugcagcaucugccuguga

SEQ ID NO: 186801 - RNA, 1755 nt, Artificial Sequence
  derived and/or modified CDS sequence (opt4) from hemagglutinin__InfluenzaB__AFH58304
augaaggccaucaucgugcugcugaugguggugaccagcaacgccgacagaaucugcaccggcaucaccagcagcaacagcccccacguggugaagaccgccacccagggcgaggugaacgugaccggcgugaucccccugaccaccacccccaccaagagcuacuucgccaaccugaagggcaccagaaccagaggcaagcugugccccgacugccugaacugcaccgaccuggacguggcccugggcagacccaugugcgugggcaccacccccagcgccaaggccagcauccugcacgaggugagacccgugaccagcggcugcuuccccaucaugcacgacagaaccaagaucagacagcugcccaaccugcugagaggcuacgagaacaucagacugagcacccagaacgugaucgacgccgagaaggcccccggcggccccuacagacugggcaccagcggcagcugccccaacgccaccagcaagaucggcuucuucgccaccauggccugggccgugcccaaggacaacuacaagaacgccaccaacccccugaccguggaggugcccuacaucugcaccgagggcgaggaccagaucaccguguggggcuuccacagcgacgacaagacccagaugaagaaccuguacggcgacagcaacccccagaaguucaccagcagcgccaacggcgugaccacccacuacgugagccagaucggcgacuuccccgaccagaccgaggacggcggccugccccagagcggcagaaucgugguggacuacaugaugcagaagcccggcaagaccggcaccaucguguaccagagaggcgugcugcugccccagaagguguggugcgccagcggcagaagcaaggugaucaagggcagccugccccugaucggcgaggccgacugccugcacgagaaguacggcggccugaacaagagcaagcccuacuacaccggcgagcacgccaaggccaucggcaacugccccaucugggugaagaccccccugaagcuggccaacggcaccaaguacagaccccccgccaagcugcugaaggagagaggcuucuucggcgccaucgccggcuuccuggagggcggcugggagggcaugaucgccggcuggcacggcuacaccagccacggcgcccacggcguggccguggccgccgaccugaagagcacccaggaggccaucaacaagaucaccaagaaccugaacagccugagcgagcuggaggugaagaaccugcagagacugagcggcgccauggacgagcugcacaacgagauccuggagcuggacgagaagguggacgaccugagagccgacaccaucagcagccagaucgagcuggccgugcugcugagcaacgagggcaucaucaacagcgaggacgagcaccugcuggcccuggagagaaagcugaagaagaugcugggccccagcgccguggacaucggcaacggcugcuucgagaccaagcacaagugcaaccagaccugccuggacagaaucgccgccggcaccuucaacgccggcgaguucagccugcccaccuucgacagccugaacaucaccgccgccagccugaacgacgacggccuggacaaccacaccauccugcuguacuacagcaccgccgccagcagccuggccgugacccugaugcuggccaucuucaucguguacauggugagcagagacaacgugagcugcagcaucugccuguga

SEQ ID NO: 186802 - RNA, 1755 nt, Artificial Sequence; identical to SEQ ID NO: 186801
  derived and/or modified CDS sequence (opt4) from hemagglutinin__InfluenzaB__AFH58315

SEQ ID NO: 186803 - RNA, 1755 nt, Artificial Sequence
  derived and/or modified CDS sequence (opt4) from hemagglutinin__InfluenzaB__AFH58326
augaaggccaucaucgugcugcugaugguggugaccagcaacgccgacagaaucugcaccggcaucaccagcagcaacagcccccacguggugaagaccgccacccagggcgaggugaacgugaccggcgugaucccccugaccaccacccccaccaagagcuacuucgccaaccugaagggcaccagaaccagaggcaagcugugccccgacugccugaacugcaccgaccuggacguggcccugggcagacccaugugcgugggcaccacccccagcgccaaggccagcauccugcacgaggugagacccgugaccagcggcugcuuccccaucaugcacgacagaaccaagaucagacagcugcccaaccugcugagaggcuacgagaacaucagacugagcacccagaacgugaucgacgccgagaaggcccccggcggccccuacagacugggcaccagcggcagcugccccaacgccaccagcaagaucggcuucuucgccaccauggccugggccgugcccaaggacaacuacaagaacgccaccaacccccugaccguggaggugcccuacaucugcaccgagggcgaggaccagaucaccguguggggcuuccacagcgacaacaaggcccagaugaagaaccuguacggcgacagcaacccccagaaguucaccagcagcgccaacggcgugaccacccacuacgugagccagaucggcgacuuccccgaccagaccgaggacggcggccccccccagagcggcagaaucgugguggacuacaugaugcagaagcccggcaagaccggcaccaucguguaccagagaggcgugcugcugccccagaagguguggugcgccagcggcagaagcaaggugaucaagggcagccugccccugaucggcgaggccgacugccugcacgagaaguacggcggccugaacaagagcaagcccuacuacaccggcgagcacgccaaggccaucggcaacugccccaucugggugaagaccccccugaagcuggccaacggcaccaaguacagaccccccgccaagcugcugaaggagagaggcuucuucggcgccaucgccggcuuccuggagggcggcugggagggcaugaucgccggcuggcacggcuacaccagccacggcgcccacggcguggccguggccgccgaccugaagagcacccaggaggccaucaacaagaucaccaagaaccugaacagccugagcgagcuggaggugaagaaccugcagagacugagcggcgccauggacgagcugcacaacgagauccuggagcuggacgagaagguggacgaccugagagccgacaccaucagcagccagaucgagcuggccgugcugcugagcaacgagggcaucaucaacagcgaggacgagcaccugcuggcccuggagagaaagcugaagaagaugcugggccccagcgccguggacaucggcaacggcugcuucgagaccaagcacaagugcaaccagaccugccuggacagaaucgccgccggcaccuucaacgccggcgaguucagccugcccaccuucgacagccugaacaucaccgccgccagccugaacgacgacggccuggacaaccacaccauccugcuguacuacagcaccgccgccagcagccuggccgugacccugaugcuggccaucuucaucguguacauggugagcagagacaacgugagcugcagcaucugccuguga

SEQ ID NO: 186804 - RNA, 1755 nt, Artificial Sequence
  derived and/or modified CDS sequence (opt4) from hemagglutinin__InfluenzaB__AFH58337
augaaggccaucaucgugcugcugaugguggugaccagcaacgccgacagaaucugcaccggcaucaccagcagcaacagcccccacguggugaagaccgccacccagggcgaggugaacgugaccggcgugaucccccugaccaccacccccaccaagagcuacuucgccaaccugaagggcaccagaaccagaggcaagcugugccccgacugccugaacugcaccgaccuggacguggcccugggcagacccaugugcgugggcaccacccccagcgccaaggccagcauccugcacgaggugagacccgugaccagcggcugcuuccccaucaugcacgacagaaccaagaucagacagcugcccaaccugcugagaggcuacgagaacaucagacugagcacccagaacgugaucgacgccgagaaggcccccggcggccccuacagacugggcaccagcggcagcugccccaacgccaccagcaagaucggcuucuucgccaccauggccugggccgugcccaaggacaacuacaagaacgccaccaacccccugaccguggaggugcccuacaucugcaccgagggcgaggaccagaucaccguguggggcuuccacagcgacaacaaggcccagaugaagaaccuguacggcgacagcaacccccagaaguucaccagcagcgccaacggcgugaccacccacuacgugagccagaucggcgacuuccccgaccagaccgaggacggcggccugccccagagcggcagaaucgugguggacuacaugaugcagaagcccggcaagaccggcaccaucguguaccagagaggcgugcugcugccccagaagguguggugcgccagcggcagaagcaaggugaucaagggcagccugccccugaucggcgaggccgacugccugcacgagaaguacggcggccugaacaagagcaagcccuacuacaccggcgagcacgccaaggccaucggcaacugccccaucugggugaagaccccccugaagcuggccaacggcaccaaguacagaccccccgccaagcugcugaaggagagaggcuucuucggcgccaucgccggcuuccuggagggcggcugggagggcaugaucgccggcuggcacggcuacaccagccacggcgcccacggcguggccguggccgccgaccugaagagcacccaggaggccaucaacaagaucaccaagaaccugaacagccugagcgagcuggaggugaagaaccugcagagacugagcggcgccauggacgagcugcacaacgagauccuggagcuggacgagaagguggacgaccugagagccgacaccaucagcagccagaucgagcuggccgugcugcugagcaacgagggcaucaucaacagcgaggacgagcaccugcuggcccuggagagaaagcugaagaagaugcugggccccagcgccguggacaucggcaacggcugcuucgagaccaagcacaagugcaaccagaccugccuggacagaaucgccgccggcaccuucaacgccggcgaguucagccugcccaccuucgacagccugaacaucaccgccgccagccugaacgacgacggccuggacaaccacaccauccugcuguacuacagcaccgccgccagcagccuggccgugacccugaugcuggccaucuucaucguguacauggugagcagagacaacgugagcugcagcaucugccuguga

SEQ ID NO: 186805 - RNA, 1758 nt, Artificial Sequence
  derived and/or modified CDS sequence (opt4) from hemagglutinin__InfluenzaB__AFH58348
augaaggccaucaucgugcugcugaugguggugaccagcaacgccgacagaaucugcaccggcaucaccagcagcaacagcccccacguggugaagaccgccacccagggcgaggugaacgugaccggcgugaucccccugaccaccacccccaccaagagccacuucgccaaccugaagggcaccgagaccagaggcaagcugugccccaagugccugaacugcaccgaccuggacguggcccugggcagacccaagugcaccggcaacauccccagcgccagagugagcauccugcacgaggugagacccgugaccagcggcugcuuccccaucaugcacgacagaaccaagaucagacagcugcccaaccugcugagaggcuacgagcacaucagacugagcgcccacaacgugaucaacgccgagaacgcccccggcggccccuacaagaucggcaccagcggcagcugccccaacgugaccaacggcaacggcuucuucgccaccauggccugggccgugcccaagaacgacaacaacaagaccgccaccaacagccugaccaucgaggugcccuacaucugcaccgagggcgaggaccagaucaccguguggggcuuccacagcgacaaggagacccagauggccaagcuguacggcgacagcaagccccagaaguucaccagcagcgccaacggcgugaccacccacuacgugagccagaucggcggcuuccccaaccagaccgaggacggcggccugccccagagcggcagaaucgugguggacuacauggugcagaagagcggcaagaccggcaccaucaccuaccagagaggcauccugcugccccagaagguguggugcgccagcggcagaagcaaggugaucaagggcagccugccccugaucggcgaggccgacugccugcacgagaaguacggcggccugaacaagagcaagcccuacuacaccggcgagcacgccaaggccaucggcaacugccccaucugggugaagaccccccugaagcuggccaacggcaccaaguacagaccccccgccaagcugcugaaggagagaggcuucuucggcgccaucgccggcuuccuggagggcggcugggagggcaugaucgccggcuggcacggcuacaccagccacggcgcccacggcguggccguggccgccgaccugaagagcacccaggaggccaucaacaagaucaccaagaaccugaacagccugagcgagcuggaggugaagaaccugcagagacugagcggcgccauggacgagcugcacaacgagauccuggagcuggacgagaagguggacgaccugagagccgacaccaucagcagccagaucgagcuggccgugcugcugagcaacgagggcaucaucaacagcgaggacgagcaccugcuggcccuggagagaaagcugaagaagaugcugggccccagcgccguggagaucggcaacggcugcuucgagaccaagcacaagugcaaccagaccugccuggacagaaucgccgccggcaccuucaacgccggcgaguucagccugcccaccuucgacagccugaacaucaccgccgccagccugaacgacgacggccuggacaaccacaccauccugcuguacuacagcaccgccgccagcagccuggccgugacccugaugaucgccaucuucgugguguacauggugagcagagacaacgugagcugcagcaucugccuguga

SEQ ID NO: 186806 - RNA, 1758 nt, Artificial Sequence
  derived and/or modified CDS sequence (opt4) from hemagglutinin__InfluenzaB__AFH58370
augaaggccaucaucgugcugcugaugguggugaccagcaacgccgacagaaucugcaccggcaucaccagcagcaacagcccccacguggugaagaccgccacccagggcgaggugaacgugaccggcgugaucccccugaccaccacccccaccaagagccacuucgccaaccugaagggcaccgagaccagaggcaagcugugccccaagugccugaacugcaccgaccuggacguggcccugggcagacccaagugcaccggcaacauccccagcgccagagugagcauccugcacgaggugagacccgugaccagcggcugcuuccccaucaugcacgacagaaccaagaucagacagcugcccaaccugcugagaggcuacgagcacaucagacugagcgcccacaacgugaucaacgccgagaacgcccccggcggccccuacaagaucggcaccagcggcagcugccccaacgugaccaacggcaacggcuucuucgccaccauggccugggccgugcccaagaacgacaacaacaagaccgccaccaacagccugaccaucgaggugcccuacaucugcaccgagggcgaggaccagaucaccguguggggcuuccacagcgacaacgagauccagauggccaagcuguacggcgacagcaagccccagaaguucaccagcagcgccaacggcgugaccacccacuacgugagccagaucggcggcuuccccaaccagaccgaggacggcggccugccccagagcggcagaaucgugguggacuacauggugcagaagagcggcaagaccggcaccaucaccuaccagagaggcauccugcugccccagaagguguggugcgccagcggcagaagcaaggugaucaagggcagccugccccugaucggcgaggccgacugccugcacgagaaguacggcggccugaacaagagcaagcccuacuacaccggcgagcacgccaaggccaucggcaacugccccaucugggugaagaccccccugaagcuggccaacggcaccaaguacagaccccccgccaagcugcugaaggagagaggcuucuucggcgccaucgccggcuuccuggagggcggcugggagggcaugaucgccggcuggcacggcuacaccagccacggcgcccacggcguggccguggccgccgaccugaagagcacccaggaggccaucaacaagaucaccaagaaccugaacagccugagcgagcuggaggugaagaaccugcagagacugagcggcgccauggacgagcugcacaacgagauccuggagcuggacgagaagguggacgaccugagagccgacaccaucagcagccagaucgagcuggccgugcugcugagcaacgagggcaucaucaacagcgaggacgagcaccugcuggcccuggagagaaagcugaagaagaugcugggccccagcgccguggagaucggcaacggcugcuucgagaccaagcacaagugcaaccagaccugccuggacagaaucgccgccggcaccuucaacgccggcgaguucagccugcccaccuucgacagccugaacaucaccgccgccagccugaacgacgacggccuggacaaccacaccauccugcuguacuacagcaccgccgccagcagccuggccgugacccugaugaucgccaucuucgugguguacauggugagcagagacaacgugagcugcagcaucugccuguga

SEQ ID NO: 186807 - RNA, 1758 nt, Artificial Sequence
  derived and/or modified CDS sequence (opt4) from hemagglutinin__InfluenzaB__AFH58392
augaaggccaucaucgugcugcugaugguggugaccagcaacgccgacagaaucugcaccggcaucaccagcagcaacagcccccacguggugaagaccgccacccagggcgaggugaacgugaccggcgugaucccccugaccaccacccccaccaagagccacuucgccaaccugaagggcaccgagaccagaggcaagcugugccccaagugccugaacugcaccgaccuggacguggcccugggcagacccaagugcaccggcaagauccccagcgccagagugagcauccugcacgaggugagacccgugaccagcggcugcuuccccaucaugcacgacagaaccaagaucagacagcugcccaaccugcugagaggcuacgagcacaucagacugagcacccacaacgugaucaacgccgagaacgcccccggcggccccuacaagaucggcaccagcggcagcugccccaacaucaccaacggcaacggcuucuucgccaccauggccugggccgugcccaagaacgacaagaacaagaccgccaccaacccccugaccaucgaggugcccuacaucugcaccgagggcgaggaccagaucaccguguggggcuuccacagcgacaacgagauccagauggccaagcuguacggcgacagcaagccccagaaguucaccagcagcgccaacggcgugaccacccacuacgugagccagaucggcggcuuccccaaccagaccgaggacggcggccugccccagagcggcagaaucgugguggacuacauggugcagaagagcggcaagaccggcaccaucaccuaccagagaggcauccugcugccccagaagguguggugcgccagcggcagaagcaaggugaucaagggcagccugccccugaucggcgaggccgacugccugcacgagaaguacggcggccugaacaagagcaagcccuacuacaccggcgagcacgccaaggccaucggcaacugccccaucugggugaagaccccccugaagcuggccaacggcaccaaguacagaccccccgccaagcugcugaaggagagaggcuucuucggcgccaucgccggcuuccuggagggcggcugggagggcaugaucgccggcuggcacggcuacaccagccacggcgcccacggcguggccguggccgccgaccugaagagcacccaggaggccaucaacaagaucaccaagaaccugaacagccugagcgagcuggaggugaagaaccugcagagacugagcggcgccauggacgagcugcacaacgagauccuggagcuggacgagaagguggacgaccugagagccgacaccaucagcagccagaucgagcuggccgugcugcugagcaacgagggcaucaucaacagcgaggacgagcaccugcuggcccuggagagaaagcugaagaagaugcugggccccagcgccguggagaucggcaacggcugcuucgagaccaagcacaagugcaaccagaccugccuggacagaaucgccgccggcaccuucgacgccggcgaguucagccugcccaccuucgacagccugaacaucaccgccgccagccugaacgacgacggccuggacaaccacaccauccugcuguacuacagcaccgccgccagcagccuggccgugacccugaugaucgccaucuucgugguguacauggugagcagagacaacgugagcugcagcaucugccuguga

SEQ ID NO: 186808 - RNA, 1758 nt, Artificial Sequence; identical to SEQ ID NO: 186800
  derived and/or modified CDS sequence (opt4) from hemagglutinin__InfluenzaB__AFH58403

SEQ ID NO: 186809 - RNA, 1758 nt, Artificial Sequence; identical to SEQ ID NO: 186800
  derived and/or modified CDS sequence (opt4) from hemagglutinin__InfluenzaB__AFH58414

SEQ ID NO: 186810 - RNA, 1758 nt, Artificial Sequence; identical to SEQ ID NO: 186800
  derived and/or modified CDS sequence (opt4) from hemagglutinin__InfluenzaB__AFH58425

SEQ ID NO: 186811 - RNA, 1758 nt, Artificial Sequence; identical to SEQ ID NO: 186800
  derived and/or modified CDS sequence (opt4) from hemagglutinin__InfluenzaB__AFH58436

SEQ ID NO: 186812 - RNA, 1758 nt, Artificial Sequence
  derived and/or modified CDS sequence (opt4) from hemagglutinin__InfluenzaB__AFH58458
augaaggccaucaucgugcugcugaugguggugaccagcaacgccgacagaaucugcaccggcaucaccagcagcaacagcccccacguggugaagaccgccacccagggcgaggugaacgugaccggcgugaucccccugaccaccacccccaccaagagccacuucgccaaccugaagggcaccgagaccagaggcaagcugugccccaagugccugaacugcaccgaccuggacguggcccugggcagacccaagugcaccggcaagauccccagcgccagagugagcauccugcacgaggugagacccgugaccagcggcugcuuccccaucaugcacgacagaaccaagaucagacagcugcccaaccugcugagaggcuacgagcacaucagacugagcaccaacaacgugaucaacgccgagaacgcccccggcggccccuacaagaucggcaccagcggcagcugccccaacgugaccaacggcaacggcuucuucgccaccauggccugggccgugcccaagaacgacaagaacaagaccgccaccaacccccugaccaucgaggugcccuacaucugcaccgagggcgaggaccagaucaccguguggggcuuccacagcgacaacgagauccagauggccaagcuguacggcgacagcagaccccagaaguucaccagcagcgccaacggcgugaccacccacuacgugagccagaucggcggcuuccccaaccagaccgaggacggcggccugccccagagcggcagaaucgugguggacuacauggugcagaagagcggcaagaccggcaccaucaccuaccagagaggcauccugcugccccagaagguguggugcgccagcggcagaagcaaggugaucaagggcagccugccccugaucggcgaggccgacugccugcacgagaaguacggcggccugaacaagagcaagcccuacuacaccggcgagcacgccaaggccaucggcaacugccccaucugggugaagaccccccugaagcuggccaacggcaccaaguacagaccccccgccaagcugcugaaggagagaggcuucuucggcgccaucgccggcuuccuggagggcggcugggagggcaugaucgccggcuggcacggcuacaccagccacggcgcccacggcguggccguggccgccgaccugaagagcacccaggaggccaucaacaagaucaccaagaaccugaacagccugagcgagcuggaggugaagaaccugcagagacugagcggcgccauggacgagcugcacaacgagauccuggagcuggacgagaagguggacgaccugagagccgacaccaucagcagccagaucgagcuggccgugcugcugagcaacgagggcaucaucaacagcgaggacgagcaccugcuggcccuggagagaaagcugaagaagaugcugggccccagcgccguggagaucggcaacggcugcuucgagaccaagcacaagugcaaccagaccugccuggacagaaucgccgccggcaccuucgacgccggcgaguucagccugcccaccuucgacagccugaacaucaccgccgccagccugaacgacgacggccuggacaaccacaccauccugcuguacuacagcaccgccgccagcagccuggccgugacccugaugaucgccaucuucgugguguacauggugagcagagacaacgugagcugcagcaucugccuguga

SEQ ID NO: 186813 - RNA, 1758 nt, Artificial Sequence; identical to SEQ ID NO: 186812
  derived and/or modified CDS sequence (opt4) from hemagglutinin__InfluenzaB__AFH58469

SEQ ID NO: 186814 - RNA, 1755 nt, Artificial Sequence; identical to SEQ ID NO: 186794
  derived and/or modified CDS sequence (opt4) from hemagglutinin__InfluenzaB__AFH58480

SEQ ID NO: 186815 - RNA, 1755 nt, Artificial Sequence
  derived and/or modified CDS sequence (opt4) from hemagglutinin__InfluenzaB__AFH58502
augaaggccaucaucgugcugcugaugguggugaccagcaacgccgacagaaucugcaccggcaucaccagcagcaacagcccccacguggugaagaccgccacccagggcgaggugaacgugaccggcgugaucccccugaccaccacccccaccaagagcuacuucgccaaccugaagggcaccagaaccagaggcaagcugugccccgacugccugaacugcaccgaccuggacguggcccugggcagacccaugugcgugggcaccacccccagcgccaaggccagcauccugcacgaggugagacccgugaccagcggcugcuuccccaucaugcacgacagaaccaagaucagacagcugcccaaccugcugagaggcuacgagaacaucagacugagcacccagaacgugaucgacgccgagaaggcccccggcggccccuacagacugggcaccagcggcagcugccccaacgccaccagcaagaucggcuucuucgccaccauggccugggccgugcccaaggacaacuacaagaacgccaccaacccccugaccguggaggugcccuacaucugcaccgagggcgaggaccagaucaccguguggggcuuccacagcgacgacaagacccagaugaagagccuguacggcgacagcaacccccagaaguucaccagcagcgccaacggcgugaccacccacuacgugagccagaucggcgacuuccccgaccagaccgaggacggcggccugccccagagcggcagaaucgugguggacuacaugaugcagaagcccggcaagaccggcaccaucguguaccagagaggcgugcugcugccccagaagguguggugcgccagcggcagaagcaaggugaucaagggcagccugccccugaucggcgaggccgacugccugcacgagaaguacggcggccugaacaagagcaagcccuacuacaccggcgagcacgccaaggccaucggcaacugccccaucugggugaagaccccccugaagcuggccaacggcaccaaguacagaccccccgccaagcugcugaaggagagaggcuucuucggcgccaucgccggcuuccuggagggcggcugggagggcaugaucgccggcuggcacggcuacaccagccacggcgcccacggcguggccguggccgccgaccugaagagcacccaggaggccaucaacaagaucaccaagaaccugaacagccugagcgagcuggaggugaagaaccugcagagacugagcggcgccauggacgagcugcacaacgagauccuggagcuggacgagaagguggacgaccugagagccgacaccaucagcagccagaucgagcuggccgugcugcugagcaacgagggcaucaucaacagcgaggacgagcaccugcuggcccuggagagaaagcugaagaagaugcugggccccagcgccguggacaucggcaacggcugcuucgagaccaagcacaagugcaaccagaccugccuggacagaaucgccgccggcaccuucaacgccggcgaguucagccugcccaccuucgacagccugaacaucaccgccgccagccugaacgacgacggccuggacaaccacaccauccugcuguacuacagcaccgccgccagcagccuggccgugacccugaugcuggccaucuucaucguguacauggugagcagagacaacgugagcugcagcaucugccuguga

SEQ ID NO: 186816 - RNA, 1758 nt, Artificial Sequence
  derived and/or modified CDS sequence (opt4) from hemagglutinin__InfluenzaB__AFH58513
augaaggccaucaucgugcugcugaugguggugaccagcaacgccgacagaaucugcaccggcaucaccagcagcaacagcccccacguggugaagaccgccacccagggcgaggugaacgugaccggcgugaucccccugaccaccacccccaccaagagccacuucgccaaccugaagggcaccgagaccagaggcaagcugugccccaagugccccaacugcaccgaccuggacguggcccugggcagacccaagugcaccggcaagauccccagcgccagagugagcauccugcacgaggugagacccgugaccagcggcugcuuccccaucaugcacgacagaaccaagaucagacagcugcccaaccugcugagaggcuacgagcacaucagacugagcacccacaacgugaucaacgccgagaacgcccccggcggccccuacaagaucggcaccagcggcagcugccccaacgugaccaacggcaacggcuucuucgccaccauggccugggccgugcccaagaacgacaagaacaagaccgccaccaacccccugaccaucgaggugcccuacaucugcaccgagggcgaggaccagaucaccguguggggcuuccacagcgacgacgagacccagauggccaagcuguacggcgacagcaagccccagaaguucaccagcagcgccaacggcgugaccacccacuacgugagccagaucggcggcuuccccaaccagaccgaggacggcggccugccccagagcggcagaaucgugguggacuacauggugcagaagagcggcaagaccggcaccaucaccuaccagagaggcauccugcugccccagaagguguggugcgccagcggcagaagcaaggugaucaagggcagccugccccugaucggcgaggccgacugccugcacgagaaguacggcggccugaacaagagcaagcccuacuacaccggcgagcacgccaaggccaucggcaacugccccaucugggugaagaccccccugaagcuggccaacggcaccaaguacagaccccccgccaagcugcugaaggagagaggcuucuucggcgccaucgccggcuuccuggagggcggcugggagggcaugaucgccggcuggcacggcuacaccagccacggcgcccacggcguggccguggccgccgaccugaagagcacccaggaggccaucaacaagaucaccaagaaccugaacagccugagcgagcuggaggugaagaaccugcagagacugagcggcgccauggacgagcugcacaacgagauccuggagcuggacgagaagguggacgaccugagagccgacaccaucagcagccagaucgagcuggccgugcugcugagcaacgagggcaucaucaacagcgaggacgagcaccugcuggcccuggagagaaagcugaagaagaugcugggccccagcgccguggagaucggcaacggcugcuucgagaccaagcacaagugcaaccagaccugccuggacagaaucgccgccggcaccuucgacgccggcgaguucagccugcccaccuucgacagccugaacaucaccgccgccagccugaacgacgacggccuggacaaccacaccauccugcuguacuacagcaccgccgccagcagccuggccgugacccugaugaucgccaucuucgugguguacauggugagcagagacaacgugagcugcagcaucugccuguga

SEQ ID NO: 186817 - RNA, 1758 nt, Artificial Sequence; identical to SEQ ID NO: 186816
  derived and/or modified CDS sequence (opt4) from hemagglutinin__InfluenzaB__AFH58524

SEQ ID NO: 186818 - RNA, 1755 nt, Artificial Sequence
  derived and/or modified CDS sequence (opt4) from hemagglutinin__InfluenzaB__AFH58535
augaaggccaucaucgugcugcugaugguggugaccagcaacgccgacagaaucugcaccggcaucaccagcagcaacagcccccacguggugaagaccgccacccagggcgaggugaacgugaccggcgugaucccccugaccaccacccccaccaagagccacuucgccaaccugaagggcacccagaccagaggcaagcugugccccaacugcuucaacugcaccgaccuggacguggcccugggcagacccaagugcaugggcaacacccccagcgccaaggugagcauccugcacgaggugaagcccgccaccagcggcugcuuccccaucaugcacgacagaaccaagaucagacagcugcccaaccugcugagaggcuacgagaacaucagacugagcaccagcaacgugaucaacaccgagaccgcccccggcggccccuacaaggugggcaccagcggcagcugccccaacguggccaacggcaacggcuucuucaacaccauggccugggugauccccaaggacaacaacaagaccgccaucaaccccgugaccguggaggugcccuacaucugcagcgagggcgaggaccagaucaccguguggggcuuccacagcgacgacaagacccagauggagagacuguacggcgacagcaacccccagaaguucaccagcagcgccaacggcgugaccacccacuacgugagccagaucggcggcuuccccaaccagaccgaggacgagggccugaagcagagcggcagaaucgugguggacuacauggugcagaagcccggcaagaccggcaccaucguguaccagagaggcauccugcugccccagaagguguggugcgccagcggcagaagcaaggugaucaagggcagccugccccugaucggcgaggccgacugccugcacgagaaguacggcggccugaacaagagcaagcccuacuacaccggcgagcacgccaaggccaucggcaacugccccaucugggugaagaccccccugaagcuggccaacggcaccaaguacagaccccccgccaagcugcugaaggagagaggcuucuucggcgccaucgccggcuuccuggagggcggcugggagggcaugaucgccggcuggcacggcuacaccagccacggcgcccacggcguggccguggccgccgaccugaagagcacccaggaggccaucaacaagaucaccaagaaccugaacuaccugagcgagcuggaggugaagaaccugcagagacugagcggcgccaugaacgagcugcacgacgagauccuggagcuggacgagaagguggacgaccugagagccgacaccaucagcagccagaucgagcuggccgugcugcugagcaacgagggcaucaucaacagcgaggacgagcaccugcuggcccuggagagaaagcugaagaagaugcugggccccagcgccguggagaucggcaacggcugcuucgagaccaagcacaagugcaaccagaccugccuggacagaaucgccgccggcaccuucaacgccggcgacuucagccugcccaccuucgacagccugaacaucaccgccgccagccugaacgacgacggccuggacaaccacaccauccugcuguacuacagcaccgccgccagcagccuggccgugacccugaugaucgccaucuucaucguguacauggugagcagagacaacgugagcugcagcaucugccuguga

SEQ ID NO: 186819 - RNA, 1752 nt, Artificial Sequence
  derived and/or modified CDS sequence (opt4) from hemagglutinin__InfluenzaB__AFH58557
augaaggccaucaucgugcugcugaugguggugaccagcaacgccgacagaaucugcaccggcaucaccagcagcaacagcccccacguggugaagaccgccacccagggcgaggugaacgugaccggcgugaucccccugaccaccacccccaccaagagccacuucgccaaccugaagggcaccaagaccagaggcaagcugugccccaacugccugaacugcaccgaccuggacguggcccugggcagacccaugugcgugggcaccacccccagcgccaaggccagcauccugcacgaggugagacccgugaccagcggcugcuuccccaucaugcacgacagaaccaagaucagacagcugcccaaccugcugagaggcuacgagaacaucagacugagcacccagaacgugaucaacgccgagagagcccccggcggccccuacagacugggcaccagcggcagcugccccaacgugaccagcagagacggcuucuucgccaccauggccugggccgugcccagagacaacaagaccgccaccaacccccugaccguggaggugcccuacaucugcaccaagggcgaggaccagaucaccguguggggcuuccacagcgacgacaagacccagaugaagaaccuguacggcgacagcaacccccagaaguucaccagcagcgccaacggcgugaccacccacuacgugagccagaucggcggcuuccccaaccagaccgaggacggcggccugccccagagcggcagaaucgugguggacuacauggugcagaagcccggcaagaccggcaccaucguguaccagagaggcgugcugcugccccagaagguguggugcgccagcggcagaagcaaggugaucaagggcagccugccccugaucggcgaggccgacugccugcacgagaaguacggcggccugaacaagagcaagcccuacuacaccggcgagcacgccaaggccaucggcaacugccccaucugggugaagaccccccugaagcuggccaacggcaccaaguacagaccccccgccaagcugcugaaggagagaggcuucuucggcgccaucgccggcuuccuggagggcggcugggagggcaugaucgccggcuggcacggcuacaccagccacggcgcccacggcguggccguggccgccgaccugaagagcacccaggaggccaucaacaagaucaccaagaaccugaacagccugagcgagcuggaggugaagaaccugcagagacugagcggcgccauggacgagcugcacaacgagauccuggagcuggacgagaagguggacgaccugagagccgacaccaucagcagccagaucgagcuggccgugcugcugagcaacgagggcaucaucaacagcgaggacgagcaccugcuggcccuggagagaaagcugaagaagaugcugggccccagcgccguggacaucggcaacggcugcuucgagaccaagcacaagugcaaccagaccugccuggacagaaucgccgccggcaccuucaacgccggcgaguucagcuuccccaccuucgacagccugaacaucaccgccgccagccugaacgacgacggccuggacaaccacaccauccugcuguacuacagcaccgccgccagcagccuggccgugacccugaugaucgccaucuucaucguguacauggugagcagagacaacgugagcugcagcaucugccuguga

SEQ ID NO: 186820 - RNA, 1755 nt, Artificial Sequence
  derived and/or modified CDS sequence (opt4) from hemagglutinin__InfluenzaB__AFJ76224
augaaggccaucaucgugcugcugaugguggugaccagcaacgccgacagaaucugcaccggcaucaccagcagcaacagcccccacguggugaagaccgccacccagggcgaggugaacgugaccggcgugaucccccugaccaccacccccaccaagagccacuucgccaaccugaagggcaccaagaccagaggcaagcugugccccaccugccugaacugcaccgaccuggacguggcccugggcagccccaugugcgugggcaucacccccagcgccaaggccagcauccugcacgaggugagacccgugaccagcggcugcuuccccaucaugcacgacagaaccaagaucagacagcugcccaaccugcugagaggcuacgagaagaucagacugagcacccagaacgugaucaacaucgagaaggcccccggcggccccuacagacugggcaccagcggcagcugccccaacgccaccagcagaagcggcuucuucgccaccauggccugggccgugcccagagacaacaacaagaccgccaccaacccccugaccguggaggugccccacaucugcaccaaggaggaggaccagaucaccguguggggcuuccacagcgacaacaagacccagaugaagaaccuguacggcgacagcaacccccagaaguucaccagcagcgccaacggcgugaccacccacuacgugagccagaucggcggcuuccccgaccagaccgaggacggcggccugccccagagcggcagaaucgugguggacuacauggugcagaagcccggcaagaccggcaccaucguguaccagagaggcauccugcugccccagaagguguggugcgccagcggcagaagcaaggugaucaagggcagccugccccugaucggcgaggccgacugccugcacgagaaguacggcggccugaacaagagcaagcccuacuacaccggcgagcacgccaaggccaucggcaacugccccaucugggugaagaccccccugaagcuggccaacggcaccaaguacagaccccccgccaagcugcugaaggagagaggcuucuucggcgccaucgccggcuuccuggagggcggcugggagggcaugaucgccggcuggcacggcuacaccagccacggcgcccacggcguggccguggccgccgaccugaagagcacccaggaggccaucaacaagaucaccaagaaccugaacagccugagcgagcuggaggugaagaaccugcagagacugagcggcgccauggacgagcugcacaacgagauccuggagcuggacgagaagguggacgaccugagagccgacaccaucagcagccagaucgagcuggccgugcugcugagcaacgagggcaucaucaacagcgaggacgagcaccugcuggcccuggagagaaagcugaagaagaugcugggccccagcgccguggacaucggcaacggcugcuucgagaccaagcacaagugcaaccagaccugccuggacagaaucgccgccggcaccuucaacgccggcgaguucagccugcccaccuucgacagccugaacaucaccgccgccagccugaacgacgacggccuggacaaccacaccauccugcuguacuacagcaccgccgccagcagccuggccgugacccugaugaucgccaucuucaucguguacaugaucagcagagacaacgugagcugcagcaucugccuguga

SEQ ID NO: 186821 - RNA, 1755 nt, Artificial Sequence
  derived and/or modified CDS sequence (opt4) from hemagglutinin__InfluenzaB__AFJ76235
augaaggccaucaucgugcugcugaugguggugaccagcaacgccgacagaaucugcaccggcaucaccagcagcaacagcccccacguggugaagaccgccacccagggcgaggugaacgugaccggcgugaucccccugaccaccacccccaccaagagccacuucgccaaccugaagggcaccaagaccagaggcaagcugugccccaccugccugaacugcaccgaccuggacguggcccugggcagccccaugugcgugggcaucacccccagcgccaaggccagcauccugcacgaggugagacccgugaccagcagaugcuuccccaucaugcacgacagaaccaagaucagacagcugcccaaccugcugagaggcuacgagaagaucagacugagcacccagaacgugaucaacaucgagaaggcccccggcggccccuacagacugggcaccagcggcagcugccccaacgccaccagcagaagcggcuucuucgccaccauggccugggccgugcccagagacaacaacaagaccgccaccaacccccugaccguggaggugccccacaucugcaccaaggaggaggaccagaucaccguguggggcuuccacagcgacaacaagacccagaugaagaaccuguacggcgacagcaacccccagaaguucaccagcagcgccaacggcgugaccacccacuacgugagccagaucggcggcuuccccgaccagaccgaggacggcggccugccccagagcggcagaaucgugguggacuacauggugcagaagcccggcaagaccggcaccaucguguaccagagaggcauccugcugccccagaagguguggugcgccagcggcagaagcaaggugaucaagggcagccugccccugaucggcgaggccgacugccugcacgagaaguacggcggccugaacaagagcaagcccuacuacaccggcgagcacgccaaggccaucggcaacugccccaucugggugaagaccccccugaagcuggccaacggcaccaaguacagaccccccgccaagcugcugaaggagagaggcuucuucggcgccaucgccggcuuccuggagggcggcugggagggcaugaucgccggcuggcacggcuacaccagccacggcgcccacggcguggccguggccgccgaccugaagagcacccaggaggccaucaacaagaucaccaagaaccugaacagccugagcgagcuggaggugaagaaccugcagagacugagcggcgccauggacgagcugcacaacgagauccuggagcuggacgagaagguggacgaccugagagccgacaccaucagcagccagaucgagcuggccgugcugcugagcaacgagggcaucaucaacagcgaggacgagcaccugcuggcccuggagagaaagcugaagaagaugcugggccccagcgccguggacaucggcaacggcugcuucgagaccaagcacaagugcaaccagaccugccuggacagaaucgccgccggcaccuucaacgccggcgaguucagccugcccaccuucgacagccugaacaucaccgccgccagccugaacgacgacggccuggacaaccacaccauccugcuguacuacagcaccgccgccagcagccuggccgugacccugaugaucgccaucuucaucguguacaugaucagcagagacaacgugagcugcagcaucugccuguga

SEQ ID NO: 186822 - RNA, 1755 nt, Artificial Sequence; identical to SEQ ID NO: 186820
  derived and/or modified CDS sequence (opt4) from hemagglutinin__InfluenzaB__AFJ76246

SEQ ID NO: 186823 - RNA, 1758 nt, Artificial Sequence; identical to SEQ ID NO: 186574
  derived and/or modified CDS sequence (opt4) from hemagglutinin__InfluenzaB__AFJ76268

SEQ ID NO: 186824 - RNA, 1758 nt, Artificial Sequence; identical to SEQ ID NO: 186625
  derived and/or modified CDS sequence (opt4) from hemagglutinin__InfluenzaB__AFJ76301

SEQ ID NO: 186825 - RNA, 1755 nt, Artificial Sequence; identical to SEQ ID NO: 186486
  derived and/or modified CDS sequence (opt4) from hemagglutinin__InfluenzaB__AFJ76323

SEQ ID NO: 186826 - RNA, 1758 nt, Artificial Sequence
  derived and/or modified CDS sequence (opt4) from hemagglutinin__InfluenzaB__AFJ76334
augaaggccaucaucgugcugcugaugguggugaccagcaacgccgacagaaucugcaccggcaucaccagcagcaacagcccccacguggugaagaccgccacccagggcgaggugaacgugaccggcgugaucccccugaccaccacccccaccaagagccacuucgccaaccugaagggcaccgagaccagaggcaagcugugccccaagugccugaacugcaccgaccuggacguggcccugggcagacccaagugcaccggcaacauccccagcgccagagugagcauccugcacgaggugagacccgugaccagcggcugcuuccccaucaugcacgacagaaccaagaucagacagcugcccaaccugcugagaggcuacgagcacaucagacugagcacccacaacgugaucaacgccgagaacgcccccggcggccccuacaagaucggcaccagcggcagcugccccaacgugaccaacggcaacggcuucuucgccaccauggccugggccgugcccaagaacgacaacaacaagaccgccaccaacagccugaccaucgaggugcccuacaucugcaccgagggcgaggaccagaucaccguguggggcuuccacagcgacagcgagacccagauggccaagcuguacggcgacagcaagccccagaaguucaccagcagcgccaacggcgugaccacccacuacgugagccagaucggcggcuuccccaaccagaccgaggacggcggccugccccagagcggcagaaucgugguggacuacauggugcagaagagcggcaagaccggcaccaucaccuaccagagaggcauccugcugccccagaagguguggugcgccagcggcagaagcaaggugaucaagggcagccugccccugaucggcgaggccgacugccugcacgagaaguacggcggccugaacaagagcaagcccuacuacaccggcgagcacgccaaggccaucggcaacugccccaucugggugaagaccccccugaagcuggccaacggcaccaaguacagaccccccgccaagcugcugaaggagagaggcuucuucggcgccaucgccggcuuccuggagggcggcuggaagggcaugaucgccggcuggcacggcuacaccagccacggcgcccacggcguggccguggccgccgaccugaagagcacccaggaggccaucaacaagaucaccaagaaccugaacagccugagcgagcuggaggugaagaaccugcagagacugagcggcgccauggacgagcugcacaacgagauccuggagcuggacgagaagguggacgaccugagagccgacaccaucagcagccagaucgagcuggccgugcugcugagcaacgagggcaucaucaacagcgaggacgagcaccugcuggcccuggagagaaagcugaagaagaugcugggccccagcgccguggagaucggcaacggcugcuucgagaccaagcacaagugcaaccagaccugccuggacagaaucgccgccggcaccuucgacgccggcgaguucagccugcccaccuucgacagccugaacaucaccgccgccagccugaacgacgacggccuggacaaccacaccauccugcuguacuacagcaccgccgccagcagccuggccgugacccugaugaucgccguguucgugguguacauggugagcagagacaacgugagcugcagcaucugccuguga

SEQ ID NO: 186827 - RNA, 1758 nt, Artificial Sequence; identical to SEQ ID NO: 186574
  derived and/or modified CDS sequence (opt4) from hemagglutinin__InfluenzaB__AFJ77327

SEQ ID NO: 186828 - RNA, 1755 nt, Artificial Sequence; identical to SEQ ID NO: 186486
  derived and/or modified CDS sequence (opt4) from hemagglutinin__InfluenzaB__AFJ77369

SEQ ID NO: 186829 - RNA, 1755 nt, Artificial Sequence; identical to SEQ ID NO: 186486
  derived and/or modified CDS sequence (opt4) from hemagglutinin__InfluenzaB__AFJ77380

SEQ ID NO: 186830 - RNA, 1755 nt, Artificial Sequence
  derived and/or modified CDS sequence (opt4) from hemagglutinin__InfluenzaB__AFJ80139
augaaggccaucaucgugcugcugaugguggugaccagcaacgccgacagaaucugcaccggcaucaccagcagcaacagcccccacguggugaagaccgccacccagggcgaggugaacgugaccggcgugaucccccugaccaccacccccaccaagagccacuucgccaaccugaagggcaccaagaccagaggcaagcugugccccaccugccugaacugcaccgaccuggacguggcccugggcagacccaugugcgugggcaucacccccagcgccaaggccagcauccugcacgaggugagacccgugaccagcggcugcuuccccaucaugcacgacagaaccaagaucagacagcugcccaaccugcugagaggcuacgagaagaucagacugagcacccagaacgugaucaacgccgagaaggcccccggcggccccuacagacugggcaccagcggcagcugccccaacgccaccagcagaagcggcuucuucgccaccauggccugggccgugcccagagacaacaacaagaccgccaccaacccccugaccguggaggugcccuacaucugcaccaaggaggaggaccagaucaccguguggggcuuccacagcgacaacaagacccagaugaagaaccuguacggcgacagcaacccccagaaguucaccagcagcgccaacggcgugaccacccacuacgugagccagaucggcggcuuccccgaccagaccgaggacggcggccugccccagagcggcagaaucgugguggacuacauggugcagaagcccggcaagaccggcaccaucguguaccagagaggcauccugcugccccagaagguguggugcgccagcggcagaagcaaggugaucaagggcuuccugccccugaucggcgaggccgacugccugcacgagaaguacggcggccugaacaagagcaagcccuacuacaccggcgagcacgccaaggccaucggcaacugccccaucugggugaagaccccccugaagcuggccaacggcaccaaguacagaccccccgccaagcugcugaaggagagaggcuucuucggcgccaucgccggcuuccuggagggcggcugggagggcaugaucgccggcuggcacggcuacaccagccacggcgcccacggcguggccguggccgccgaccugaagagcacccaggaggccaucaacaagaucaccaagaaccugaacagccugagcgagcuggaggugaagaaccugcagagacugagcggcgccauggacgagcugcacaacgagauccuggagcuggacgagaagguggacgaccugagagccgacaccaucagcagccagaucgagcuggccgugcugcugagcaacgagggcaucaucaacagcgaggacgagcaccugcuggcccuggagagaaagcugaagaagaugcugggccccagcgccguggacaucggcaacggcugcuucgagaccaagcacaagugcaaccagaccugccuggacagaaucgccgccggcaccuucaacgccggcgaguucagccugcccaccuucgacagccugaacaucaccgccgccagccugaacgacgacggccuggacaaccacaccauccugcuguacuacagcaccgccgccagcagccuggccgugacccugaugaucgccaucuucaucguguacaugaucagcagagacaacgugagcugcagcaucugccuguga

SEQ ID NO: 186831 - RNA, 1755 nt, Artificial Sequence
  derived and/or modified CDS sequence (opt4) from hemagglutinin__InfluenzaB__AFJ80150
augaaggccaucaucgugcugcugaugguggugaccagcaacgccgacagaaucugcaccggcaucaccagcagcaacagcccccacguggugaagaccgccacccagggcgaggugaacgugaccggcgugaucccccugaccaccacccccaccaagagccacuucgccaaccugaagggcaccaagaccagaggcaagcugugccccaccugccugaacugcaccgaccuggacguggcccugggcagacccaugugcgugggcaucacccccagcgccaaggccagcauccugcacgaggugagacccgugaccagcggcugcuuccccaucaugcacgacagaaccaagaucagacagcugcccaaccugcugagaggcuacgagaagaucagacugagcacccagaacgugaucaacgccgagaaggcccccggcggccccuacagacugggcaccagcggcagcugccccaacgccaccagcagaagcggcuucuucgccaccauggccugggccgugcccagagacaacaacaagaccgccaccaacccccugaccguggaggugcccuacaucugcaccaaggaggaggaccagaucaccguguggggcuuccacagcgacaacaagacccagaugaagaaccuguacggcgacagcaacccccagaaguucaccagcagcgccaacggcgugaccacccacuacgugagccagaucggcggcuuccccgaccagaccgaggacggcggccugccccagagcggcagaaucgugguggacuacauggugcagaagcccggcaagaccggcaccaucguguaccagagaggcauccugcugccccagaagguguggugcgccagcggcagaagcaaggugaucaagggcagccugccccugaucggcgaggccgacugccugcacgagaaguacggcggccugaacaagagcaagcccuacuacaccggcgagcacgccaaggccaucggcaacugccccaucugggugaagaccccccugaagcuggccaacggcaccaaguacagaccccccgccaagcugcugaaggagagaggcuucuucggcgccaucgccggcuuccuggagggcggcugggagggcaugaucgccggcuggcacggcuacaccagccacggcgcccacggcguggccguggccgccgaccugaagagcacccaggaggccaucaacaagaucaccaagaaccugaacagccugagcgagcuggaggugaagaaccugcagagacugagcggcgccauggacgagcugcacaacgagauccuggagcuggacgagaagguggacgaccugagagccgacaccaucagcagccagaucgagcuggccgugcugcugagcaacgagggcaucaucaacagcgaggacgagcaccugcuggcccuggagagaaagcugaagaagaugcugggccccagcgccguggacaucggcaacggcugcuucgagaccaagcacaagugcaaccagaccugccuggacagaaucgccgccggcaccuucaacgccggcgaguucagccugcccaccuucgacagccugaacaucaccgccgccagccugaacgacgacggccuggacaaccacaccauccugcuguacuacagcaccgccgccagcagccuggccgugacccugaugaucgccaucuucaucguguacaugaucagcagagacaacgugagcugcagcaucugccuguga

SEQ ID NO: 186832 - RNA, 1755 nt, Artificial Sequence
  derived and/or modified CDS sequence (opt4) from hemagglutinin__InfluenzaB__AFJ80161
augaaggccaucaucgugcugcugaugguggugaccagcaacgccgacagaaucugcaccggcaucaccagcagcaacagcccccacguggugaagaccgccacccagggcgaggugaacgugaccggcgccaucccccugaccaccacccccaccaagagccacuucgccaaccugaagggcaccaagaccagaggcaagcugugccccaccugccugaacugcaccgaccuggacguggcccugggcagacccaugugcgugggcaucacccccagcgccaaggccagcauccugcacgaggugagacccgugaccagcggcugcuuccccaucaugcacgacagaaccaagaucagacagcugcccaaccugcugagaggcuacgagaagaucagacugagcacccagaacgugaucaacgccgagaaggcccccggcggccccuacagacugggcaccagcggcagcugccccaacgccaccagcagaagcggcuucuucgccaccauggccugggccgugcccagagacaacaacaagaccgccaccaacccccugaccguggaggugccccacaucugcaccaaggaggaggaccagaucaccguguggggcuuccacagcgacaacaagacccagaugaagaaccuguacggcgacagcaacccccagaaguucaccagcagcgccaacggcaucaccacccacuacgugagccagaucggcggcuuccccgaccagaccgaggacggcggccugccccagagcggcagaaucgugguggacuacauggugcagaagcccggcaagaccggcaccaucguguaccagagaggcauccugcugccccagaagguguggugcgccagcggcagaagcaaggugaucaagggcagccugccccugaucggcgaggccgacugccugcacgagaaguacggcggccugaacaagagcaagcccuacuacaccggcgagcacgccaaggccaucggcaacugccccaucugggugaagaccccccugaagcuggccaacggcaccaaguacagaccccccgccaagcugcugaaggagagaggcuucuucggcgccaucgccggcuuccuggagggcggcugggagggcaugaucgccggcuggcacggcuacaccagccacggcgcccacggcguggccguggccgccgaccugaagagcacccaggaggccaucaacaagaucaccaagaaccugaacagccugagcgagcuggaggugaagaaccugcagagacugagcggcgccauggacgagcugcacaacgagauccuggagcuggacgagaagguggacgaccugagagccgacaccaucagcagccagaucgagcuggccgugcugcugagcaacgagggcaucaucaacagcgaggacgagcaccugcuggcccuggagagaaagcugaagaagaugcugggccccagcgccguggacaucggcaacggcugcuucgagaccaagcacaagugcaaccagaccugccuggacagaaucgccgccggcaccuucaacgccggcgaguucagccugcccaccuucgacagccugaacaucaccgccgccagccugaacgacgacggccuggacaaccacaccauccugcuguacuacagcaccgccgccagcagccuggccgugacccugaugaucgccaucuucaucguguacaugaucuucagagacaacgugagcugcagcaucugccuguga

SEQ ID NO: 186833 - RNA, 1755 nt, Artificial Sequence
  derived and/or modified CDS sequence (opt4) from hemagglutinin__InfluenzaB__AFJ80172
augaaggccaucaucgugcugcugaugguggugaccagcaacgccgacagaaucugcaccggcaucaccagcagcaacagcccccacguggugaagaccgccacccagggcgaggugaacgugaccggcgugaucccccugaccaccacccccaccaagagccacuucgccaaccugaagggcaccaagaccagaggcaagcugugccccaccugccugaacugcaccgaccuggacguggcccugggcagacccaugugcgugggcaucacccccagcgccaaggccagcauccugcacgaggugagacccgugaccagcggcugcuuccccaucaugcacgacagaaccaagaucagacagcugcccaaccugcugagaggcuacgagaagaucagacugagcacccagaacgugaucaacgccgagaaggcccccggcggccccuacagacugggcaccagcggcagcugccccaacgccaccagcagaagcggcuucuucgccaccauggccugggccgugcccagagacaacaacaagaccgccaccaacccccugaccguggaggugcccuacaucugcaccaaggaggaggaccagaucaccguguggggcuuccacagcgacaacaagacccagaugaagaaccuguacggcgacagcaacccccagaaguucaccagcagcgccaacggcgugaccacccacuacgugagccagaucggcgacuuccccgaccagaccgaggacggcggccugccccagagcggcagaaucgugguggacuacauggugcagaagcccggcaagaccggcaccaucguguaccagagaggcauccugcugccccagaagguguggugcgccagcggcagaagcaaggugaucaagggcagccugccccugaucggcgaggccgacugccugcacgagaaguacggcggccugaacaagagcaagcccuacuacaccggcgagcacgccaaggccaucggcaacugccccaucugggugaagaccccccugaagcuggccaacggcaccaaguacagaccccccgccaagcugcugaaggagagaggcuucuucggcgccaucgccggcuuccuggagggcggcugggagggcaugaucgccggcuggcacggcuacaccagccacggcgcccacggcguggccguggccgccgaccugaagagcacccaggaggccaucaacaagaucaccaagaaccugaacagccugagcgagcuggaggugaagaaccugcagagacugagcggcgccauggacgagcugcacaacgagauccuggagcuggacgagaagguggacgaccugagagccgacaccaucagcagccagaucgagcuggccgugcugcugagcaacgagggcaucaucaacagcgaggacgagcaccugcuggcccuggagagaaagcugaagaagaugcugggccccagcgccguggacaucggcaacggcugcuucgagaccaagcacaagugcaaccagaccugccuggacagaaucgccgccggcaccuucaacgccggcgaguucagccugcccaccuucgacagccugaacaucaccgccgccagccugaacgacgacggccuggacaaccacaccauccugcuguacuacagcaccgccgccagcagccuggccgugacccugaugaucgccaucuucaucguguacaugaucagcagagacaacgugagcugcagcaucugccuguga

SEQ ID NO: 186834 - RNA, 1755 nt, Artificial Sequence; identical to SEQ ID NO: 186820
  derived and/or modified CDS sequence (opt4) from hemagglutinin__InfluenzaB__AFJ80183

SEQ ID NO: 186835 - RNA, 1755 nt, Artificial Sequence; identical to SEQ ID NO: 186831
  derived and/or modified CDS sequence (opt4) from hemagglutinin__InfluenzaB__AFJ80194

SEQ ID NO: 186836 - RNA, 1755 nt, Artificial Sequence; identical to SEQ ID NO: 186820
  derived and/or modified CDS sequence (opt4) from hemagglutinin__InfluenzaB__AFJ80205

SEQ ID NO: 186837 - RNA, 1755 nt, Artificial Sequence; identical to SEQ ID NO: 186465
  derived and/or modified CDS sequence (opt4) from hemagglutinin__InfluenzaB__AFJ80216

SEQ ID NO: 186838 - RNA, 1755 nt, Artificial Sequence; identical to SEQ ID NO: 186820
  derived and/or modified CDS sequence (opt4) from hemagglutinin__InfluenzaB__AFJ80227

SEQ ID NO: 186839 - RNA, 1758 nt, Artificial Sequence
  derived and/or modified CDS sequence (opt4) from hemagglutinin__InfluenzaB__AFJ80238
augaaggccaucaucgugcugcugaugguggugaccagcaacgccgacagaaucugcaccggcaucaccagcagcaacagcccccacguggugaagaccgccacccagggcgaggugaacgugaccggcgugaucccccugaccaccacccccaccaagagccacuucgccaaccugaagggcaccaagaccagaggcaagcugugccccaagugccugaacugcaccgaccuggacguggcccugggcagacccaagugcaccggcaacauccccagcgccaaggugagcauccugcacgaggugagacccgugaccagcggcugcuuccccaucaugcacgacagaaccaagaucagacagcugcccaaccugcugagaggcuacgagcacaucagacugagcauccacaacgugaucaacgccgagaaggcccccggcggccccuacaagaucggcaccagcggcagcugccccaacgugaccaacggcaacggcuucuucgccaccauggccugggccgugcccaagaacgacaacaacaagaccgccaccaacagccugaccaucgaggugcccuacaucugcaccgagggcgaggaccagaucaccguguggggcuuccacagcgacaacgagacccagauggccaagcuguacggcgacagcaagccccagaaguucaccagcagcgccaacggcgugaccacccacuacgugagccagaucggcggcuuccccaaccagaccgaggacggcggccugccccagagcggcagaaucgugguggacuacauggugcagaagagcggcaagaccggcaccaucaccuaccagagaggcauccugcugccccagaagguguggugcgccagcggcagaagcaaggugaucaagggcagccugccccugaucggcgaggccgacugccugcacgagaaguacggcggccugaacaagagcaagcccuacuacaccggcgagcacgccaaggccaucggcaacugccccaucugggugaagaccccccugaagcuggccaacggcaccaaguacagaccccccgccaagcugcugaaggagagaggcuucuucggcgccaucgccggcuuccuggagggcggcugggagggcaugaucgccggcuggcacggcuacaccagccacggcgcccacggcguggccguggccgccgaccugaagagcacccaggaggccaucaacaagaucaccaagaaccugaacagccugagcgagcuggaggugaagaaccugcagagacugagcggcgccauggacgagcugcacaacgagauccuggagcuggacgagaagguggacgaccugagagccgacaccaucagcagccagaucgagcuggccgugcugcugagcaacgagggcaucaucaacagcgaggacgagcaccugcuggcccuggagagaaagcugaagaagaugcugggccccagcgccguggagaucggcaacggcugcuucgagaccaagcacaagugcaaccagaccugccuggacagaaucgccgccggcaccuucgacgccggcgaguucagccugcccaccuucgacagccugaacaucaccgccgccagccugaacgacgacggccuggacaaccacaccauccugcuguacuacagcaccgccgccagcagccuggccgugacccugaugaucgccaucuucgugguguacauggugagcagagacaacgugagcugcagcaucugccuguga

SEQ ID NO: 186840 - RNA, 1755 nt, Artificial Sequence
  derived and/or modified CDS sequence (opt4) from hemagglutinin__InfluenzaB__AFJ80656
augaaggccaucaucgugcugcugaugguggugaccagcaacgccgacagaaucugcaccggcaucaccagcagcaacagcccccacguggugagaaccgccacccagggcgaggugaacgugaccggcgugaucccccugaccaccacccccaccaagagccacuucgccaaccugaagggcaccaagaccagaggcaagcugugccccaccugccugaacugcaccgaccuggacguggcccugggcagacccaugugcgugggcaucacccccagcgccaaggccagcauccugcacgaggugagacccgugaccagcggcugcuuccccaucaugcacgacagaaccaagaucagacagcugcccaaccugcugagaggcuacgagaagaucagacugagcacccagaacgugaucaacgccgagaaggcccccggcggccccuacagacugggcaccagcggcagcugccccaacgccaccagcagaagcggcuucuucgccaccauggccugggccgugcccagagacaacaacaagaccgccaccaacccccugaccguggaggugccccacaucugcaccaaggaggaggaccagaucaccguguggggcuuccacagcgacaacaagacccagaugaagaaccuguacggcgacagcaacccccagaaguucaccagcagcgccaacggcgugaccacccacuacgugagccagaucggcggcuuccccgaccagaccgaggacggcggccugccccagagcggcagaaucgugguggacuacauggugcagaagcccggcaagaccggcaccaucguguaccagagaggcauccugcugccccagaagguguggugcgccagcggcagaagcaaggugaucaagggcagccugccccugaucggcgaggccgacugccugcacgagaaguacggcggccugaacaagagcaagcccuacuacaccggcgagcacgccaaggccaucggcaacugccccaucugggugaagaccccccugaagcuggccaacggcaccaaguacagaccccccgccaagcugcugaaggagagaggcuucuucggcgccaucgccggcuuccuggagggcggcugggagggcaugaucgccggcuggcacggcuacaccagccacggcgcccacggcguggccguggccgccgaccugaagagcacccaggaggccaucaacaagaucaccaagaaccugaacagccugagcgagcuggaggugaagaaccugcagagacugagcggcgccauggacgagcugcacaacgagauccuggagcuggacgagaagguggacgaccugagagccgacaccaucagcagccagaucgagcuggccgugcugcugagcaacgagggcaucaucaacagcgaggacgagcaccugcuggcccuggagagaaagcugaagaagaugcugggccccagcgccguggacaucggcaacggcugcuucgagaccaagcacaagugcaaccagaccugccuggacagaaucgccgccggcaccuucaacgccggcgaguucagccugcccaccuucgacagccugaacaucaccgccgccagccugaacgacgacggccuggacaaccacaccauccugcuguacuacagcaccgccgccagcagccuggccgugacccugaugaucgccaucuucaucguguacaugaucagcagagacaacgugagcugcagcaucugccuguga

SEQ ID NO: 186841 - RNA, 1755 nt, Artificial Sequence; identical to SEQ ID NO: 186820
  derived and/or modified CDS sequence (opt4) from hemagglutinin__InfluenzaB__AFJ80667

SEQ ID NO: 186842 - RNA, 1755 nt, Artificial Sequence; identical to SEQ ID NO: 186820
  derived and/or modified CDS sequence (opt4) from hemagglutinin__InfluenzaB__AFJ80678

SEQ ID NO: 186843 - RNA, 1755 nt, Artificial Sequence; identical to SEQ ID NO: 186820
  derived and/or modified CDS sequence (opt4) from hemagglutinin__InfluenzaB__AFJ80689

SEQ ID NO: 186844 - RNA, 1755 nt, Artificial Sequence
  derived and/or modified CDS sequence (opt4) from hemagglutinin__InfluenzaB__AFJ80711
augaaggccaucaucgugcugcugaugguggugaccagcaacgccgacagaaucugcaccggcaucaccagcagcaacagcccccacguggugaagaccgccacccagggcgaggugaacgugaccggcgugaucccccugaccaccacccccaucaagagcuacuucgccaaccugaagggcaccaagaccagaggcaagcugugccccgacugccugaacugcaccgaccuggacguggcccugggcagacccaugugcgugggcaccacccccagcgccaaggccagcauccugcacgaggugagacccgugaccagcggcugcuuccccaucaugcacgacagaaccaagaucagacagcugcccaaccugcugagaggcuacgagaacaucagacugagcacccagaacgugaucgacgccgagaaggcccccggcggccccuacagacugggcaccagcggcagcugccccaacgccaccagcaagagcggcuucuucgccaccauggccugggccgugcccaaggacaacaacaagaacgccaccaacccccugaccguggaggugcccuacgugugcaccgagggcgaggaccagaucaccguguggggcuuccacagcgacaacaagacccagaugaagaaccuguacggcgacagcaacccccagaaguucaccagcagcgccaacggcgugaccacccacuacgugagccagaucggcggcuuccccgaccagaccgaggacggcggccugccccagagcggcagaaucgugguggacuacauggugcagaagcccggcaagaccggcaccaucguguaccagagaggcgugcugcugccccagaagguguggugcgccagcggcagaagcaaggugaucaagggcagccugccccugaucggcgaggccgacugccugcacgagaaguacggcggccugaacaagagcaagcccuacuacaccggcgagcacgccaaggccaucggcaacugccccaucugggugaagaccccccugaagcuggccaacggcaccaaguacagaccccccgccaagcugcugaaggagagaggcuucuucggcgccaucgccggcuuccuggagggcggcugggagggcaugaucgccggcuggcacggcuacaccagccacggcgcccacggcguggccguggccgccgaccugaagagcacccaggaggccaucaacaagaucaccaagaaccugaacagccugagcgagcuggaggugaagaaccugcagagacugagcggcgccauggacgagcugcacaacgagauccuggagcuggacgagaagguggacgaccugagagccgacaccaucagcagccagaucgagcuggccgugcugcugagcaacgagggcaucaucaacagcgaggacgagcaccugcuggcccuggagagaaagcugaagaagaugcugggccccagcgccguggacaucggcaacggcugcuucgagaccaagcacaagugcaaccagaccugccuggacagaaucgccgccggcaccuucaacgccggcgaguucagccugcccaccuucgacagccugaacaucaccgccgccagccugaacgacgacggccuggacaaccacaccauccugcuguacuacagcaccgccgccagcagccuggccgugacccugaugcuggccaucuucaucguguacauggugagcagagacaacgugagcugcagcaucugccuguga

SEQ ID NO: 186845 - RNA, 1755 nt, Artificial Sequence; identical to SEQ ID NO: 186844
  derived and/or modified CDS sequence (opt4) from hemagglutinin__InfluenzaB__AFJ80722

SEQ ID NO: 186846 - RNA, 1755 nt, Artificial Sequence
  derived and/or modified CDS sequence (opt4) from hemagglutinin__InfluenzaB__AFJ80733
augaaggccaucaucgugcugcugaugguggugaccagcaacgccgacagaaucugcaccggcaucaccagcagcaacagcccccacguggugaagaccgccacccagggcgaggugaacgugaccggcgugaucccccugaccaccacccccaccaagagcuacuucgccaaccugaagggcaccagaaccagaggcaagcugugccccgacugccugaacugcaccgaccuggacguggcccugggcagacccaugugcaugggcaccacccccagcgccaaggccagcauccugcacgaggugagacccgugaccagcggcugcuuccccaucaugcacgacagaaccaagaucagacagcugcccaaccugcugagaggcuacgagaacaucagacugagcacccagaacgugaucgacgccgagaaggcccccggcggccccuacagacugggcaccagcggcagcugccccgacgccaccaacaagagcggcuucuucgccaccauggccugggccgugcccaaggacaacaacaagaacgccaccaacccccugaccguggaggugcccuacaucugcaccgagggcgaggaccagaucaccguguggggcuuccacagcgacaacaagacccagaugaagaaccuguacggcgacagcaacccccagaaguucaccagcagcgccaacggcgugaccacccacuacgugagccagaucggcggcuuccccgaccagaccgaggacggcggccugccccagagcggcagaaucgugguggacuacaugaugcagaagcccggcaagaccggcaccaucguguaccagagaggcgugcugcugccccagaagguguggugcgccagcggcagaagcaaggugaucaagggcagccugccccugaucggcgaggccgacugccugcacgagaaguacggcggccugaacaagagcaagcccuacuacaccggcgagcacgccaaggccaucggcaacugccccaucugggugaagaccccccugaagcuggccaacggcaccaaguacagaccccccgccaagcugcugaaggagagaggcuucuucggcgccaucgccggcuuccuggagggcggcugggagggcaugaucgccggcuggcacggcuacaccagccacggcgcccacggcguggccguggccgccgaccugaagagcacccaggaggccaucaacaagaucaccaagaaccugaacagccugagcgagcuggaggugaagaaccugcagagacugagcggcgccauggacgagcugcacaacgagauccuggagcuggacgagaagguggacgaccugagagccgacaccaucagcagccagaucgagcuggccgugcugcugagcaacgagggcaucaucaacagcgaggacgagcaccugcuggcccuggagagaaagcugaagaagaugcugggccccagcgccguggacaucggcaacggcugcuucgagaccaagcacaagugcaaccagaccugccuggacagaaucgccgccggcaccuucaacgccggcgaguucagccugcccaccuucgacagccugaacaucaccgccgccagccugaacgacgacggccuggacaaccacaccauccugcuguacuacagcaccgccgccagcagccuggccgugacccugaugcuggccaucuucaucguguacauggugagcagagacaacgugagcugcagcaucugccuguga

SEQ ID NO: 186847 - RNA, 1758 nt, Artificial Sequence; identical to SEQ ID NO: 186574
  derived and/or modified CDS sequence (opt4) from hemagglutinin__InfluenzaB__AFJ80744

SEQ ID NO: 186848 - RNA, 1758 nt, Artificial Sequence; identical to SEQ ID NO: 186574
  derived and/or modified CDS sequence (opt4) from hemagglutinin__InfluenzaB__AFJ80755

SEQ ID NO: 186849 - RNA, 1758 nt, Artificial Sequence; identical to SEQ ID NO: 186574
  derived and/or modified CDS sequence (opt4) from hemagglutinin__InfluenzaB__AFJ80781

SEQ ID NO: 186850 - RNA, 1758 nt, Artificial Sequence; identical to SEQ ID NO: 186574
  derived and/or modified CDS sequence (opt4) from hemagglutinin__InfluenzaB__AFJ80792

SEQ ID NO: 186851 - RNA, 1758 nt, Artificial Sequence; identical to SEQ ID NO: 186574
  derived and/or modified CDS sequence (opt4) from hemagglutinin__InfluenzaB__AFJ80803

SEQ ID NO: 186852 - RNA, 1758 nt, Artificial Sequence; identical to SEQ ID NO: 186574
  derived and/or modified CDS sequence (opt4) from hemagglutinin__InfluenzaB__AFJ80814

SEQ ID NO: 186853 - RNA, 1758 nt, Artificial Sequence
  derived and/or modified CDS sequence (opt4) from hemagglutinin__InfluenzaB__AFJ80825
augaaggccaucaucgugcugcugaugguggugaccagcaacgccgacagaaucugcaccggcaucaccagcagcaacagcccccacguggugaagaccgccacccagggcgaggugaacgugaccggcgugaucccccugaccaccacccccaccaagagccacuucgccaaccugaagggcaccgagaccagaggcaagcugugccccaagugccugaacugcaccgaccuggacguggcccugggcagacccaagugcaccggcaacauccccagcgccagagugagcauccugcacgaggugagacccaucaccagcggcugcuuccccaucaugcacgacagaaccaagaucagacagcugcccaaccugcugagaggcuacgagcacaucagacugagcacccacaacgugaucaacgccgagaacgcccccggcggccccuacaagaucggcaccagcggcagcugccccaacgugaccaacggcaacggcuucuucgccaccauggccugggccgugcccaagaacgacaacaacaagaccgccaccaacagccugaccaucgaggugcccuacaucugcaccgagggcgaggaccagaucaccguguggggcuuccacagcgacaacgagacccagauggccaagcuguacggcgacagcaagccccagaaguucaccagcagcgccaacggcgugaccacccacuacgugagccagaucggcggcuuccccaaccagaccgaggacggcggccugccccagagcggcagaaucgugguggacuacauggugcagaagagcggcaagaccggcaccaucaccuaccagagaggcauccugcugccccagaagguguggugcgccagcggcagaagcaaggugaucaagggcagccugccccugaucggcgaggccgacugccugcacgagaaguacggcggccugaacaagagcaagcccuacuacaccggcgagcacgccaaggccaucggcaacugccccaucugggugaagaccccccugaagcuggccaacggcaccaaguacagaccccccgccaagcugcugaaggagagaggcuucuucggcgccaucgccggcuuccuggagggcggcugggagggcaugaucgccggcuggcacggcuacaccagccacggcgcccacggcguggccguggccgccgaccugaagagcacccaggaggccaucaacaagaucaccaagaaccugaacagccugagcgagcuggaggugaagaaccugcagagacugagcggcgccauggacgagcugcacaacgagauccuggagcuggacgagaagguggacgaccugagagccgacaccaucagcagccagaucgagcuggccgugcugcugagcaacgagggcaucaucaacagcgaggacgagcaccugcuggcccuggagagaaagcugaagaagaugcugggccccagcgccguggagaucggcaacggcugcuucgagaccaagcacaagugcaaccagaccugccuggacagaaucgccgccggcaccuucgacgccggcgaguucagccugcccaccuucgacagccugaacaucaccgccgccagccugaacgacgacggccuggacaaccacaccauccugcuguacuacagcaccgccgccagcagccuggccgugacccugaugaucgccaucuucgugguguacauggugagcagagacaacgugagcugcagcaucugccuguga

SEQ ID NO: 186854 - RNA, 1758 nt, Artificial Sequence; identical to SEQ ID NO: 186574
  derived and/or modified CDS sequence (opt4) from hemagglutinin__InfluenzaB__AFJ80836

SEQ ID NO: 186855 - RNA, 1758 nt, Artificial Sequence; identical to SEQ ID NO: 186642
  derived and/or modified CDS sequence (opt4) from hemagglutinin__InfluenzaB__AFJ80847

SEQ ID NO: 186856 - RNA, 1758 nt, Artificial Sequence; identical to SEQ ID NO: 186574
  derived and/or modified CDS sequence (opt4) from hemagglutinin__InfluenzaB__AFJ80858

SEQ ID NO: 186857 - RNA, 1758 nt, Artificial Sequence; identical to SEQ ID NO: 186574
  derived and/or modified CDS sequence (opt4) from hemagglutinin__InfluenzaB__AFJ80869

SEQ ID NO: 186858 - RNA, 1758 nt, Artificial Sequence; identical to SEQ ID NO: 186574
  derived and/or modified CDS sequence (opt4) from hemagglutinin__InfluenzaB__AFJ80880

SEQ ID NO: 186859 - RNA, 1758 nt, Artificial Sequence; identical to SEQ ID NO: 186625
  derived and/or modified CDS sequence (opt4) from hemagglutinin__InfluenzaB__AFJ80891

SEQ ID NO: 186860 - RNA, 1758 nt, Artificial Sequence; identical to SEQ ID NO: 186625
  derived and/or modified CDS sequence (opt4) from hemagglutinin__InfluenzaB__AFJ80902

SEQ ID NO: 186861 - RNA, 1758 nt, Artificial Sequence; identical to SEQ ID NO: 186574
  derived and/or modified CDS sequence (opt4) from hemagglutinin__InfluenzaB__AFJ80913

SEQ ID NO: 186862 - RNA, 1758 nt, Artificial Sequence
  derived and/or modified CDS sequence (opt4) from hemagglutinin__InfluenzaB__AFJ80924
augaaggccaucaucgugcugcugaugguggugaccagcaacgccgacagaaucugcaccggcaucaccagcagcaacagcccccacguggugaagaccgccacccagggcgaggugaacgugaccggcgugaucccccugaccaccacccccaccaagagccacuucgccaaccugaagggcaccgagaccagaggcaagcugugccccaagugccugaacugcaccgaccuggacguggcccugggcagacccaagugcaccggcaacauccccagcgccagagugagcauccugcacgaggugagacccgugaccagcggcugcuuccccaucaugcacgacagaaccaagaucagacagcugcccaaccugcugagaggcuacgagcacaucagacugagcacccacaacgugaucaacgccgagaacgcccccggcggccccuacaagaucggcaccagcggcagcugccccaacgugaccaacggcaacggcuucuucgccaccauggccugggccgugcccaagaacgacaacaacaagaccgccaccaacagccugaccaucgaggugcccuacaucugcgccgagggcgaggaccagaucaccguguggggcuuccacagcgacaacgagacccagauggccaagcuguacggcgacagcaagccccagaaguucaccagcagcgccaacggcgugaccacccacuacgugagccagaucggcggcuuccccaaccagaccgaggacggcggccugccccagagcggcagaaucgugguggacuacauggugcagaagagcggcaagaccggcaccaucaccuaccagagaggcauccugcugccccagaagguguggugcgccagcggcagaagcaaggugaucaagggcagccugccccugaucggcgaggccgacugccugcacgagaaguacggcggccugaacaagagcaagcccuacuacaccggcgagcacgccaaggccaucggcaacugccccaucugggugaagaccccccugaagcuggccaacggcaccaaguacagaccccccgccaagcugcugaaggagagaggcuucuucggcgccaucgccggcuuccuggagggcggcugggagggcaugaucgccggcuggcacggcuacaccagccacggcgcccacggcguggccguggccgccgaccugaagagcacccaggaggccaucaacaagaucaccaagaaccugaacagccugagcgagcuggaggugaagaaccugcagagacugagcggcgccauggacgagcugcacaacgagauccuggagcuggacgagaagguggacgaccugagagccgacaccaucagcagccagaucgagcuggccgugcugcugagcaacgagggcaucaucaacagcgaggacgagcaccugcuggcccuggagagaaagcugaagaagaugcugggccccagcgccguggagaucggcaacggcugcuucgagaccaagcacaagugcaaccagaccugccuggacagaaucgccgccggcaccuucgacgccggcgaguucagccugcccaccuucgacagccugaacaucaccgccgccagccugaacgacgacggccuggacaaccacaccauccugcuguacuacagcaccgccgccagcagccuggccgugacccugaugaucgccaucuucgugguguacauggugagcagagacaacgugagcugcagcaucugccuguga

SEQ ID NO: 186863 - RNA, 1758 nt, Artificial Sequence; identical to SEQ ID NO: 186625
  derived and/or modified CDS sequence (opt4) from hemagglutinin__InfluenzaB__AFJ80935

SEQ ID NO: 186864 - RNA, 1755 nt, Artificial Sequence; identical to SEQ ID NO: 186486
  derived and/or modified CDS sequence (opt4) from hemagglutinin__InfluenzaB__AFJ80946

SEQ ID NO: 186865 - RNA, 1758 nt, Artificial Sequence
  derived and/or modified CDS sequence (opt4) from hemagglutinin__InfluenzaB__AFJ80957
augaaggccaucaucgugcugcugaugguggccaccagcaacgccgacagaaucugcaccggcaucaccagcagcaacagcccccacguggugaagaccgccacccagggcgaggugaacgugaccggcgugaucccccugaccaccacccccaccaagagccacuucgccaaccugaagggcaccgagaccagaggcaagcugugccccaagugccugaacugcaccgaccuggacguggcccugggcagacccaagugcaccggcaacauccccagcgccagagugagcauccugcacgaggugagacccgugaccagcggcugcuuccccaucaugcacgacagaaccaagaucagacagcugcccaaccugcugagaggcuacgagcacaucagacugagcacccacaacgugaucaacgccgagaacgcccccggcggccccuacaagaucggcaccagcggcagcugccccaacgugaccaacggcaacggcuucuucgccaccauggccugggccgugcccaagaacgacaacaacaagaccgccaccaacagccugaccaucgaggugcccuacaucugcaccgagggcgaggaccagaucaccguguggggcuuccacagcgacaacgagacccagauggccaagcuguacggcgacagcaagccccagaaguucaccagcagcgccaacggcgugaccacccacuacgugagccagaucggcggcuuccccaaccagaccgaggacggcggccugccccagagcggcagaaucgugguggacuacauggugcagaagagcggcaagaccggcaccaucaccuaccagagaggcauccugcugccccagaagguguggugcgccagcggcagaagcaaggugaucaagggcagccugccccugaucggcgaggccgacugccugcacgagaaguacggcggccugaacaagagcaagcccuacuacaccggcgagcacgccaaggccaucggcaacugccccaucugggugaagaccccccugaagcuggccaacggcaccaaguacagaccccccgccaagcugcugaaggagagaggcuucuucggcgccaucgccggcuuccuggagggcggcugggagggcaugaucgccggcuggcacggcuacaccagccacggcgcccacggcguggccguggccgccgaccugaagagcacccaggaggccaucaacaagaucaccaagaaccugaacagccugagcgagcuggaggugaagaaccugcagagacugagcggcgccauggacgagcugcacaacgagauccuggagcuggacgagaagguggacgaccugagagccgacaccaucagcagccagaucgagcuggccgugcugcugagcaacgagggcaucaucaacagcgaggacgagcaccugcuggcccuggagagaaagcugaagaagaugcugggccccagcgccguggagaucggcaacggcugcuucgagaccaagcacaagugcaaccagaccugccuggacagaaucgccgccggcaccuucaacgccggcgaguucagccugcccaccuucgacagccugaacaucaccgccgccagccugaacgacgacggccuggacaaccacaccauccugcuguacuacagcaccgccgccagcagccuggccgugacccugaugaucgccaucuucgugguguacauggugagcagagacaacgugagcugcagcaucugccuguga

SEQ ID NO: 186866 - RNA, 1755 nt, Artificial Sequence; identical to SEQ ID NO: 186486
  derived and/or modified CDS sequence (opt4) from hemagglutinin__InfluenzaB__AFJ80968

SEQ ID NO: 186867 - RNA, 1755 nt, Artificial Sequence; identical to SEQ ID NO: 186486
  derived and/or modified CDS sequence (opt4) from hemagglutinin__InfluenzaB__AFJ80979

SEQ ID NO: 186868 - RNA, 1755 nt, Artificial Sequence
  derived and/or modified CDS sequence (opt4) from hemagglutinin__InfluenzaB__AFJ80990
augaaggccaucaucgugcugcugaugguggugaccagcaacgccgacagaaucugcaccggcaucaccagcagcaacagcccccacguggugaagaccgccacccagggcgaggugaacgugaccggcgugaucccccugaccaccacccccaccaagagcuacuucgccaaccugaagggcaccagaaccagaggcaagcugugccccgacugccugaacugcaccgaccuggacguggcccugggcagacccaugugcgugggcaccacccccagcgccgaggccagcauccugcacgaggugagacccgugaccagcggcugcuuccccaucaugcacgacagaaccaagaucagacagcugcccaaccugcugagaggcuacgagaacaucagacugagcacccagaacgugaucgacgccgagaaggcccccggcggccccuacagacugggcaccagcggcagcugccccaacgccaccaacaagagcggcuucuucgccaccauggccugggccgugcccaaggacaacaacaagaacgccaccaacccccugaccguggaggugcccuacaucugcaccgagggcgaggaccagaucaccguguggggcuuccacagcgacaacaagacccagaugaagaaccuguacggcgacagcaacccccagaaguucaccagcagcgccaacggcgugaccacccacuacgugagccagaucggcggcuuccccgaccagaccgaggacggcggccugccccagagcggcagaaucgugguggacuacaugaugcagaagcccggcaagaccggcaccaucguguaccagagaggcgugcugcugccccagaagguguggugcgccagcggcagaagcaaggugaucaagggcagccugccccugaucggcgaggccgacugccugcacgagaaguacggcggccugaacaagagcaagcccuacuacaccggcgagcacgccaaggccaucggcaacugccccaucugggugaagaccccccugaagcuggccaacggcaccaaguacagaccccccgccaagcugcugaaggagagaggcuucuucggcgccaucgccggcuuccuggagggcggcugggagggcaugaucgccggcuggcacggcuacaccagccacggcgcccacggcguggccguggccgccgaccugaagagcacccaggaggccaucaacaagaucaccaagaaccugaacagccugagcgagcuggaggugaagaaccugcagagacugagcggcgccauggacgagcugcacaacgagauccuggagcuggacgagaagguggacgaccugagagccgacaccaucagcagccagaucgagcuggccgugcugcugagcaacgagggcaucaucaacagcgaggacgagcaccugcuggcccuggagagaaagcugaagaagaugcugggccccagcgccguggacaucggcaacggcugcuucgagaccaagcacaagugcaaccagaccugccuggacagaaucgccgccggcaccuucaacgccggcgaguucagccugcccaccuucgacagccugaacaucaccgccgccagccugaacgacgacggccuggacaaccacaccauccugcuguacuacagcaccgccgccagcagccuggccgugacccugaugcuggccaucuucaucguguacauggugagcagagacaacgugagcugcagcaucugccuguga

SEQ ID NO: 186869 - RNA, 1755 nt, Artificial Sequence; identical to SEQ ID NO: 186486
  derived and/or modified CDS sequence (opt4) from hemagglutinin__InfluenzaB__AFJ81001

SEQ ID NO: 186870 - RNA, 1755 nt, Artificial Sequence; identical to SEQ ID NO: 186486
  derived and/or modified CDS sequence (opt4) from hemagglutinin__InfluenzaB__AFJ84360

SEQ ID NO: 186871 - RNA, 1758 nt, Artificial Sequence; identical to SEQ ID NO: 186574
  derived and/or modified CDS sequence (opt4) from hemagglutinin__InfluenzaB__AFJ90395

SEQ ID NO: 186872 - RNA, 1755 nt, Artificial Sequence; identical to SEQ ID NO: 186486
  derived and/or modified CDS sequence (opt4) from hemagglutinin__InfluenzaB__AFJ90406

SEQ ID NO: 186873 - RNA, 1755 nt, Artificial Sequence; identical to SEQ ID NO: 186486
  derived and/or modified CDS sequence (opt4) from hemagglutinin__InfluenzaB__AFJ90417

SEQ ID NO: 186874 - RNA, 1755 nt, Artificial Sequence; identical to SEQ ID NO: 186486
  derived and/or modified CDS sequence (opt4) from hemagglutinin__InfluenzaB__AFJ90428

SEQ ID NO: 186875 - RNA, 1755 nt, Artificial Sequence; identical to SEQ ID NO: 186486
  derived and/or modified CDS sequence (opt4) from hemagglutinin__InfluenzaB__AFJ90450

SEQ ID NO: 186876 - RNA, 1755 nt, Artificial Sequence; identical to SEQ ID NO: 186486
  derived and/or modified CDS sequence (opt4) from hemagglutinin__InfluenzaB__AFJ91038

SEQ ID NO: 186877 - RNA, 1755 nt, Artificial Sequence
  derived and/or modified CDS sequence (opt4) from hemagglutinin__InfluenzaB__AFJ91049
augaaggccaucaucgugcugcugaugguggugaccagcaacgccgacagaaucugcaccggcaucaccagcagcaacagcccccacguggugaagaccgccacccagggcgaggugaacgugaccggcgugaucccccugaccaucacccccaccaagagcuacuucgccaaccugaagggcaccagaaccagaggcaagcugugccccgacugccugaacugcaccgaccuggacguggcccugggcagacccaugugcgugggcaccacccccagcgccaaggccagcauccugcacgaggugagacccgugaccagcggcugcuuccccaucaugcacgacagaaccaagaucagacagcuggccaaccugcugagaggcuacgagaacaucagacugagcacccagaacgugaucgacgccgagaaggcccccggcggccccuacagacugggcaccagcggcagcugccccaacgccaccagcaagagcggcuucuucgccaccauggccugggccgugcccaaggacaacaacaagaacgccaccaacccccugaccguggaggugcccuacaucugcaccgagggcgaggaccagaucaccguguggggcuuccacagcgacaacaagacccagaugaagaaccuguacggcgacagcaacccccagaaguucaccagcagcgccaacggcgugaccacccacuacgugagccagaucggcggcuuccccgaccagaccgaggacggcggccugccccagagcggcagaaucgugguggacuacaugaugcagaagcccggcaagaccggcaccaucguguaccagagaggcgugcugcugccccagaagguguggugcgccagcggcagaagcaaggugaucaagggcagccugccccugaucggcgaggccgacugccugcacgagaaguacggcggccugaacaagagcaagcccuacuacaccggcgagcacgccaaggccaucggcaacugccccaucugggugaagaccccccugaagcuggccaacggcaccaaguacagaccccccgccaagcugcugaaggagagaggcuucuucggcgccaucgccggcuuccuggagggcggcugggagggcaugaucgccggcuggcacggcuacaccagccacggcgcccacggcguggccguggccgccgaccugaagagcacccaggaggccaucaacaagaucaccaagaaccugaacagccugagcgagcuggaggugaagaaccugcagagacugagcggcgccauggacgagcugcacaacgagauccuggagcuggacgagaagguggacgaccugagagccgacaccaucagcagccagaucgagcuggccgugcugcugagcaacgagggcaucaucaacagcgaggacgagcaccugcuggcccuggagagaaagcugaagaagaugcugggccccagcgccguggacaucggcaacggcugcuucgagaccaagcacaagugcaaccagaccugccuggacagaaucgccgccggcaccuucaacgccggcgaguucagccugcccaccuucgacagccugaacaucaccgccgccagccugaacgacgacggccuggacaaccacaccauccugcuguacuacagcaccgccgccagcagccuggccgugacccugaugcuggccaucuucaucguguacauggugagcagagacaacgugagcugcagcaucugccuguga

SEQ ID NO: 186878 - RNA, 1758 nt, Artificial Sequence
  derived and/or modified CDS sequence (opt4) from hemagglutinin__InfluenzaB__AFJ91060
augaaggccaucaucgugcugcugaugguggugaccagcaacgccgacagaaucugcaccggcaucaccagcagcaacagcccccacguggugaagaccgccacccagggcgaggugaacgugaccggcgugaucccccugaccaccacccccaccaagagccacuucgccaaccugaagggcaccgagaccagaggcaagcugugccccagaugccugaacugcaccgaccuggacguggcccugggcagacccaagugcaccggcaacauccccagcgccagagugagcauccugcacgaggugagacccgugaccagcggcugcuuccccaucaugcacgacagaaccaagaucagacagcugcccaaccugcugagaggcuacgagcacaucagacugagcacccacaacgugaucaacgccgagaacgcccccggcggccccuacaagaucggcaccagcggcagcugccccaacgugaccaacggcaacggcuucuucgccaccauggccugggccgugcccaagaacgacaacaacaagaccgccaccaacagccugaccaucgaggugcccuacaucugcaccgagggcgaggaccagaucaccguguggggcuuccacagcgacaacgaggcccagauggccaagcuguacggcgacagcaagccccagaaguucaccagcagcgccaacggcgugaccacccacuacgugagccagaucggcggcuuccccaaccagaccgaggacggcggccugccccagagcggcagaaucgugguggacuacauggugcagaagagcggcaagaccggcaccaucaccuaccagagaggcauccugcugccccagaagguguggugcgccagcggcagaagcaaggugaucaagggcagccugccccugaucggcgaggccgacugccugcacgagaaguacggcggccugaacaagagcaagcccuacuacaccggcgagcacgccaaggccaucggcaacugccccaucugggugaagaccccccugaagcuggccaacggcaccaaguacagaccccccgccaagcugcugaaggagagaggcuucuucggcgccaucgccggcuuccuggagggcggcugggagggcaugaucgccggcuggcacggcuacaccagccacggcgcccacggcguggccguggccgccgaccugaagagcacccaggaggccaucaacaagaucaccaagaaccugaacagccugagcgagcuggaggugaagaaccugcagagacugagcggcgccauggacgagcugcacaacgagauccuggagcuggacgagaagguggacgaccugagagccgacaccaucagcagccagaucgagcuggccgugcugcugagcaacgagggcaucaucaacagcgaggacgagcaccugcuggcccuggagagaaagcugaagaagaugcugggccccagcgccguggagaucggcaacggcugcuucgagaccaagcacaagugcaaccagaccugccuggacagaaucgccgccggcaccuucgacgccggcgaguucagccugcccaccuucgacagccugaacaucaccgccgccagccugaacgacgacggccuggacaaccacaccauccugcuguacuacagcaccgccgccagcagccuggccgugacccugaugaucgccaucuucgugguguacauggugagcagagacaacgugagcugcagcaucugccuguga

SEQ ID NO: 186879 - RNA, 1755 nt, Artificial Sequence; identical to SEQ ID NO: 186486
  derived and/or modified CDS sequence (opt4) from hemagglutinin__InfluenzaB__AFJ91071

SEQ ID NO: 186880 - RNA, 1755 nt, Artificial Sequence
  derived and/or modified CDS sequence (opt4) from hemagglutinin__InfluenzaB__AFJ91082
augaaggccaucaucgugcugcugaugguggugaccagcaacgccgacagaaucugcaccggcaucaccagcagcaacagcccccacguggugaagaccgccacccagggcgaggugaacgugaccggcgugaucccccugaccaccacccccaccaagagcuacuucgccaaccugaagggcaccagaaccagaggcaagcugugccccgacugccugaacugcaccgaccuggacguggcccugggcagacccaugugcgugggcaccacccccagcgccaaggccagcauccugcacgaggugagacccgugaccagcggcugcuuccccaucaugcacgacagaaccaagaucagacagcugcccaaccugcugagaggcuacgagaacaucagacugagcacccagaacgugaucgacgccgagaaggcccccggcggccccuacagacugggcaccagcggcagcugccccaacgccaccagcaagaucggcuucuucgccaccauggccugggccgugcccaaggacaacuacaagaacgccaccaacccccugaccguggaggugcccuacaucugcaccgagggcgaggaccagaucaccguguggggcuuccacagcgacaacaagacccagaugaagaaccuguacggcgacagcaacccccagaaguucaccagcagcgccaacggcgugaccacccacuacgugagccagaucggcgacuuccccgaccagaccgaggacggcggccugccccagagcggcagaaucgugguggacuacaugaugcagaagcccggcaagaccggcaccaucguguaccagagaggcgugcugcugccccagaagguguggugcgccagcggcagaagcaaggugaucaagggcagccugccccugaucggcgaggccgacugccugcacgagaaguacggcggccugaacaagagcaagcccuacuacaccggcgagcacgccaaggccaucggcaacugccccaucugggugaagaccccccugaagcuggccaacggcaccaaguacagaccccccgccaagcugcugaaggagagaggcuucuucggcgccaucgccggcuuccuggagggcggcugggagggcaugaucgccggcuggcacggcuacaccagccacggcgcccacggcguggccguggccgccgaccugaagagcacccaggaggccaucaacaagaucaccaagaaccugaacagccugagcgagcuggaggugaagaaccugcagagacugagcggcgccauggacgagcugcacaacgagauccuggagcuggacgagaagguggacgaccugagagccgacaccaucagcagccagaucgagcuggccgugcugcugagcaacgagggcaucaucaacagcgaggacgagcaccugcuggcccuggagagaaagcugaagaagaugcugggccccagcgccguggacaucggcaacggcugcuucgagaccaagcacaagugcaaccagaccugccuggacagaaucgccgccggcaccuucaacgccggcgaguucagccugcccaccuucgacagccugaacaucaccgccgccagccugaacgacgacggccuggacaaccacaccauccugcuguacuacagcaccgccgccagcagccuggccgugacccugaugcuggccaucuucaucguguacauggugagcagagacaacgugagcugcagcaucugccuguga

SEQ ID NO: 186881 - RNA, 1755 nt, Artificial Sequence; identical to SEQ ID NO: 186880
  derived and/or modified CDS sequence (opt4) from hemagglutinin__InfluenzaB__AFJ91093

SEQ ID NO: 186882 - RNA, 1755 nt, Artificial Sequence; identical to SEQ ID NO: 186880
  derived and/or modified CDS sequence (opt4) from hemagglutinin__InfluenzaB__AFJ91104

SEQ ID NO: 186883 - RNA, 1755 nt, Artificial Sequence; identical to SEQ ID NO: 186880
  derived and/or modified CDS sequence (opt4) from hemagglutinin__InfluenzaB__AFJ91115

SEQ ID NO: 186884 - RNA, 1758 nt, Artificial Sequence
  derived and/or modified CDS sequence (opt4) from hemagglutinin__InfluenzaB__AFJ91704
augaaggccaucaucgugcugcugaugguggugaccagcaacgccgacagaaucugcaccggcaucaccagcagcaacagcccccacguggugaagaccgccacccagggcgaggugaacgugaccggcgugaucccccugaccaccacccccaccaagagccacuucgccaaccugaagggcaccgagaccagaggcaagcugugccccaagugccugaacugcaccgaccuggacguggcccugggcagacccaagugcaccggcaacauccccagcgccagagugagcauccugcacgaggugagacccgugaccagcggcugcuuccccaucaugcacgacagaaccaagaucagacagcugcccaaccugcugagaggcuacgagcacaucagacugagcacccacaacgugaucaacgccgagaacgcccccggcggccccuacaagaucggcaccagcggcagcugccccaacgugaccaacggcaagggcuucuucgccaccauggccugggccgugcccaagaacgacaacaacaagaccgccaccaacagccugaccaucgaggugcccuacaucugcaccgagggcgaggaccagaucaccguguggggcuuccacagcgacaacgagacccagauggccaagcuguacggcgacagcaagccccagaaguucaccagcagcgccaacggcgugaccacccacuacgugagccagaucggcggcuuccccaaccagaccgaggacggcggccugccccagagcggcagaaucgugguggacuacauggugcagaagagcggcaagaccggcaccaucaccuaccagagaggcauccugcugccccagaagguguggugcgccagcggcagaagcaaggugaucaagggcagccugccccugaucggcgaggccgacugccugcacgagaaguacggcggccugaacaagagcaagcccuacuacaccggcgagcacgccaaggccaucggcaacugccccaucugggugaagaccccccugaagcuggccaacggcaccaaguacagaccccccgccaagcugcugaaggagagaggcuucuucggcgccaucgccggcuuccuggagggcggcugggagggcaugaucgccggcuggcacggcuacaccagccacggcgcccacggcguggccguggccgccgaccugaagagcacccaggaggccaucaacaagaucaccaagaaccugaacagccugagcgagcuggaggugaagaaccugcagagacugagcggcgccauggacgagcugcacaacgagauccuggagcuggacgagaagguggacgaccugagagccgacaccaucagcagccagaucgagcuggccgugcugcugagcaacgagggcaucaucaacagcgaggacgagcaccugcuggcccuggagagaaagcugaagaagaugcugggccccagcgccguggagaucggcaacggcugcuucgagaccaagcacaagugcaaccagaccugccuggacagaaucgccgccggcaccuucgacgccggcgaguucagccugcccaccuucgacagccugaacaucaccgccgccagccugaacgacgacggccuggacaaccacaccauccugcuguacuacagcaccgccgccagcagccuggccgugacccugaugaucgccaucuucgugguguacauggugagcagagacaacgugagcugcagcaucugccuguga

SEQ ID NO: 186885 - RNA, 1755 nt, Artificial Sequence
  derived and/or modified CDS sequence (opt4) from hemagglutinin__InfluenzaB__AFK09797
augaaggccaucaucgugcugcugaugguggugaccagcaacgccgacagaaucugcaccggcaucaccagcagcaacagcccccacguggugaagaccgccacccagggcgaggugaacgugaccggcgugaucccccugaccaccacccccaucaagagcuacuucgccaaccugaagggcaccaagaccagaggcaagcugugccccgacugccugaacugcaccgaccuggacguggcccugggcagacccaugugcgugggcaccacccccagcgccaaggccagcauccugcacgaggugagacccgugaccagcggcugcuuccccaucaugcacgacagaaccaagaucagacagcugcccaaccugcugagaggcuacgagaacaucagacugagcacccagaacgugaucgacgccgagaaggcccccggcggccccuacagacugggcaccagcggcagcugccccaacgccaccagcaagagcggcuucuucgccaccauggccugggccgugcccaaggacaacaacaagaacgccaccaacccccugaccguggaggugcccuacgugugcaccgagggcgaggaccagaucaccguguggggcuuccacagcgacaacaagaaccagaugaagaaccuguacggcgacagcaacccccagaaguucaccagcagcgccaacggcgugaccacccacuacgugagccagaucggcggcuuccccgaccagaccgaggacggcggccugccccagagcggcagaaucgugguggacuacauggugcagaagcccggcaagaccggcaccaucguguaccagagaggcgugcugcugccccagaagguguggugcgccagcggcagaagcaaggugaucaagggcagccugccccugaucggcgaggccgacugccugcacgagaaguacggcggccugaacaagagcaagcccuacuacaccggcgagcacgccaaggccaucggcaacugccccaucugggugaagaccccccugaagcuggccaacggcaccaaguacagaccccccgccaagcugcugaaggagagaggcuucuucggcgccaucgccggcuuccuggagggcggcugggagggcaugaucgccggcuggcacggcuacaccagccacggcgcccacggcguggccguggccgccgaccugaagagcacccaggaggccaucaacaagaucaccaagaaccugaacagccugagcgagcuggaggugaagaaccugcagagacugagcggcgccauggacgagcugcacaacgagauccuggagcuggacgagaagguggacgaccugagagccgacaccaucagcagccagaucgagcuggccgugcugcugagcaacgagggcaucaucaacagcgaggacgagcaccugcuggcccuggagagaaagcugaagaagaugcugggccccagcgccguggacaucggcaacggcugcuucgagaccaagcacaagugcaaccagaccugccuggacagaaucgccgccggcaccuucaacgccggcgaguucagccugcccaccuucgacagccugaacaucaccgccgccagccugaacgacgacggccuggacaaccacaccauccugcuguacuacagcaccgccgccagcagccuggccgugacccugaugcuggccaucuucaucguguacauggugagcagagacaacgugagcugcagcaucugccuguga

SEQ ID NO: 186886 - RNA, 1755 nt, Artificial Sequence; identical to SEQ ID NO: 186880
  derived and/or modified CDS sequence (opt4) from hemagglutinin__InfluenzaB__AFN54654

SEQ ID NO: 186887 - RNA, 1755 nt, Artificial Sequence; identical to SEQ ID NO: 186627
  derived and/or modified CDS sequence (opt4) from hemagglutinin__InfluenzaB__AFN54665

SEQ ID NO: 186888 - RNA, 1755 nt, Artificial Sequence; identical to SEQ ID NO: 186627
  derived and/or modified CDS sequence (opt4) from hemagglutinin__InfluenzaB__AFN54676

SEQ ID NO: 186889 - RNA, 1755 nt, Artificial Sequence; identical to SEQ ID NO: 186880
  derived and/or modified CDS sequence (opt4) from hemagglutinin__InfluenzaB__AFN54687

SEQ ID NO: 186890 - RNA, 1755 nt, Artificial Sequence
  derived and/or modified CDS sequence (opt4) from hemagglutinin__InfluenzaB__AFN54698
augaaggccaucaucgugcugcugaugguggugaccagcaacgccgacagaaucugcaccggcaucaccagcagcaacagcccccacguggugaagaccgccacccagggcgaggugaacgugaccggcgugaucccccugaccaccacccccaccaagagcuacuucgccaaccugaagggcaccagaaccagaggcaagcugugccccgacugccugaacugcaccgaccuggacguggcccugggcagacccaugugcgugggcaccacccccagcgccaaggccagcauccugcacgaggugagacccgugaccagcggcugcuuccccaucaugcacgacagaaccaagaucagacagcugcccaaccugcugagaggcuacgagaacaucagacugagcacccagaacgugaucgacgccgagaaggcccccggcggccccuacagacugggcaccagcggcagcugccccaacgccaccagcaagaucggcuucuucgccaccauggccugggccgugcccaaggacaacuacaagaacgccaccaacccccugaccguggaggugcccuacaucugcaccgagggcgaggaccagaucaccguguggggcuuccacagcgacaacaagacccagaugaagaaccuguacggcgacagcaacccccagaaguucaccagcuucgccaacggcgugaccacccacuacgugagccagaucggcgacuuccccgaccagaccgaggacggcggccugccccagagcggcagaaucgugguggacuacaugaugcagaagcccggcaagaccggcaccaucguguaccagagaggcgugcugcugccccagaagguguggugcgccagcggcagaagcaaggugaucaagggcagccugccccugaucggcgaggccgacugccugcacgagaaguacggcggccugaacaagagcaagcccuacuacaccggcgagcacgccaaggccaucggcaacugccccaucugggugaagaccccccugaagcuggccaacggcaccaaguacagaccccccgccaagcugcugaaggagagaggcuucuucggcgccaucgccggcuuccuggagggcggcugggagggcaugaucgccggcuggcacggcuacaccagccacggcgcccacggcguggccguggccgccgaccugaagagcacccaggaggccaucaacaagaucaccaagaaccugaacagccugagcgagcuggaggugaagaaccugcagagacugagcggcgccauggacgagcugcacaacgagauccuggagcuggacgagaagguggacgaccugagagccgacaccaucagcagccagaucgagcuggccgugcugcugagcaacgagggcaucaucaacagcgaggacgagcaccugcuggcccuggagagaaagcugaagaagaugcugggccccagcgccguggacaucggcaacggcugcuucgagaccaagcacaagugcaaccagaccugccuggacagaaucgccgccggcaccuucaacgccggcgaguucagccugcccaccuucgacagccugaacaucaccgccgccagccugaacgacgacggccuggacaaccacaccauccugcuguacuacagcaccgccgccagcagccuggccgugacccugaugcuggccaucuucaucguguacauggugagcagagacaacgugagcugcagcaucugccuguga

SEQ ID NO: 186891 - RNA, 1755 nt, Artificial Sequence; identical to SEQ ID NO: 186880
  derived and/or modified CDS sequence (opt4) from hemagglutinin__InfluenzaB__AFN54709

SEQ ID NO: 186892 - RNA, 1755 nt, Artificial Sequence; identical to SEQ ID NO: 186880
  derived and/or modified CDS sequence (opt4) from hemagglutinin__InfluenzaB__AFN54720

SEQ ID NO: 186893 - RNA, 1755 nt, Artificial Sequence; identical to SEQ ID NO: 186880
  derived and/or modified CDS sequence (opt4) from hemagglutinin__InfluenzaB__AFN54731

SEQ ID NO: 186894 - RNA, 1755 nt, Artificial Sequence; identical to SEQ ID NO: 186880
  derived and/or modified CDS sequence (opt4) from hemagglutinin__InfluenzaB__AFN54742

SEQ ID NO: 186895 - RNA, 1755 nt, Artificial Sequence; identical to SEQ ID NO: 186880
  derived and/or modified CDS sequence (opt4) from hemagglutinin__InfluenzaB__AFN54753

SEQ ID NO: 186896 - RNA, 1755 nt, Artificial Sequence; identical to SEQ ID NO: 186880
  derived and/or modified CDS sequence (opt4) from hemagglutinin__InfluenzaB__AFN54764

SEQ ID NO: 186897 - RNA, 1755 nt, Artificial Sequence; identical to SEQ ID NO: 186880
  derived and/or modified CDS sequence (opt4) from hemagglutinin__InfluenzaB__AFN54775

SEQ ID NO: 186898 - RNA, 1755 nt, Artificial Sequence; identical to SEQ ID NO: 186880
  derived and/or modified CDS sequence (opt4) from hemagglutinin__InfluenzaB__AFN54786

SEQ ID NO: 186899 - RNA, 1755 nt, Artificial Sequence; identical to SEQ ID NO: 186880
  derived and/or modified CDS sequence (opt4) from hemagglutinin__InfluenzaB__AFN54797

SEQ ID NO: 186900 - RNA, 1755 nt, Artificial Sequence; identical to SEQ ID NO: 186880
  derived and/or modified CDS sequence (opt4) from hemagglutinin__InfluenzaB__AFN54808

SEQ ID NO: 186901 - RNA, 1755 nt, Artificial Sequence; identical to SEQ ID NO: 186627
  derived and/or modified CDS sequence (opt4) from hemagglutinin__InfluenzaB__AFN54819

SEQ ID NO: 186902 - RNA, 1755 nt, Artificial Sequence; identical to SEQ ID NO: 186880
  derived and/or modified CDS sequence (opt4) from hemagglutinin__InfluenzaB__AFN54830

SEQ ID NO: 186903 - RNA, 1755 nt, Artificial Sequence; identical to SEQ ID NO: 186880
  derived and/or modified CDS sequence (opt4) from hemagglutinin__InfluenzaB__AFN54841

SEQ ID NO: 186904 - RNA, 1755 nt, Artificial Sequence; identical to SEQ ID NO: 186880
  derived and/or modified CDS sequence (opt4) from hemagglutinin__InfluenzaB__AFN54852

SEQ ID NO: 186905 - RNA, 1755 nt, Artificial Sequence; identical to SEQ ID NO: 186880
  derived and/or modified CDS sequence (opt4) from hemagglutinin__InfluenzaB__AFN54863

SEQ ID NO: 186906 - RNA, 1758 nt, Artificial Sequence
  derived and/or modified CDS sequence (opt4) from hemagglutinin__InfluenzaB__AFU34595
augaaggccaucaucgugcugcugaugguggugaccagcaacgccgacagaaucugcaccggcaucaccagcagcaacagcccccacguggugaagaccgccacccagggcgaggugaacgugaccggcgugaucccccugaccaccacccccaccaagagccacuucgccaaccugaagggcaccgagaccagaggcaagcugugccccaagugccccaacugcaccgaccuggacguggcccugggcagacccaagugcaccggcaagauccccagcgccagagugagcauccugcacgaggugagacccgugaccagcggcugcuuccccaucaugcacgacagaaccaagaucagacagcugcccaaccugcugagaggcuacgagcacaucagacugagcacccacaacgugaucaacgccgagaacgcccccggcggccccuacaagaucggcaccagcggcagcugccccaacgugaccaacggcaacggcuucuucgccaccauggccugggccgugcccaagaacgacaagaacaagaccgccaccaacccccugaccaucgaggugcccuacaucugcaccgagggcgaggaccagaucaccguguggggcuuccacagcgacaacgagacccagauggccaagcuguacagagacagcaagccccagaaguucaccagcagcgccaacggcgugaccacccacuacgugagccagaucggcggcuuccccaaccagaccgaggacggcggccugccccagagcggcagaaucgugguggacuacauggugcagaagagcggcaagaccggcaccaucaccuaccagagaggcauccugcugccccagaagguguggugcgccagcggcagaagcaaggugaucaagggcagccugccccugaucggcgaggccgacugccugcacgagaaguacggcggccugaacaagagcaagcccuacuacaccggcgagcacgccaaggccaucggcaacugccccaucugggugaagaccccccugaagcuggccaacggcaccaaguacagaccccccaccaagcugcugaaggagagaggcuucuucggcgccaucgccggcuuccuggagggcggcugggagggcaugaucgccggcuggcacggcuacaccagccacggcgcccacggcguggccguggccgccgaccugaagagcacccaggaggccaucaacaagaucaccaagaaccugaacagccugagcgagcuggaggugaagaaccugcagagacugagcggcgccauggacgagcugcacaacgagauccuggagcuggacgagaagguggacgaccugagagccgacaccaucagcagccagaucgagcuggccgugcugcugagcaacgagggcaucaucaacagcgaggacgagcaccugcuggcccuggagagaaagcugaagaagaugcugggccccagcgccguggagaucggcaacggcugcuucgagaccaagcacaagugcaaccagaccugccuggacagaaucgccgccggcaccuucgacgccggcgaguucagccugcccaccuucgacagccugaacaucaccgccgccagccugaacgacgacggccuggacaaccacaccauccugcuguacuacagcaccgccgccagcagccuggccgugacccugaugaucgccaucuucgugguguacauggugagcagagacaacgugagcugcagcaucugccuguga

SEQ ID NO: 186907 - RNA, 1758 nt, Artificial Sequence
  derived and/or modified CDS sequence (opt4) from hemagglutinin__InfluenzaB__AFU34606
augaaggccaucaucgugcugcugaugguggugaccagcaacgccgacagaaucugcaccggcaucaccagcagcaacagcccccacguggugaagaccgccacccagggcgaggugaacgugaccggcgugaucccccugaccaccacccccaccaagagccacuucgccaaccugaagggcaccgagaccagaggcaagcugugccccaagugccccaacugcaccgaccuggacguggcccuggacagacccaagugcaccggcaagauccccagcgccagagugagcauccugcacgaggugagacuggugaccagcggcugcuuccccaucaugcacgacagaaccaagaucagacagcugcccaaccugcugagaggcuacgagcacaucagacugagcacccacaacgugaucaacgccgagaacgcccccggcggccccuacaagaucggcaccagcggcagcugccccaacgugaccaacggcaacggcuucuucgccaccauggccugggccgugcccaagaacgacaagaacaagaccgccaccaacccccugaccaucgaggugcccuacaucugcaccgagggcgaggaccagaucaccguguggggcuuccacagcgacgacgagacccagauggccaagcuguacggcgacagcaagccccagaaguucaccagcagcgccaacggcgugaccacccacuacgugagccagaucggcggcuuccccaaccagaccgaggacggcggccugccccagagcggcagaaucgugguggacuacauggugcagaagagcggcaagaccggcaccaucaccuaccagagaggcauccugcugccccagaagguguggugcgccagcggcagaagcaaggugaucaagggcagccugccccugaucggcgaggccgacugccugcacgagaaguacggcggccugaacaagagcaagcccuacuacaccggcgagcacgccaaggccaucggcaacugccccaucugggugaagaccccccugaagcuggccaacggcaccaaguacagaccccccgccaagcugcugaaggagagaggcuucuucggcgccaucgccggcuuccuggagggcggcugggagggcaugaucgccggcuggcacggcuacaccagccacggcgcccacggcguggccguggccgccgaccugaagagcacccaggaggccaucaacaagaucaccaagaaccugaacagccugagcgagcuggaggugaagaaccugcagagacugagcggcgccauggacgagcugcacaacgagauccuggagcuggacgagaagguggacgaccugagagccgacaccaucagcagccagaucgagcuggccgugcugcugagcaacgagggcaucaucaacagcgaggacgagcaccugcuggcccuggagagaaagcugaagaagaugcugggccccagcgccguggagaucggcaacggcugcuucgagaccaagcacaagugcaaccagaccugccuggacagaaucgccgccggcaccuucgacgccggcgaguucagccugcccaccuucgacagccugaacaucaccgccgccagccugaacgacgacggccuggacaaccacaccauccugcuguacuacagcaccgccgccagcagccuggccgugacccugaugaucgccaucuucgugguguacauggugagcagagacaacgugagcugcagcaucugccuguga

SEQ ID NO: 186908 - RNA, 1758 nt, Artificial Sequence; identical to SEQ ID NO: 186816
  derived and/or modified CDS sequence (opt4) from hemagglutinin__InfluenzaB__AFU34617

SEQ ID NO: 186909 - RNA, 1758 nt, Artificial Sequence
  derived and/or modified CDS sequence (opt4) from hemagglutinin__InfluenzaB__AFU34628
augaaggccaucaucgugcugcugaugguggugaccagcaacgccgacagaaucugcaccggcaucaccagcagcaacagcccccacguggugaagaccgccacccagggcgaggugaacgugaccggcgugaucccccugaccaccacccccaccaagagccacuucgccaaccugaagggcaccgagaccagaggcaagcugugccccaagugccccaacugcaccgaccuggacguggcccugggcagacccaagugcaccggcaagauccccagcgccagagugagcauccugcacgaggugagacccgugaccagcggcugcuuccccaucaugcacgacagaaccaagaucagacagcugcccaaccugcugagaggcuacgagcacaucagacugagcacccacaacgugaucaacgccgagaacgcccccggcggccccuacaagaucggcaccagcggcagcugccccaacgugaccaacggcaacggcuucuucgccaccauggccugggccgugcccaagaacgacaagaacaagaccgccaccaacccccugaccaucgaggugcccuacaucugcaccgagggcgaggaccagaucaccguguggggcuuccacagcgacgacgagacccagauggccaagcuguacggcgacagcaagccccagaaguucaccagcagcgccaacggcgugaccacccacuacgugagccagaucggcggcuuccccaaccagaccgaggacggcggccugccccagagcggcagaaucgugguggacuacauggugcagaagagcggcaagaccggcaccaucaccuaccagagaggcauccugcugccccagaagguguggugcgccagcggcagaagcaaggugaucaagggcagccugccccugaucggcgaggccgacugccugcacgagaaguacggcggccugaacaagagcaagcccuacuacaccggcgagcacgccaaggccaucggcaacugccccaucugggugaagaccccccugaagcuggccaacggcaccaaguacagaccccccgccaagcugcugaaggagagaggcuuccugggcgccaucgccggcuuccuggagggcggcuggaagggcaugaucgccggcuggcacggcuacaccagccacggcgcccacggcguggccguggccgccgaccugaagagcacccaggaggccaucaacaagaucaccaagaaccugaacagccugagcgagcuggaggugaagaaccugcagagacugagcggcgccauggacgagcugcacaacgagauccuggagcuggacgagaagguggacgaccugagagccgacaccaucagcagccagaucgagcuggccgugcugcugagcaacgagggcaucaucaacagcgaggacgagcaccugcuggcccuggagagaaagcugaagaagaugcugggccccagcgccguggagaucggcaacggcugcuucgagaccaagcacaagugcaaccagaccugccuggacagaaucgccgccggcaccuucgacgccggcgaguucagccugcccaccuucgacagccugaacaucaccgccgccagccugaacgacgacggccuggacaaccacaccauccugcuguacuacagcaccgccgccagcagccuggccgugacccugaugaucgccaucuucgugguguacauggugagcagagacaacgugagcugcagcaucugccuguga

SEQ ID NO: 186910 - RNA, 1758 nt, Artificial Sequence; identical to SEQ ID NO: 186668
  derived and/or modified CDS sequence (opt4) from hemagglutinin__InfluenzaB__AFU34639

SEQ ID NO: 186911 - RNA, 1758 nt, Artificial Sequence; identical to SEQ ID NO: 186705
  derived and/or modified CDS sequence (opt4) from hemagglutinin__InfluenzaB__AGB08299

SEQ ID NO: 186912 - RNA, 1758 nt, Artificial Sequence; identical to SEQ ID NO: 186705
  derived and/or modified CDS sequence (opt4) from hemagglutinin__InfluenzaB__AGB08300

SEQ ID NO: 186913 - RNA, 1755 nt, Artificial Sequence
  derived and/or modified CDS sequence (opt4) from hemagglutinin__InfluenzaB__AGB97259
augaaggccaucaucgugcugcugaugguggugaccagcaacgccgacagaaucugcaccggcaucaccagcagcaacagcccccacguggugaagaccgccacccagggcgaggugaacgugaccggcgugaucccccugaccaccacccccaccaagagcuacuucgccaaccugaagggcaccagaaccagaggcaagcugugccccgacugccugaacugcaccgaccuggacguggcccugggcagacccaugugcgugggcaccacccccagcgccaaggccagcauccugcacgaggugagacccgugaccagcggcugcuuccccaucaugcacgacagaaccaagaucagacagcugcccaaccugcugagaggcuacgagaagaucagacugagcacccagaacgugaucgacgccgagaaggcccccggcggccccuacagacugggcaccagcggcagcugccccaacgccaccagcaagaucggcuucuucgccaccauggccugggccgugcccaaggacaacuacaagaacgccaccaacccccugaccguggaggugcccuacaucugcaccgagggcgaggaccagaucaccguguggggcuuccacagcgacaacaagacccagaugaagagccuguacggcgacagcaacccccagaaguucaccagcagcgccaacggcgugaccacccacuacgugagccagaucggcgacuuccccgaccagaccgaggacggcggccugccccagagcggcagaaucgugguggacuacaugaugcagaagcccggcaagaccggcaccaucguguaccagagaggcgugcugcugccccagaagguguggugcgccagcggcagaagcaaggugaucaagggcagccugccccugaucggcgaggccgacugccugcacgaggaguacggcggccugaacaagagcaagcccuacuacaccggcaagcacgccaaggccaucggcaacugccccaucugggugaagaccccccugaagcuggccaacggcaccaaguacagaccccccgccaagcugcugaaggagagaggcuucuucggcgccaucgccggcuuccuggagggcggcugggagggcaugaucgccggcuggcacggcuacaccagccacggcgcccacggcguggccguggccgccgaccugaagagcacccaggaggccaucaacaagaucaccaagaaccugaacagccugagcgagcuggaggugaagaaccugcagagacugagcggcgccauggacgagcugcacaacgagauccuggagcuggacgagaagguggacgaccugagagccgacaccaucagcagccagaucgagcuggccgugcugcugagcaacgagggcaucaucaacagcgaggacgagcaccugcuggcccuggagagaaagcugaagaagaugcugggccccagcgccguggacaucggcaacggcugcuucgagaccaagcacaagugcaaccagaccugccuggacagaaucgccgccggcaccuucaacgccggcgaguucagccugcccaccuucgacagccugaacaucaccgccgccagccugaacgacgacggccuggacaaccacaccauccugcuguacuacagcaccgccgccagcagccuggccgugacccugaugcuggccaucuucaucguguacaucgugagcagagacaacgugagcugcagcaucugccuguga

SEQ ID NO: 186914 - RNA, 1755 nt, Artificial Sequence
  derived and/or modified CDS sequence (opt4) from hemagglutinin__InfluenzaB__AGB97265
augaaggccaucaucgugcugcugaugguggugaccagcaacgccgacagaaucugcaccggcaucaccagcagcaacagcccccacguggugaagaccgccacccagggcgaggugaacgugaccggcgugaucccccugaccaccacccccaccaagagcuacuucgccaaccugaagggcaccaagaccagaggcaagcugugccccgacugccugaacugcaccgaccuggacguggcccugggcagacccaugugcgugggcaccacccccagcgccaaggccagcauccugcacgaggugagacccgugaccagcggcugcuuccccaucaugcacgacagaaccaagaucagacagcuggccaaccugcugagaggcuacgagaacaucagacugagcacccagaacgugaucgacgccgagaaggcccccggcggccccuacagacugggcaccagcggcagcugccccaacgccaccagcaagagcggcuucuucgccaccauggccugggccgugcccaaggacaacaacaagaacgccaccaacccccugaccguggaggugcccuacaucugcgccgagggcgaggaccagaucaccguguggggcuuccacagcgacaacaagacccagaugaagaaccuguacggcgacagcaacccccagaaguucaccagcagcgccaacggcgugaccacccacuacgugagccagaucggcggcuuccccgaccagaccgaggacggcggccugccccagagcggcagaaucgugguggacuacaugaugcagaagcccggcaagaccggcaccaucguguaccagagaggcgugcugcugccccagaagguguggugcgccagcggcagaagcaaggugaucaagggcagccugccccugaucggcgaggccgacugccugcacgagaaguacggcggccugaacaagagcaagcccuacuacaccggcgagcacgccaaggccaucggcaacugccccaucugggugaagaccccccugaagcuggccaacggcaccaaguacagaccccccgccaagcugcugaaggagagaggcuucuucggcgccaucgccggcuuccuggagggcggcugggagggcaugaucgccggcuggcacggcuacaccagccacggcgcccacggcguggccguggccgccgaccugaagagcacccaggaggccaucaacaagaucaccaagaaccugaacagccugagcgagcuggaggugaagaaccugcagagacugagcggcgccauggacgagcugcacaacgagauccuggagcuggacgagaagguggacgaccugagagccgacaccaucagcagccagaucgagcuggccgugcugcugagcaacgagggcaucaucaacagcgaggacgagcaccugcuggcccuggagagaaagcugaagaagaugcugggccccagcgccguggacaucggcaacggcugcuucgagaccaagcacaagugcaaccagaccugccuggacagaaucgccgccggcaccuucaacgccggcgaguucagccugcccaccuucgacagccugaacaucaccgccgccagccugaacgacgacggccuggacaaccacaccauccugcuguacuacagcaccgccgccagcagccuggccgugacccugaugcuggccaucuucaucguguacauggugagcagagacaacgugagcugcagcaucugccuguga

SEQ ID NO: 186915 - RNA, 1755 nt, Artificial Sequence; identical to SEQ ID NO: 186914
  derived and/or modified CDS sequence (opt4) from hemagglutinin__InfluenzaB__AGF44878

SEQ ID NO: 186916 - RNA, 1755 nt, Artificial Sequence; identical to SEQ ID NO: 186914
  derived and/or modified CDS sequence (opt4) from hemagglutinin__InfluenzaB__AGF44879

SEQ ID NO: 186917 - RNA, 1755 nt, Artificial Sequence
  derived and/or modified CDS sequence (opt4) from hemagglutinin__InfluenzaB__AGF44881
augaaggccaucaucgugcugcugaugguggugaccagcaacgccgacagaaucugcaccggcaucaccagcagcaacagcccccacguggugaagaccgccacccagggcgaggugaacgugaccggcgugaucccccugaccaccacccccaccaagagcuacuucgccaaccugaagggcaccaagaccagaggcaagcugugccccgacugccugaacugcaccgaccuggacguggcccugggcagacccaugugcgugggcaccacccccagcgccaaggccagcauccugcacgaggugagacccgugaccagcggcugcuuccccaucaugcacgacagaaccaagaucagacagcuggccaaccugcugagaggcuacgagaacaucagacugagcacccagaacgugaucgacgccgagaaggcccccggcggccccuacagacugggcaccagcggcagcugccccaacgccaccagcaagagcggcuucuucgccaccauggccugggccgugcccaaggacaacaacaagaacgccaccaacccccugaccguggaggugcccuacaucugcgccgagggcgaggaccagaucgccguguggggcuuccacagcgacaacaagacccagaugaagaaccuguacggcgacagcaacccccagaaguucaccagcagcgccaacggcgugaccacccacuacgugagccagaucggcggcuuccccgaccagaccgaggacggcggccugccccagagcggcagaaucgugguggacuacaugaugcagaagcccggcaagaccggcaccaucguguaccagagaggcgugcugcugccccagaagguguggugcgccagcggcagaagcaaggugaucaagggcagccugccccugaucggcgaggccgacugccugcacgagaaguacggcggccugaacaagagcaagcccuacuacaccggcgagcacgccaaggccaucggcaacugccccaucugggugaagaccccccugaagcuggccaacggcaccaaguacagaccccccgccaagcugcugaaggagagaggcuucuucggcgccaucgccggcuuccuggagggcggcugggagggcaugaucgccggcuggcacggcuacaccagccacggcgcccacggcguggccguggccgccgaccugaagagcacccaggaggccaucaacaagaucaccaagaaccugaacagccugagcgagcuggaggugaagaaccugcagagacugagcggcgccauggacgagcugcacaacgagauccuggagcuggacgagaagguggacgaccugagagccgacaccaucagcagccagaucgagcuggccgugcugcugagcaacgagggcaucaucaacagcgaggacgagcaccugcuggcccuggagagaaagcugaagaagaugcugggccccagcgccguggacaucggcaacggcugcuucgagaccaagcacaagugcaaccagaccugccuggacagaaucgccgccggcaccuucaacgccggcgaguucagccugcccaccuucgacagccugaacaucaccgccgccagccugaacgacgacggccuggacaaccacaccauccugcuguacuacagcaccgccgccagcagccuggccgugauccugaugcuggccaucuucaucguguacauggugagcagagacaacgugagcugcagcaucugccuguga

SEQ ID NO: 186918 - RNA, 1755 nt, Artificial Sequence
  derived and/or modified CDS sequence (opt4) from hemagglutinin__InfluenzaB__AGF44882
augaaggccaucaucgugcugcugaugguggugaccagcaacgccgacagaaucugcaccggcaucaccagcagcaacagcccccacguggugaagaccgccacccagggcgaggugaacgugaccggcgugaucccccugaccaccacccccaccaagagcuacuucgccaaccugaagggcaccaagaccagaggcaagcugugccccgacugccugaacugcaccgaccuggacguggcccugggcagacccaugugcgugggcaccacccccagcgccaaggccagcauccugcacgaggugagacccgugaccagcggcugcuuccccaucaugcacgacagaaccaagaucagacagcuggccaaccugcugagaggcuacgagaacaucagacugagcacccagaacgugaucgacgccgagaaggcccccggcggccccuacagacugggcaccagcggcagcugccccaacgccaccagcaagagcggcuucuucgccaccauggccugggccgugcccaaggacaacaacaagaacgccaccaacccccugaccguggaggugcccuacaucugcgccgagggcgaggaccagaucaccguguggggcuuccacagcgacaacaagacccagaugaagaaccuguacggcgacagcaacccccagaaguucaccagcagcgccaacggcgugaccacccacuacgugagccagaucggcggcuuccccgaccagaccgaggacggcggccugccccagagcggcagaaucgugguggacuacaugaugcagaagcccggcaagaccggcaccaucguguaccagagaggcgugcugcugccccagaagguguggugcgccagcggcaagagcaaggugaucaagggcagccugccccugaucggcgaggccgacugccugcacgagaaguacggcggccugaacaagagcaagcccuacuacaccggcgagcacgccaaggccaucggcaacugccccaucugggugaagaccccccugaagcuggccaacggcaccaaguacagaccccccgccaagcugcugaaggagagaggcuucuucggcgccaucgccggcuuccuggagggcggcugggagggcaugaucgccggcuggcacggcuacaccagccacggcgcccacggcguggccguggccgccgaccugaagagcacccaggaggccaucaacaagaucaccaagaaccugaacagccugagcgagcuggaggugaagaaccugcagagacugagcggcgccauggacgagcugcacaacgagauccuggagcuggacgagaagguggacgaccugagagccgacaccaucagcagccagaucgagcuggccgugcugcugagcaacgagggcaucaucaacagcgaggacgagcaccugcuggcccuggagagaaagcugaagaagaugcugggccccagcgccguggacaucggcaacggcugcuucgagaccaagcacaagugcaaccagaccugccuggacagaaucgccgccggcaccuucaacgccggcgaguucagccugcccaccuucgacagccugaacaucaccgccgccagccugaacgacgacggccuggacaaccacaccauccugcuguacuacagcaccgccgccagcagccuggccgugacccugaugcuggccaucuucaucguguacauggugagcagagacaacgugagcugcagcaucugccuguga

SEQ ID NO: 186919 - RNA, 1755 nt, Artificial Sequence; identical to SEQ ID NO: 186914
  derived and/or modified CDS sequence (opt4) from hemagglutinin__InfluenzaB__AGF44883

SEQ ID NO: 186920 - RNA, 1755 nt, Artificial Sequence; identical to SEQ ID NO: 186914
  derived and/or modified CDS sequence (opt4) from hemagglutinin__InfluenzaB__AGF44884

SEQ ID NO: 186921 - RNA, 1755 nt, Artificial Sequence; identical to SEQ ID NO: 186914
  derived and/or modified CDS sequence (opt4) from hemagglutinin__InfluenzaB__AGF44886

SEQ ID NO: 186922 - RNA, 1755 nt, Artificial Sequence; identical to SEQ ID NO: 186914
  derived and/or modified CDS sequence (opt4) from hemagglutinin__InfluenzaB__AGF44887

SEQ ID NO: 186923 - RNA, 1755 nt, Artificial Sequence; identical to SEQ ID NO: 186914
  derived and/or modified CDS sequence (opt4) from hemagglutinin__InfluenzaB__AGF44888

SEQ ID NO: 186924 - RNA, 1755 nt, Artificial Sequence
  derived and/or modified CDS sequence (opt4) from hemagglutinin__InfluenzaB__AGL09834
augaaggccaucaucgugcugcugaugguggugaccagcaacgccgacagaaucugcaccggcaucaccagcagcaacagcccccacguggugaagaccgccacccagggcgaggugaacgugaccggcgugaucccccugaccaccacccccaccaagagcuacuucgccaaccugaagggcaccaagaccagaggcaagcugugccccgacugccugaacugcaccgaccuggacguggcccugggcagacccaugugcgugggcaccacccccagcgccaaggccagcauccugcacgaggugagacccgugaccagcggcugcuuccccaucaugcacgacagaaccaagaucagacagcuggccaaccugcugagaggcuacgagaacaucagacugagcacccagaacgugaucgacgccgagaaggcccccggcggccccuacagacugggcaccagcggcagcugccccaacgccaccagcaagagcggcuucuucgccaccauggccugggccgugcccaaggacaacaacaagaacgccaccaacccccugaccguggaggugcccuacaucugcgccgagggcgaggaccagaucgccguguggggcuuccacagcgacaacaagacccagaugaagaaccuguacggcgacagcaacccccagaaguucaccagcagcgccaacggcgugaccacccacuacgugagccagaucggcggcuuccccgaccagaccgaggacggcggccugccccagagcggcagaaucgugguggacuacaugaugcagaagcccggcaagaccggcaccaucguguaccagagaggcgugcugcugccccagaagguguggugcgccagcggcagaagcaaggugaucaagggcagccugccccugaucggcgaggccgacugccugcacgagaaguacggcggccugaacaagagcaagcccuacuacaccggcgagcacgccaaggccaucggcaacugccccaucugggugaagaccccccugaagcuggccaacggcaccaaguacagaccccccgccaagcugcugaaggagagaggcuucuucggcgccaucgccggcuuccuggagggcggcugggagggcaugaucgccggcuggcacggcuacaccagccacggcgcccacggcguggccguggccgccgaccugaagagcacccaggaggccaucaacaagaucaccaagaaccugaacagccugagcgagcuggaggugaagaaccugcagagacugagcggcgccauggacgagcugcacaacgagauccuggagcuggacgagaagguggacgaccugagagccgacaccaucagcagccagaucgagcuggccgugcugcugagcaacgagggcaucaucaacagcgaggacgagcaccugcuggcccuggagagaaagcugaagaagaugcugggccccagcgccguggacaucggcaacggcugcuucgagaccaagcacaagugcaaccagaccugccuggacagaaucgccgccggcaccuucaacgccggcgacuucagccugcccaccuucgacagccugaacaucaccgccgccagccugaacgacgacggccuggacaaccacaccauccugcuguacuacagcaccgccgccagcagccuggccgugacccugaugcuggccaucuucaucguguacauggugagcagagacaacgugagcugcagcaucugccuguga

SEQ ID NO: 186925 - RNA, 1755 nt, Artificial Sequence; identical to SEQ ID NO: 186914
  derived and/or modified CDS sequence (opt4) from hemagglutinin__InfluenzaB__AGL09835

SEQ ID NO: 186926 - RNA, 1755 nt, Artificial Sequence
  derived and/or modified CDS sequence (opt4) from hemagglutinin__InfluenzaB__AGL09836
augaaggccaucaucgugcugcugaugguggugaccagcaacgccgacagaaucugcaccggcaucaccagcagcaacagcccccacguggugaagaccgccacccagggcgaggugaacgugaccggcgugaucccccugaccaccacccccaccaagagcuacuucgccaaccugaagggcaccaagaccagaggcaagcugugccccgacugccugaacugcaccgaccuggacguggcccugggcagacccaugugcgugggcaccacccccagcgccaaggccagcauccugcacgaggugagacccgugaccagcggcugcuuccccaucaugcacgacagaaccaagaucagacagcuggccaaccugcugagaggcuacgagaacaucagacugagcacccagaacgugaucgacgccaagaaggcccccggcggccccuacagacugggcaccagcggcagcugccccaacgccaccagcaagagcggcuucuucgccaccauggccugggccgugcccgaggacaacaacaagaacgccaccaacccccugaccguggaggugcccuacaucugcgccgagggcgaggaccagaucaccguguggggcuuccacagcgacaacaagacccagaugaagaaccuguacggcgacagcaacccccagaaguucaccagcagcgccaacggcgugaccacccacuacgugagccagaucggcggcuuccccgaccagaccgaggacggcggccugccccagagcggcagaaucgugguggacuacaugaugcagaagcccggcaagaccggcaccaucguguaccagagaggcgugcugcugccccagaagguguggugcgccagcggcagaagcaaggugaucaagggcagccugccccugaucggcgaggccgacugccugcacgagaaguacggcggccugaacaagagcaagcccuacuacaccggcgagcacgccaaggccaucggcaacugccccaucugggugaagaccccccugaagcuggccaacggcaccaaguacagaccccccgccaagcugcugaaggagagaggcuucuucggcgccaucgccggcuuccuggagggcggcugggagggcaugaucgccggcuggcacggcuacaccagccacggcgcccacggcguggccguggccgccgaccugaagagcacccaggaggccaucaacaagaucaccaagaaccugaacagccugagcgagcuggaggugaagaaccugcagagacugagcggcgccauggacgagcugcacaacgagauccuggagcuggacgagaagguggacgaccugagagccgacaccaucagcagccagaucgagcuggccgugcugcugagcaacgagggcaucaucaacagcgaggacgagcaccugcuggcccuggagagaaagcugaagaagaugcugggccccagcgccguggacaucggcaacggcugcuucgagaccaagcacaagugcaaccagaccugccuggacagaaucgccgccggcaccuucaacgccggcgaguucagccugcccaccuucgacagccugaacaucaccgccgccagccugaacgacgacggccuggacaaccacaccauccugcuguacuacagcaccgccgccagcagccuggccgugacccugaugcuggccaucuucaucguguacauggugagcagagacaacgugagcugcagcaucugccuguga

SEQ ID NO: 186927 - RNA, 1755 nt, Artificial Sequence; identical to SEQ ID NO: 186914
  derived and/or modified CDS sequence (opt4) from hemagglutinin__InfluenzaB__AGL09837

SEQ ID NO: 186928 - RNA, 1755 nt, Artificial Sequence; identical to SEQ ID NO: 186914
  derived and/or modified CDS sequence (opt4) from hemagglutinin__InfluenzaB__AGL09838

SEQ ID NO: 186929 - RNA, 1755 nt, Artificial Sequence; identical to SEQ ID NO: 186914
  derived and/or modified CDS sequence (opt4) from hemagglutinin__InfluenzaB__AGL09839

SEQ ID NO: 186930 - RNA, 1755 nt, Artificial Sequence; identical to SEQ ID NO: 186914
  derived and/or modified CDS sequence (opt4) from hemagglutinin__InfluenzaB__AGL09840

SEQ ID NO: 186931 - RNA, 1755 nt, Artificial Sequence; identical to SEQ ID NO: 186914
  derived and/or modified CDS sequence (opt4) from hemagglutinin__InfluenzaB__AGL09841

SEQ ID NO: 186932 - RNA, 1758 nt, Artificial Sequence
  derived and/or modified CDS sequence (opt4) from hemagglutinin__InfluenzaB__AGL09842
augaaggccaucaucgugcugcugaugguggugaccagcaacgccgacagaaucugcaccggcaucaccagcagcaacagcccccacguggugaagaccgccacccagggcgaggugaacgugaccggcgugaucccccugaccaccacccccaccaagagccacuucgccaaccugaagggcaccgagaccagaggcaagcugugccccaagugccugaacugcaccgaccuggacguggcccugggcagacccaagugcaccggcaagauccccagcgccagagugagcauccugcacgaggugagacccgugaccagcggcugcuuccccaucaugcacgacagaaccaagaucagacagcugcccaaccugcugagaggcuacgagcacaucagacugagcacccacaacgugaucaacgccgagaacgcccccggcggccccuacaagaucggcaccagcggcagcugccccaacgugaccaacggcaacggcuucuucgccaccauggccugggccgugcccaagaacgacaagaacaagaccgagaccaacccccugaccaucgaggugcccuacaucugcaccgagggcgaggaccagaucaccguguggggcuuccacagcgacaacgagacccagauggccaagcuguacggcgacagcaagccccagaaguucaccagcagcgccaacggcgugaccacccacuacgugagccagaucggcggcuuccccaaccagaccgaggacggcggccugccccagagcggcagaaucgugguggacuacauggugcagaagagcggcaagaccggcaccaucaccuaccagagaggcauccugcugccccagaagguguggugcgccagcggcagaagcaaggugaucaagggcagccugccccugaucggcgaggccgacugccugcacgagaaguacggcggccugaacaagagcaagcccuacuacaccggcgagcacgccaaggccaucggcaacugccccaucugggugaagaccccccugaagcuggccaacggcaccaaguacagaccccccgccaagcugcugaaggagagaggcuucuucggcgccaucgccggcuuccuggagggcggcugggagggcaugaucgccggcuggcacggcuacaccagccacggcgcccacggcguggccguggccgccgaccugaagagcacccaggaggccaucaacaagaucaccaagaaccugaacagccugagcgagcuggaggugaagaaccugcagagacugagcggcgccauggacgagcugcacaacgagauccuggagcuggacgagaagguggacgaccugagagccgacaccaucagcagccagaucgagcuggccgugcugcugagcaacgagggcaucaucaacagcgaggacgagcaccugcuggcccuggagagaaagcugaagaagaugcugggccccagcgccguggagaucggcaacggcugcuucgagaccaagcacaagugcaaccagaccugccuggacagaaucgccgccggcaccuucgacgccggcgaguucagccugcccaccuucgacagccugaacaucaccgccgccagccugaacgacgacggccuggacaaccacaccauccugcuguacuacagcaccgccgccagcagccuggccgugacccugaugaucgccaucuucgugguguacauggugagcagagacaacgugagcugcagcaucugccuguga

SEQ ID NO: 186933 - RNA, 1755 nt, Artificial Sequence; identical to SEQ ID NO: 186914
  derived and/or modified CDS sequence (opt4) from hemagglutinin__InfluenzaB__AGL09843

SEQ ID NO: 186934 - RNA, 1755 nt, Artificial Sequence
  derived and/or modified CDS sequence (opt4) from hemagglutinin__InfluenzaB__AGL09844
augaaggccaucaucgugcugcugaugguggugaccagcaacgccgacagaaucugcaccggcaucaccagcagcaacagcccccacguggugaagaccgccacccagggcgaggugaacgugaccggcgugaucccccugaccaccacccccaccaagagcuacuucgccaaccugaagggcaccaagaccagaggcaagcugugccccgacugccugaacugcaccgaccuggacguggcccugggcagacccaugugcgugggcaccacccccagcgccaaggccagcauccugcacgaggugagacccgugaccagcggcugcuuccccaucaugcacgacagaaccaagaucagacagcuggccaaccugcugagaggcuacgagaacaucagacugagcacccagaacgugaucgacgccgagaaggcccccggcggccccuacagacugggcaccagcggcagcugccccaacgccaccagcaagagcggcuucuucgccaccauggccugggccgugcccaaggacaacaacaagaacgccaccaacccccugaccguggaggugcccuacaucugcgccgagggcgaggaccagaucaccguguggggcuuccacagcgacaacaagacccagaugaagaaccuguacggcgacagcaacccccagaaguucaccagcagcgccaacggcgugaccacccacuacgugagccagaucggcggcuuccccgaccagaaggaggacggcggccugccccagagcggcagaaucgugguggacuacaugaugcagaagcccggcaagaccggcaccaucguguaccagagaggcgugcugcugccccagaagguguggugcgccagcggcagaagcaaggugaucaagggcagccugccccugaucggcgaggccgacugccugcacgagaaguacggcggccugaacaagagcaagcccuacuacaccggcgagcacgccaaggccaucggcaacugccccaucugggugaagaccccccugaagcuggccaacggcaccaaguacagaccccccgccaagcugcugaaggagagaggcuucuucggcgccaucgccggcuuccuggagggcggcugggagggcaugaucgccggcuggcacggcuacaccagccacggcgcccacggcguggccguggccgccgaccugaagagcacccaggaggccaucaacaagaucaccaagaaccugaacagccugagcgagcuggaggugaagaaccugcagagacugagcggcgccauggacgagcugcacaacgagauccuggagcuggacgagaagguggacgaccugagagccgacaccaucagcagccagaucgagcuggccgugcugcugagcaacgagggcaucaucaacagcgaggacgagcaccugcuggcccuggagagaaagcugaagaagaugcugggccccagcgccguggacaucggcaacggcugcuucgagaccaagcacaagugcaaccagaccugccuggacagaaucgccgccggcaccuucaacgccggcgaguucagccugcccaccuucgacagccugaacaucaccgccgccagccugaacgacgacggccuggacaaccacaccauccugcuguacuacagcaccgccgccagcagccuggccgugacccugaugcuggccaucuucaucguguacauggugagcagagacaacgugagcugcagcaucugccuguga

SEQ ID NO: 186935 - RNA, 1755 nt, Artificial Sequence; identical to SEQ ID NO: 186914
  derived and/or modified CDS sequence (opt4) from hemagglutinin__InfluenzaB__AGL09845

SEQ ID NO: 186936 - RNA, 1755 nt, Artificial Sequence; identical to SEQ ID NO: 186914
  derived and/or modified CDS sequence (opt4) from hemagglutinin__InfluenzaB__AGL09846

SEQ ID NO: 186937 - RNA, 1755 nt, Artificial Sequence
  derived and/or modified CDS sequence (opt4) from hemagglutinin__InfluenzaB__AGL09847
augaaggccaucaucgugcugcugaugguggugaccagcaacgccgacagaaucugcaccggcaucaccagcagcaacagcccccacguggugaagaccgccacccagggcgaggugaacgugaccggcgugaucccccugaccaccacccccaccaagagcuacuucgccaaccugaagggcaccaagaccagaggcaagcugugccccgacugccugaacugcaccgaccuggacguggcccugggcagacccaugugcgugggcaccacccccagcgccaaggccagcauccugcacgaggugagacccgugaccagcggcugcuuccccaucaugcacgacagaaccaagaucagacagcuggccaaccugcugagaggcuacgagaacaucagacugagcacccagaacgugaucgacgccgagaaggcccccggcggccccuacagacugggcaccagcggcagcugccccaacgccaccagcaagagcggcuucuucgccaccauggccugggccgugcccaaggacaacaacaagaacgccaccaacccccugaccguggaggugcccuacaucugcgccgagggcgaggaccagaucgccaucuggggcuuccacagcgacaacaagacccagaugaagaaccuguacggcgacagcaacccccagaaguucaccagcagcgccaacggcgugaccacccacuacgugagccagaucggcggcuuccccgaccagaccgaggacggcggccugccccagagcggcagaaucgugguggacuacaugaugcagaagcccggcaagaccggcaccaucguguaccagagaggcgugcugcugccccagaagguguggugcgccagcggcagaagcaaggugaucaagggcagccugccccugaucggcgaggccgacugccugcacgagaaguacggcggccugaacaagagcaagcccuacuacaccggcgagcacgccaaggccaucggcaacugccccaucugggugaagaccccccugaagcuggccaacggcaccaaguacagaccccccgccaagcugcugaaggagagaggcuucuucggcgccaucgccggcuuccuggagggcggcugggagggcaugaucgccggcuggcacggcuacaccagccacggcgcccacggcguggccguggccgccgaccugaagagcacccaggaggccaucaacaagaucaccaagaaccugaacagccugagcgagcuggaggugaagaaccugcagagacugagcggcgccauggacgagcugcacaacgagauccuggagcuggacgagaagguggacgaccugagagccgacaccaucagcagccagaucgagcuggccgugcugcugagcaacgagggcaucaucaacagcgaggacgagcaccugcuggcccuggagagaaagcugaagaagaugcugggccccagcgccguggacaucggcaacggcugcuucgagaccaagcacaagugcaaccagaccugccuggacagaaucgccgccggcaccuucaacgccggcgaguucagccugcccaccuucgacagccugaacaucaccgccgccagccugaacgacgacggccuggacaaccacaccauccugcuguacuacagcaccgccgccagcagccuggccgugacccugaugcuggccaucuucaucguguacauggugagcagagacaacgugagcugcagcaucugccuguga

SEQ ID NO: 186938 - RNA, 1755 nt, Artificial Sequence
  derived and/or modified CDS sequence (opt4) from hemagglutinin__InfluenzaB__AGL09849
augaaggccaucaucgugcugcugaugguggugaccagcaacgccgacagaaucugcaccggcaucaccagcagcaacagcccccacguggugaagaccgccacccagggcgaggugaacgugaccggcgugaucccccugaccaccacccccaccaagagcuacuucgccaaccugaagggcaccaagaccagaggcaagcugugccccgacugccugaacugcaccgaccuggacguggcccugggcagacccaugugcgugggcaccacccccagcgccaaggccagcauccugcacgaggugagacccgugaccagcggcugcuuccccaucaugcacgacagaaccaagaucagacagcuggccaaccugcugagaggcuacgagaacaucagacugagcacccagaacgugaucaacgccgagaaggcccccggcggccccuacagacugggcaccagcggcagcugccccaacgccaccagcaagagcggcuucuucgccaccauggccugggccgugcccaaggacaacaacaagaacgccaccaacccccugaccguggaggugcccuacaucugcgccgagggcgaggaccagaucaccguguggggcuuccacagcgacaacaagacccagaugaagaaccuguacggcgacagcaacccccagaaguucaccagcagcgccaacggcgugaccacccacuacgugagccagaucggcggcuuccccgaccagaccgaggacggcggccugccccagagcggcagaaucgugguggacuacaugaugcagaagcccggcaagaccggcaccaucguguaccagagaggcgugcugcugccccagaagguguggugcgccagcggcagaagcaaggugaucaagggcagccugccccugaucggcgaggccgacugccugcacgagaaguacggcggccugaacaagagcaagcccuacuacaccggcgagcacgccaaggccaucggcaacugccccaucugggugaagaccccccugaagcuggccaacggcaccaaguacagaccccccgccaagcugcugaaggagagaggcuucuucggcgccaucgccggcuuccuggagggcggcugggagggcaugaucgccggcuggcacggcuacaccagccacggcgcccacggcguggccguggccgccgaccugaagagcacccaggaggccaucaacaagaucaccaagaaccugaacagccugagcgagcuggaggugaagaaccugcagagacugagcggcgccauggacgagcugcacaacgagauccuggagcuggacgagaagguggacgaccugagagccgacaccaucagcagccagaucgagcuggccgugcugcugagcaacgagggcaucaucaacagcgaggacgagcaccugcuggcccuggagagaaagcugaagaagaugcugggccccagcgccguggacaucggcaacggcugcuucgagaccaagcacaagugcaaccagaccugccuggacagaaucgccgccggcaccuucaacgccggcgaguucagccugcccaccuucgacagccugaacaucaccgccgccagccugaacgacgacggccuggacaaccacaccauccugcuguacuacagcaccgccgccagcagccuggccgugacccugaugcuggccaucuucaucguguacauggugagcagagacaacgugagcugcagcaucugccuguga

SEQ ID NO: 186939 - RNA, 1755 nt, Artificial Sequence; identical to SEQ ID NO: 186914
  derived and/or modified CDS sequence (opt4) from hemagglutinin__InfluenzaB__AGL09850

SEQ ID NO: 186940 - RNA, 1755 nt, Artificial Sequence; identical to SEQ ID NO: 186914
  derived and/or modified CDS sequence (opt4) from hemagglutinin__InfluenzaB__AGL09851

SEQ ID NO: 186941 - RNA, 1758 nt, Artificial Sequence; identical to SEQ ID NO: 186705
  derived and/or modified CDS sequence (opt4) from hemagglutinin__InfluenzaB__AGL09852

SEQ ID NO: 186942 - RNA, 1755 nt, Artificial Sequence; identical to SEQ ID NO: 186914
  derived and/or modified CDS sequence (opt4) from hemagglutinin__InfluenzaB__AGL09853

SEQ ID NO: 186943 - RNA, 1755 nt, Artificial Sequence; identical to SEQ ID NO: 186914
  derived and/or modified CDS sequence (opt4) from hemagglutinin__InfluenzaB__AGL09854

SEQ ID NO: 186944 - RNA, 1758 nt, Artificial Sequence
  derived and/or modified CDS sequence (opt4) from hemagglutinin__InfluenzaB__AGL09855
augaaggccaucaucgugcugcugaugguggugaccagcaacgccgacagaaucugcaccggcaucaccagcagcaacagcccccacguggugaagaccgccacccagggcgaggugaacgugaccggcgugaucccccugaccaccacccccaccaagagccacuucgccaaccugaagggcaccgagaccagaggcaagcugugccccaagugccugaacugcaccgaccuggacguggcccugggcagacccaagugcaccggcaagauccccagcgccagagugagcauccugcacgaggugagacccgugaccagcggcugcuuccccaucaugcacgacagaaccaagaucagacagcugcccaaccugcugagaggcuacgagcacaucagacugagcacccacaacgugaucaacgccgagaacgcccccggcggccccuacaagaucggcaccagcggcagcugccccaacgugaccaacggcaacggcuucuucgccaccauggccugggccgugcccaagaacgacaagaacaagaccgagaccaacccccugaccaucgaggugcccuacaucugcaccgaggaggaggaccagaucaccguguggggcuuccacagcgacaacgagacccagauggccaagcuguacggcgacagcaagccccagaaguucaccagcagcgccaacggcgugaccacccacuacgugagccagaucggcgacuuccccaaccagaccgaggacggcggccugccccagagcggcagaaucgugguggacuacauggugcagaagagcggcaagaccggcaccaucaccuaccagagaggcauccugcugccccagaagguguggugcgccagcggcagaagcaaggugaucaagggcagccugccccugaucggcgaggccgacugccugcacgagaaguacggcggccugaacaagagcaagcccuacuacaccggcgagcacgccaaggccaucggcaacugccccaucugggugaagaccccccugaagcuggccaacggcaccaaguacagaccccccgccaagcugcugaaggagagaggcuucuucggcgccaucgccggcuuccuggagggcggcugggagggcaugaucgccggcuggcacggcuacaccagccacggcgcccacggcguggccguggccgccgaccugaagagcacccaggaggccaucaacaagaucaccaagaaccugaacagccugagcgagcuggaggugaagaaccugcagagacugagcggcgccauggacgagcugcacaacgagauccuggagcuggacgagaagguggacgaccugagagccgacaccaucagcagccagaucgagcuggccgugcugcugagcaacgagggcaucaucaacagcgaggacgagcaccugcuggcccuggagagaaagcugaagaagaugcugggccccagcgccguggagaucggcaacggcugcuucgagaccaagcacaagugcaaccagaccugccuggacagaaucgccgccggcaccuucgacgccggcgaguucagccugcccaccuucgacagccugaacaucaccgccgccagccugaacgacgacggccuggacaaccacaccauccugcuguacuacagcaccgccgccagcagccuggccgugacccugaugaucgccaucuucgugguguacauggugagcagagacaacgugagcugcagcaucugccuguga

SEQ ID NO: 186945 - RNA, 1755 nt, Artificial Sequence; identical to SEQ ID NO: 186914
  derived and/or modified CDS sequence (opt4) from hemagglutinin__InfluenzaB__AGL09856

SEQ ID NO: 186946 - RNA, 1755 nt, Artificial Sequence
  derived and/or modified CDS sequence (opt4) from hemagglutinin__InfluenzaB__AGL09857
augaaggccaucaucgugcugcugaugguggugaccagcaacgccgacagaaucugcaccggcaucaccagcagcaacagcccccacguggugaagaccgccacccagggcgaggugaacgugaccggcgugaucccccugaccaccacccccaccaagagcuacuucgccaaccugaagggcaccaagaccagaggcaagcugugccccgacugccugaacugcaccgaccuggacguggcccugggcagacccaugugcgugggcaccacccccagcgccaaggccagcauccugcacgaggugagacccgugaccagcggcugcuuccccaucaugcacgacagaaccaagaucagacagcuggccaaccugcugagaggcuacgagaacaucagacugagcacccagaaggugaucgacgccgagaaggcccccggcggccccuacagacugggcaccagcggcagcugccccaacgccaccagcaagagcggcuucuucgccaccauggccugggccgugcccaaggacaacaacaagaacgccaccaacccccugaccguggaggugcccuacaucugcgccgagggcgaggaccagaucaccguguggggcuuccacagcgacaacaagacccagaugaagaaccuguacggcgacagcaacccccagaaguucaccagcagcgccaacggcgugaccacccacuacgugagccagaucggcggcuuccccgaccagaccgaggacggcggccugccccagagcggcagaaucgugguggacuacaugauccagaagcccggcaagaccggcaccaucguguaccagagaggcgugcugcugccccagaagguguggugcgccagcggcagaagcaaggugaucaagggcagccugccccugaucggcgaggccgacugccugcacgagaaguacggcggccugaacaagagcaagcccuacuacaccggcgagcacgccaaggccaucggcaacugccccaucugggugaagaccccccugaagcuggccaacggcaccaaguacagaccccccgccaagcugcugaaggagagaggcuucuucggcgccaucgccggcuuccuggagggcggcugggagggcaugaucgccggcuggcacggcuacaccagccacggcgcccacggcguggccguggccgccgaccugaagagcacccaggaggccaucaacaagaucaccaagaaccugaacagccugagcgagcuggaggugaagaaccugcagagacugagcggcgccauggacgagcugcacaacgagauccuggagcuggacgagaagguggacgaccugagagccgacaccaucagcagccagaucgagcuggccgugcugcugagcaacgagggcaucaucaacagcgaggacgagcaccugcuggcccuggagagaaagcugaagaagaugcugggccccagcgccguggacaucggcaacggcugcuucgagaccaagcacaagugcaaccagaccugccuggacagaaucgccgccggcaccuucaacgccggcgaguucagccugcccaccuucgacagccugaacaucaccgccgccagccugaacgacgacggccuggacaaccacaccauccugcuguacuacagcaccgccgccagcagccuggccgugacccugaugcuggccaucuucaucguguacauggugagcagagacaacgugagcugcagcaucugccuguga

SEQ ID NO: 186947 - RNA, 1758 nt, Artificial Sequence
  derived and/or modified CDS sequence (opt4) from hemagglutinin__InfluenzaB__AGL09859
augaaggccaucaucgugcugcugaugguggugaccagcaacgccgacagaaucugcaccggcaucaccagcagcaacagcccccacguggugaagaccgccacccagggcgaggugaacgugaccggcgugaucccccugaccaccacccccaccaagagccacuucgccaaccugaagggcaccgagaccagaggcaagcugugccccaagugccugaacugcaccgaccuggacguggcccugggcagacccaagugcaccggcaagauccccagcgccagagugagcauccugcacgaggugagacccgugaccagcggcugcuuccccaucaugcacgacagaaccaagaucagacagcugcccaaccugcugagaggcuacgagcacaucagacugagcacccacaacgugaucaacgccgaggacgcccccggcggccccuacaagaucggcaccagcggcagcugccccaacgugaccaacggcaacggcuucuucgccaccauggccugggccgugcccaagaacgacaagaacaagaccgccaccaacccccugaccaucgaggugcccuacaucugcaccgagggcgaggaccagaucaccguguggggcuuccacagcgacaacgagacccagauggccaagcuguacggcgacagcaagccccagaaguucaccagcagcgccaacggcgugaccacccacuacgugagccagaucggcggcuuccccaaccagaccgaggacggcggccugccccagagcggcagaaucgugguggacuacauggugcagaagagcggcaagaccggcaccaucaccuaccagagaggcauccugcugccccagaagguguggugcgccagcggcagaagcaaggugaucaagggcagccugccccugaucggcgaggccgacugccugcacgagaaguacggcggccugaacaagagcaagcccuacuacaccggcgagcacgccaaggccaucggcaacugccccaucugggugaagaccccccugaagcuggccaacggcaccaaguacagaccccccgccaagcugcugaaggagagaggcuucuucggcgccaucgccggcuuccuggagggcggcugggagggcaugaucgccggcuggcacggcuacaccagccacggcgcccacggcguggccguggccgccgaccugaagagcacccaggaggccaucaacaagaucaccaagaaccugaacagccugagcgagcuggaggugaagaaccugcagagacugagcggcgccauggacgagcugcacaacgagauccuggagcuggacgagaagguggacgaccugagagccgacaccaucagcagccagaucgagcuggccgugcugcugagcaacgagggcaucaucaacagcgaggacgagcaccugcuggcccuggagagaaagcugaagaagaugcugggccccagcgccguggagaucggcaacggcugcuucgagaccaagcacaagugcaaccagaccugccuggacagaaucgccgccggcaccuucgacgccggcgaguucagccugcccaccuucgacagccugaacaucaccgccgccagccugaacgacgacggccuggacaaccacaccauccugcuguacuacagcaccgccgccagcagccuggccgugacccugaugaucgccaucuucgugguguacauggugagcagagacaacgugagcugcagcaucugccuguga

SEQ ID NO: 186948 - RNA, 1758 nt, Artificial Sequence; identical to SEQ ID NO: 186947
  derived and/or modified CDS sequence (opt4) from hemagglutinin__InfluenzaB__AGL09860

SEQ ID NO: 186949 - RNA, 1758 nt, Artificial Sequence; identical to SEQ ID NO: 186947
  derived and/or modified CDS sequence (opt4) from hemagglutinin__InfluenzaB__AGL09861

SEQ ID NO: 186950 - RNA, 1758 nt, Artificial Sequence; identical to SEQ ID NO: 186947
  derived and/or modified CDS sequence (opt4) from hemagglutinin__InfluenzaB__AGL09862

SEQ ID NO: 186951 - RNA, 1758 nt, Artificial Sequence; identical to SEQ ID NO: 186947
  derived and/or modified CDS sequence (opt4) from hemagglutinin__InfluenzaB__AGL09863

SEQ ID NO: 186952 - RNA, 1755 nt, Artificial Sequence; identical to SEQ ID NO: 186914
  derived and/or modified CDS sequence (opt4) from hemagglutinin__InfluenzaB__AGL09864

SEQ ID NO: 186953 - RNA, 1755 nt, Artificial Sequence; identical to SEQ ID NO: 186914
  derived and/or modified CDS sequence (opt4) from hemagglutinin__InfluenzaB__AGL09866

SEQ ID NO: 186954 - RNA, 1755 nt, Artificial Sequence; identical to SEQ ID NO: 186914
  derived and/or modified CDS sequence (opt4) from hemagglutinin__InfluenzaB__AGL09867

SEQ ID NO: 186955 - RNA, 1755 nt, Artificial Sequence; identical to SEQ ID NO: 186914
  derived and/or modified CDS sequence (opt4) from hemagglutinin__InfluenzaB__AGL09868

SEQ ID NO: 186956 - RNA, 1755 nt, Artificial Sequence
  derived and/or modified CDS sequence (opt4) from hemagglutinin__InfluenzaB__AGL09869
augaaggccaucaucgugcugcugaugguggugaccagcaacgccgacagaaucugcaccggcaucaccagcagcaacagcccccacguggugaagaccgccacccagggcgaggugaacgugaccggcgugaucccccugaccaccacccccaccaagagcuacuucgccaaccugaagggcaccaagaccagaggcaagcugugccccgacugccugaacugcaccgaccuggacguggcccugggcagacccaugugcgugggcaccacccccagcgccaaggccagcauccugcacgaggugagacccgugaccagcggcugcuuccccaucaugcacgacagaaccaagaucagacagcuggccaaccugcugagaggcuacgagaacaucagacugagcacccagaacgugaucgacgccgagaaggcccccggcggccccuacagacugggcaccagcggcagcugccccaacaccaccagcaagagcggcuucuucgccaccauggccugggccgugcccaaggacaacaacaagaacgccaccaacccccugaccguggaggugcccuacaucugcgccgagggcgaggaccagaucaccguguggggcuuccacagcgacaacaagacccagaugaagaaccuguacggcgacagcaacccccagaaguucaccagcagcgccaacggcgugaccacccacuacgugagccagaucggcggcuuccccgaccagaccgaggacggcggccugccccagagcggcagaaucgugguggacuacaugaugcagaagcccggcaagaccggcaccaucguguaccagagaggcgugcugcugccccagaagguguggugcgccagcggcagaagcaaggugaucaagggcagccugccccugaucggcgaggccgacugccugcacgagaaguacggcggccugaacaagagcaagcccuacuacaccggcgagcacgccaaggccaucggcaacugccccaucugggugaagaccccccugaagcuggccaacggcaccaaguacagaccccccgccaagcugcugaaggagagaggcuucuucggcgccaucgccggcuuccuggagggcggcugggagggcaugaucgccggcuggcacggcuacaccagccacggcgcccacggcguggccguggccgccgaccugaagagcacccaggaggccaucaacaagaucaccaagaaccugaacagccugagcgagcuggaggugaagaaccugcagagacugagcggcgccauggacgagcugcacaacgagauccuggagcuggacgagaagguggacgaccugagagccgacaccaucagcagccagaucgagcuggccgugcugcugagcaacgagggcaucaucaacagcgaggacgagcaccugcuggcccuggagagaaagcugaagaagaugcugggccccagcgccguggacaucggcaacggcugcuucgagaccaagcacaagugcaaccagaccugccuggacagaaucgccgccggcaccuucaacgccggcgaguucagccugcccaccuucgacagccugaacaucaccgccgccagccugaacgacgacggccuggacaaccacaccauccugcuguacuacagcaccgccgccagcagccuggccgugacccugaugcuggccaucuucaucguguacauggugagcagagacaacgugagcugcagcaucugccuguga

SEQ ID NO: 186957 - RNA, 1755 nt, Artificial Sequence
  derived and/or modified CDS sequence (opt4) from hemagglutinin__InfluenzaB__AGL09870
augaaggccaucaucgugcugcugaugguggugaccagcaacgccgacagaaucugcaccggcaucaccagcagcaacagcccccacguggugaagaccgccacccagggcgaggugaacgugaccggcgugaucccccugaccaccacccccaccaagagcuacuucgccaaccugaagggcaccaagaccagaggcaagcugugccccgacugccugaacugcaccgaccuggacguggcccugggcagacccaugugcgugggcaccacccccagcgccaaggccagcauccugcacgaggugagacccgugaccagcggcugcuuccccaucaugcacgacagaaccaagaucagacagcuggccaaccugcugagaggcuacgagaacaucagacugagcacccagaacgugaucgacgccgagaaggcccccggcggccccuacagacugggcaccagcggcagcugccccaacgccaccagcaagagcggcuucuucgccaccauggccugggccgugcccaaggacaacaacaagaacgccaccaacccccugaccguggaggugcccuacaucugcgccgagggcgaggaccagaucaccguguggggcuuccacagcgacaacaagacccagaugaagaaccuguacggcgacagcaacccccagagauucaccagcagcgccaacggcgugaccacccacuacgugagccagaucggcggcuuccccgaccagaccgaggacggcggccugccccagagcggcagaaucgugguggacuacaugaugcagaagcccggcaagaccggcaccaucguguaccagagaggcgugcugcugccccagaagguguggugcgccagcggcagaagcaaggugaucaagggcagccugccccugaucggcgaggccgacugccugcacgagaaguacggcggccugaacaagagcaagcccuacuacaccggcgagcacgccaaggccaucggcaacugccccaucugggugaagaccccccugaagcuggccaacggcaccaaguacagaccccccgccaagcugcugaaggagagaggcuucuucggcgccaucgccggcuuccuggagggcggcugggagggcaugaucgccggcuggcacggcuacaccagccacggcgcccacggcguggccguggccgccgaccugaagagcacccaggaggccaucaacaagaucaccaagaaccugaacagccugagcgagcuggaggugaagaaccugcagagacugagcggcgccauggacgagcugcacaacgagauccuggagcuggacgagaagguggacgaccugagagccgacaccaucagcagccagaucgagcuggccgugcugcugagcaacgagggcaucaucaacagcgaggacgagcaccugcuggcccuggagagaaagcugaagaagaugcugggccccagcgccguggacaucggcaacggcugcuucgagaccaagcacaagugcaaccagaccugccuggacagaaucgccgccggcaccuucaacgccggcgaguucagccugcccaccuucgacagccugaacaucaccgccgccagccugaacgacgacggccuggacaaccacaccauccugcuguacuacagcaccgccgccagcagccuggccgugacccugaugcuggccaucuucaucguguacauggugagcagagacaacgugagcugcagcaucugccuguga

SEQ ID NO: 186958 - RNA, 1755 nt, Artificial Sequence; identical to SEQ ID NO: 186914
  derived and/or modified CDS sequence (opt4) from hemagglutinin__InfluenzaB__AGL09871

SEQ ID NO: 186959 - RNA, 1755 nt, Artificial Sequence
  derived and/or modified CDS sequence (opt4) from hemagglutinin__InfluenzaB__AGL09872
augaaggccaucaucgugcugcugaugguggugaccagcaacgccgacagaaucugcaccggcaucaccagcagcaacagcccccacguggugaagaccgccacccagggcgaggugaacgugaccggcgugaucccccugaccaccacccccaccaagagcuacuucgccaaccugaagggcaccaagaccagaggcaagcugugccccgacugccugaacugcaccgaccuggacguggcccugggcagacccaugugcgugggcaccacccccagcgccaaggccagcauccugcacgaggugagacccgugaccagcggcugcuuccccaucaugcacgacagaaccaagaucagacagcuggccaaccugcugagaggcuacgagaacaucagacugagcacccagaacgugaucgacgccgagaaggcccccggcggccccuacagacugggcaccagcggcagcugccccaacgccaccagcaagagcggcuucuucgccaccauggccugggccgugcccaaggacaacaacaagaacgccaccaacccccugaccguggaggugcccuacaucugcgccgagggcgaggaccagaucgccguguggggcuuccacagcgacaacaagacccagaugaagaaccuguacggcgacagcaacccccagaaguucaccagcagcgccaacggcgugaccacccacuacgugagccagaucggcggcuuccccgaccagaccgaggacggcggccugccccagagcggcagaaucgugguggacuacaugaugcagaagcccggcaagaccggcaccaucguguaccagagaggcgugcugcugccccagaagguguggugcgccagcggcagaagcaaggugaucaagggcagccugccccugaucggcgaggccgacugccugcacgagaaguacggcggccugaacaagagcaagcccuacuacaccggcgagcacgccaaggccaucggcaacugccccaucugggugaagaccccccugaagcuggccaacggcaccaaguacagaccccccgccaagcugcugaaggagagaggcuucuucggcgccaucgccggcuuccuggagggcggcugggagggcaugaucgccggcuggcacggcuacaccagccacggcgcccacggcguggccguggccgccgaccugaagagcacccaggaggccaucaacaagaucaccaagaaccugaacagccugagcgagcuggaggugaagaaccugcagagacugagcggcgccauggacgagcugcacaacgagauccuggagcuggacgagaagguggacgaccugagagccgacaccaucagcagccagaucgagcuggccgugcugcugagcaacgagggcaucaucaacagcgaggacgagcaccugcuggcccuggagagaaagcugaagaagaugcugggccccagcgccguggacaucggcaacggcugcuucgagaccaagcacaagugcaaccagaccugccuggacagaaucgccgccggcaccuucaacgccggcgaguucagccugcccaccuucgacagccugaacaucaccgccgccagccugaacgacgacggccuggacaaccacaccauccugcuguacuacagcaccgccgccagcagccuggccgugacccugaugcuggccaucuucaucguguacauggugagcagagacaacgugagcugcagcaucugccuguga

SEQ ID NO: 186960 - RNA, 1755 nt, Artificial Sequence; identical to SEQ ID NO: 186914
  derived and/or modified CDS sequence (opt4) from hemagglutinin__InfluenzaB__AGL09873

SEQ ID NO: 186961 - RNA, 1758 nt, Artificial Sequence; identical to SEQ ID NO: 186947
  derived and/or modified CDS sequence (opt4) from hemagglutinin__InfluenzaB__AGL09874

SEQ ID NO: 186962 - RNA, 1758 nt, Artificial Sequence; identical to SEQ ID NO: 186932
  derived and/or modified CDS sequence (opt4) from hemagglutinin__InfluenzaB__AGO02695

SEQ ID NO: 186963 - RNA, 1755 nt, Artificial Sequence; identical to SEQ ID NO: 186914
  derived and/or modified CDS sequence (opt4) from hemagglutinin__InfluenzaB__AGQ16249

SEQ ID NO: 186964 - RNA, 1758 nt, Artificial Sequence; identical to SEQ ID NO: 186947
  derived and/or modified CDS sequence (opt4) from hemagglutinin__InfluenzaB__AGQ16250

SEQ ID NO: 186965 - RNA, 1758 nt, Artificial Sequence; identical to SEQ ID NO: 186947
  derived and/or modified CDS sequence (opt4) from hemagglutinin__InfluenzaB__AGQ16251

SEQ ID NO: 186966 - RNA, 1755 nt, Artificial Sequence
  derived and/or modified CDS sequence (opt4) from hemagglutinin__InfluenzaB__AGQ16252
augaaggccaucaucgugcugcugaugguggugaccagcaacgccgacagaaucugcaccggcaucaccagcagcaacagcccccacguggugaagaccgccacccagggcgaggugaacgugaccggcgugaucccccugaccaccacccccgccaagagcuacuucgccaaccugaagggcaccagaaccagaggcaagcugugccccgacugccugaacugcaccgaccuggacguggcccugggcagacccaugugcgugggcaccacccccagcgccaaggccagcauccugcacgaggugagacccgugaccagcggcugcuuccccaucaugcacgacagaaccaagaucagacagcugcccaaccugcugagaggcuacgagaacaucagacugagcacccagaacgugaucgacgccgagaaggcccccggcggccccuacagacugggcaccagcggcagcugccccaacgccaccagcaagaucggcuucuucgccaccauggccugggccgugcccaaggacaacuacaagaacgccaccaacccccugaccguggaggugcccuacaucugcaaggagggcgaggaccagaucaccguguggggcuuccacagcgacaacaagacccagaugaagaaccuguacggcgacagcaacccccagaaguucaccagcagcgccaacggcgugaccacccacuacgugagccagaucggcgacuuccccgaccagaccgaggacggcggccugccccagagcggcagaaucgugguggacuacaugaugcagaagcccggcaagaccggcaccaucguguaccagagaggcgugcugcugccccagaagguguggugcgccagcggcagaagcaaggugaucaagggcagccugccccugaucggcgaggccgacugccugcacgaggaguacggcggccugaacaagagcaagcccuacuacaccggcaagcacgccaaggccaucggcaacugccccaucugggugaagaccccccugaagcuggccaacggcaccaaguacagaccccccgccaagcugcugaaggagagaggcuucuucggcgccaucgccggcuuccuggagggcggcugggagggcaugaucgccggcuggcacggcuacaccagccacggcgcccacggcguggccguggccgccgaccugaagagcacccaggaggccaucaacaagaucaccaagaaccugaacagccugagcgagcuggaggugaagaaccugcagagacugagcggcgccauggacgagcugcacaacgagauccuggagcuggacgagaagguggacgaccugagagccgacaccaucagcagccagaucgagcuggccgugcugcugagcaacgagggcaucaucaacagcgaggacgagcaccugcuggcccuggagagaaagcugaagaagaugcugggccccagcgccguggacaucggcaacggcugcuucgagaccaagcacaagugcaaccagaccugccuggacagaaucgccgccggcaccuucaacgccggcgaguucagccugcccaccuucgacagccugaacaucaccgccgccagccugaacgacgacggccuggacaaccacaccauccugcuguacuacagcaccgccgccagcagccuggccgugacccugaugcuggccaucuucaucguguacauggugagcagagacaacgugagcugcagcaucugccuguga

SEQ ID NO: 186967 - RNA, 1755 nt, Artificial Sequence; identical to SEQ ID NO: 186914
  derived and/or modified CDS sequence (opt4) from hemagglutinin__InfluenzaB__AGQ16253

SEQ ID NO: 186968 - RNA, 1755 nt, Artificial Sequence
  derived and/or modified CDS sequence (opt4) from hemagglutinin__InfluenzaB__AGQ16255
augaaggccaucaucgugcugcugaugguggugaccagcaacgccgacagaaucugcaccggcaucaccagcagcaacagcccccacguggugaagaccgccacccagggcgaggugaacgugaccggcgugaucccccugaccaccacccccaccaagagcuacuucgccaaccugaagggcaccaagaccagaggcaagcugugccccgacugccugaacugcaccgaccuggacguggcccugggcagacccaugugcgugggcaccacccccagcgccaaggccagcauccugcacgaggugagacccgugaccagcggcugcuuccccaucaugcacgacagaaccaagaucagacagcuggccaaccugcugagaggcuacgagaacaucagacugagcacccagaacgugaucgacgccgagaaggcccccggcggccccuacagacugggcaccagcggcagcugccccaacgccaccagcaagagcggcuucuucgccaccauggccugggccgugcccaaggacaacaacaagaacgccaccaacccccugaccguggaggugcccuacaucugcgccgagggcgaggaccagaucaccguguggggcuuccacagcgacaacaagacccagaugaagaaccuguacggcgacagcaacccccagaaguucaccagcagcgccaacggcaucaccacccacuacgugagccagaucggcggcuuccccgaccagaccgaggacggcggccugccccagagcggcagaaucgugguggacuacaugaugcagaagcccggcaagaccggcaccaucguguaccagagaggcgugcugcugccccagaagguguggugcgccagcggcagaagcaaggugaucaagggcagccugccccugaucggcgaggccgacugccugcacgagaaguacggcggccugaacaagagcaagcccuacuacaccggcgagcacgccaaggccaucggcaacugccccaucugggugaagaccccccugaagcuggccaacggcaccaaguacagaccccccgccaagcugcugaaggagagaggcuucuucggcgccaucgccggcuuccuggagggcggcugggagggcaugaucgccggcuggcacggcuacaccagccacggcgcccacggcguggccguggccgccgaccugaagagcacccaggaggccaucaacaagaucaccaagaaccugaacagccugagcgagcuggaggugaagaaccugcagagacugagcggcgccauggacgagcugcacaacgagauccuggagcuggacgagaagguggacgaccugagagccgacaccaucagcagccagaucgagcuggccgugcugcugagcaacgagggcaucaucaacagcgaggacgagcaccugcuggcccuggagagaaagcugaagaagaugcugggccccagcgccguggacaucggcaacggcugcuucgagaccaagcacaagugcaaccagaccugccuggacagaaucgccgccggcaccuucaacgccggcgaguucagccugcccaccuucgacagccugaacaucaccgccgccagccugaacgacgacggccuggacaaccacaucauccugcuguacuacagcaccgccgccagcagccuggccgugacccugaugcuggccaucuucaucguguacauggugagcagagacaacgugagcugcagcaucugccuguga

SEQ ID NO: 186969 - RNA, 1755 nt, Artificial Sequence
  derived and/or modified CDS sequence (opt4) from hemagglutinin__InfluenzaB__AGQ16256
augaaggccaucaucgugcugcugaugguggugaccagcaacgccgacagaaucugcaccggcaucaccagcagcaacagcccccacguggugaagaccgugacccagggcgaggugaacgugaccggcgugaucccccugaccaccacccccaccaagagcuacuucgccaaccugaagggcaccaagaccagaggcaagcugugccccgacugccugaacugcaccgaccuggacguggcccugggcagacccaugugcgugggcaccacccccagcgccaaggccagcauccugcacgaggugagacccgugaccagcggcugcuuccccaucaugcacgacagaaccaagaucagacagcuggccaaccugcugagaggcuacgagaacaucagacugagcacccagaacgugaucgacgccgagaaggcccccggcggccccuacagacugggcaccagcggcagcugccccaacgccaccagcaagagcggcuucuucgccaccauggccugggccgugcccaaggacagcaacaagaacgccaccaacccccugaccguggaggugcccuacaucugcgccgagggcgaggaccagaucaccguguggggcuuccacagcgacaacaagacccagaugaagaaccuguacggcgacagcaacccccagaaguucaccagcagcgccaacggcgugaccacccacuacgugagccagaucggcggcuuccccgaccagaccgaggacggcggccugccccagagcggcagaaucgugguggacuacaugaugcagaagcccggcaagaccggcaccaucguguaccagagaggcgugcugcugccccagaagguguggugcgccagcggcagaagcaaggugaucaagggcagccugccccugaucggcgaggccgacugccugcacgagaaguacggcggccugaacaagagcaagcccuacuacaccggcgagcacgccaaggccaucggcaacugccccaucugggugaagaccccccugaagcuggccaacggcaccaaguacagaccccccgccaagcugcugaaggagagaggcuucuucggcgccaucgccggcuuccuggagggcggcugggagggcaugaucgccggcuggcacggcuacaccagccacggcgcccacggcguggccguggccgccgaccugaagagcacccaggaggccaucaacaagaucaccaagaaccugaacagccugagcgagcuggaggugaagaaccugcagagacugagcggcgccauggacgagcugcacaacgagauccuggagcuggacgagaagguggacgaccugagagccgacaccaucagcagccagaucgagcuggccgugcugcugagcaacgagggcaucaucaacagcgaggacgagcaccugcuggcccuggagagaaagcugaagaagaugcugggccccagcgccguggacaucggcaacggcugcuucgagaccaagcacaagugcaaccagaccugccuggacagaaucgccgccggcaccuucaacgccggcgaguucagccugcccaccuucgacagccugaacaucaccgccgccagccugaacgacgacggccuggacaaccacaccauccugcuguacuacagcaccgccgccagcagccuggccgugacccugaugcuggccaucuucaucguguacauggugagcagagacaacgugagcugcagcaucugccuguga

SEQ ID NO: 186970 - RNA, 1755 nt, Artificial Sequence; identical to SEQ ID NO: 186914
  derived and/or modified CDS sequence (opt4) from hemagglutinin__InfluenzaB__AGQ16257

SEQ ID NO: 186971 - RNA, 1755 nt, Artificial Sequence; identical to SEQ ID NO: 186914
  derived and/or modified CDS sequence (opt4) from hemagglutinin__InfluenzaB__AGQ16258

SEQ ID NO: 186972 - RNA, 1755 nt, Artificial Sequence; identical to SEQ ID NO: 186914
  derived and/or modified CDS sequence (opt4) from hemagglutinin__InfluenzaB__AGQ16259

SEQ ID NO: 186973 - RNA, 1755 nt, Artificial Sequence
  derived and/or modified CDS sequence (opt4) from hemagglutinin__InfluenzaB__AGQ16260
augaagaccaucaucgugcugcugaugguggugaccagcaacgccgacagaaucugcaccggcaucaccagcagcaacagcccccacguggugaagaccgccacccagggcgaggugaacgugaccggcgugaucccccugaccaccacccccaccaagagcuacuucgccaaccugaagggcaccaagaccagaggcaagcugugccccgacugccugaacugcaccgaccuggacguggcccugggcagacccaugugcgugggcaccacccccagcgccaaggccagcauccugcacgaggugagacccgugaccagcggcugcuuccccaucaugcacgacagaaccaagaucagacagcuggccaaccugcugagaggcuacgagaacaucagacugagcagccagaacgugaucgacgccgagaaggcccccggcggccccuacagacugggcaccagcggcagcugccccaacgccaccagcaagagcggcuucuucgccaccauggccugggccgugcccaaggacaacaacaagaacgccaccaacccccugaccguggaggugcccuacaucugcgccgagggcgaggaccagaucaccguguggggcuuccacagcgacaacaagacccagaugaagaaccuguacggcgacagcaacccccagaaguucaccagcagcgccaacggcgugaccacccacuacgugagccagaucggcggcuuccccgaccagaccgaggacggcggccugccccagagcggcagaaucgugguggacuacaugaugcagaagcccggcaagaccggcaccaucguguaccagagaggcgugcugcugccccagaagguguggugcgccagcggcagaagcaaggugaucaagggcagccugccccugaucggcgaggccgacugccugcacgagaaguacggcggccugaacaagagcaagcccuacuacaccggcgagcacgccaaggccaucggcaacugccccaucugggugaagaccccccugaagcuggccaacggcaccaaguacagaccccccgccaagcugcugaaggagagaggcuucuucggcgccaucgccggcuuccuggagggcggcugggagggcaugaucgccggcuggcacggcuacaccagccacggcgcccacggcguggccguggccgccgaccugaagagcacccaggaggccaucaacaagaucaccaagaaccugaacagccugagcgagcuggaggugaagaaccugcagagacugagcggcgccauggacgagcugcacaacgagauccuggagcuggacgagaagguggacgaccugagagccgacaccaucagcagccagaucgagcuggccgugcugcugagcaacgagggcaucaucaacagcgaggacgagcaccugcuggcccuggagagaaagcugaagaagaugcugggccccagcgccguggacaucggcaacggcugcuucgagaccaagcacaagugcaaccagaccugccuggacagaaucgccgccggcaccuucaacgccggcgaguucagccugcccaccuucgacagccugaacaucaccgccgccagccugaacgacgacggccuggacaaccacaccauccugcuguacuacagcaccgccgccagcagccuggccgugacccugaugcuggccaucuucaucguguacauggugagcagagacaacgugagcugcagcaucugccuguga

SEQ ID NO: 186974 - RNA, 1755 nt, Artificial Sequence; identical to SEQ ID NO: 186914
  derived and/or modified CDS sequence (opt4) from hemagglutinin__InfluenzaB__AGQ16261

SEQ ID NO: 186975 - RNA, 1755 nt, Artificial Sequence; identical to SEQ ID NO: 186914
  derived and/or modified CDS sequence (opt4) from hemagglutinin__InfluenzaB__AGQ16262

SEQ ID NO: 186976 - RNA, 1758 nt, Artificial Sequence; identical to SEQ ID NO: 186947
  derived and/or modified CDS sequence (opt4) from hemagglutinin__InfluenzaB__AGQ16263

SEQ ID NO: 186977 - RNA, 1758 nt, Artificial Sequence; identical to SEQ ID NO: 186947
  derived and/or modified CDS sequence (opt4) from hemagglutinin__InfluenzaB__AGQ16264

SEQ ID NO: 186978 - RNA, 1755 nt, Artificial Sequence; identical to SEQ ID NO: 186959
  derived and/or modified CDS sequence (opt4) from hemagglutinin__InfluenzaB__AGQ16265

SEQ ID NO: 186979 - RNA, 1755 nt, Artificial Sequence
  derived and/or modified CDS sequence (opt4) from hemagglutinin__InfluenzaB__AGQ16266
augaaggccaucaucgugcugcugaugguggugaccagcaacgccgacagaaucugcaccggcaucaccagcagcaacagcccccacguggugaagaccgccacccagggcgaggugaacgugaccggcgugaucccccugaccaccacccccaccaagagcuacuucgccaaccugaagggcaccaagaccagaggcaagcugugccccgacugccugaacugcaccgaccuggacguggcccugggcagacccaugugcgugggcaccacccccagcgccaaggccagcauccugcacgaggugagacccgugaccagcggcugcuuccccaucaugcacgacagaaccaagaucagacagcuggccaaccugcugagaggcuacgagaacaucagacugagcacccagaacgugaucgacgccgagaaggcccccggcggccccuacagacugggcaccagcggcagcugccccaacgccaccagcaagagcggcuucuucgccaccauggccugggccgugcccaaggacaacaacaagaacgccaccaacccccugaccguggaggugcccuacaucugcgccgagggcgaggaccagaucaccguguggggcuuccacagcgacaacaagacccagaugaagaaccuguacggcgacagcaacccccagaaguucaccagcagcgccaacggcgugaccacccacuacgugagccaggugggcggcuuccccgaccagaccgaggacggcggccugccccagagcggcagaaucgugguggacuacaugaugcagaagcccggcaagaccggcaccaucguguaccagagaggcgugcugcugccccagaagguguggugcgccagcggcagaagcaaggugaucaagggcagccugccccugaucggcgaggccgacugccugcacgagaaguacggcggccugaacaagagcaagcccuacuacaccggcgagcacgccaaggccaucggcaacugccccaucugggugaagaccccccugaagcuggccaacggcaccaaguacagaccccccgccaagcugcugaaggagagaggcuucuucggcgccaucgccggcuuccuggagggcggcugggagggcaugaucgccggcuggcacggcuacaccagccacggcgcccacggcguggccguggccgccgaccugaagagcacccaggaggccaucaacaagaucaccaagaaccugaacagccugagcgagcuggaggugaagaaccugcagagacugagcggcgccauggacgagcugcacaacgagauccuggagcuggacgagaagguggacgaccugagagccgacaccaucagcagccagaucgagcuggccgugcugcugagcaacgagggcaucaucaacagcgaggacgagcaccugcuggcccuggagagaaagcugaagaagaugcugggccccagcgccguggacaucggcaacggcugcuucgagaccaagcacaagugcaaccagaccugccuggacagaaucgccgccggcaccuucaacgccggcgaguucagccugcccaccuucgacagccugaacaucaccgccgccagccugaacgacgacggccuggacaaccacaccauccugcuguacuacagcaccgccgccagcagccuggccgugacccugaugcuggccaucuucaucguguacauggugagcagagacaacgugagcugcagcaucugccuguga

SEQ ID NO: 186980 - RNA, 1755 nt, Artificial Sequence; identical to SEQ ID NO: 186959
  derived and/or modified CDS sequence (opt4) from hemagglutinin__InfluenzaB__AGQ16267

SEQ ID NO: 186981 - RNA, 1755 nt, Artificial Sequence; identical to SEQ ID NO: 186959
  derived and/or modified CDS sequence (opt4) from hemagglutinin__InfluenzaB__AGQ16268

SEQ ID NO: 186982 - RNA, 1758 nt, Artificial Sequence; identical to SEQ ID NO: 186932
  derived and/or modified CDS sequence (opt4) from hemagglutinin__InfluenzaB__AGQ16269

SEQ ID NO: 186983 - RNA, 1755 nt, Artificial Sequence; identical to SEQ ID NO: 186959
  derived and/or modified CDS sequence (opt4) from hemagglutinin__InfluenzaB__AGQ16270

SEQ ID NO: 186984 - RNA, 1755 nt, Artificial Sequence
  derived and/or modified CDS sequence (opt4) from hemagglutinin__InfluenzaB__AGQ16272
augaaggccaucaucgugcugcugaugguggugaccagcaacgccgacagaaucugcaccggcaucaccagcagcaacagcccccacguggugaagaccgccacccagggcgaggugaacgugaccggcgugaucccccugaccaccacccccaccaagagcuacuucgccaaccugaagggcaccaagaccagaggcaagcugugccccgacugccugaacugcaccgaccuggacguggcccugggcagacccaugugcgugggcaccacccccagcgccaaggccagcauccugcacgaggugagacccgugaccagcggcugcuuccccaucaugcacgacagaaccaagaucagacagcuggccaaccugcugagaggcuacgagaacaucagacugagcacccagaacgugaucgacgccgagaaggcccccggcggccccuacagacugggcaccagcggcagcugccccaacgccaccagcaagagcggcuucuucgccaccauggccugggccgugcccagagacaacaacaagaacgccaccaacccccugaccguggaggugcccuacaucugcgaggagggcgaggaccagaucaccguguggggcuuccacagcgacaacaagacccagaugaagaaccuguacggcgacagcaacccccagaaguucaccagcagcgccaacggcgugaccacccacuacgugagccagaucggcggcuuccccgaccagaccgaggacggcggccugccccagagcggcagaaucgugguggacuacaugaugcagaagcccggcaagaccggcaccaucguguaccagagaggcgugcugcugccccagaagguguggugcgccagcggcagaagcaaggugaucaagggcagccugccccugaucggcgaggccgacugccugcacgagaaguacggcggccugaacaagagcaagcccuacuacaccggcgagcacgccaaggccaucggcaacugccccaucugggugaagaccccccugaagcuggccaacggcaccaaguacagaccccccgccaagcugcugaaggagagaggcuucuucggcgccaucgccggcuuccuggagggcggcugggagggcaugaucgccggcuggcacggcuacaccagccacggcgcccacggcguggccguggccgccgaccugaagagcacccaggaggccaucaacaagaucaccaagaaccugaacagccugagcgagcuggaggugaagaaccugcagagacugagcggcgccauggacgagcugcacaacgagauccuggagcuggacgagaagguggacgaccugagagccgacaccaucagcagccagaucgagcuggccgugcugcugagcaacgagggcaucaucaacagcgaggacgagcaccugcuggcccuggagagaaagcugaagaagaugcugggccccagcgccguggacaucggcaacggcugcuucgagaccaagcacaagugcaaccagaccugccuggacagaaucgccgccggcaccuucaacgccggcgaguucagccugcccaccuucgacagccugaacaucaccgccgccagccugaacgacgacggccuggacaaccacaccauccugcuguacuacagcaccgccgccagcagccuggccgugacccugaugcuggccaucuucaucguguacauggugagcagagacaacgugagcugcagcaucugccuguga

SEQ ID NO: 186985 - RNA, 1755 nt, Artificial Sequence; identical to SEQ ID NO: 186914
  derived and/or modified CDS sequence (opt4) from hemagglutinin__InfluenzaB__AGQ16273

SEQ ID NO: 186986 - RNA, 1755 nt, Artificial Sequence; identical to SEQ ID NO: 186914
  derived and/or modified CDS sequence (opt4) from hemagglutinin__InfluenzaB__AGQ16274

SEQ ID NO: 186987 - RNA, 1755 nt, Artificial Sequence; identical to SEQ ID NO: 186914
  derived and/or modified CDS sequence (opt4) from hemagglutinin__InfluenzaB__AGQ16275

SEQ ID NO: 186988 - RNA, 1755 nt, Artificial Sequence; identical to SEQ ID NO: 186914
  derived and/or modified CDS sequence (opt4) from hemagglutinin__InfluenzaB__AGQ16276

SEQ ID NO: 186989 - RNA, 1755 nt, Artificial Sequence; identical to SEQ ID NO: 186959
  derived and/or modified CDS sequence (opt4) from hemagglutinin__InfluenzaB__AGQ16277

SEQ ID NO: 186990 - RNA, 1755 nt, Artificial Sequence; identical to SEQ ID NO: 186959
  derived and/or modified CDS sequence (opt4) from hemagglutinin__InfluenzaB__AGQ16278

SEQ ID NO: 186991 - RNA, 1755 nt, Artificial Sequence; identical to SEQ ID NO: 186959
  derived and/or modified CDS sequence (opt4) from hemagglutinin__InfluenzaB__AGQ16279

SEQ ID NO: 186992 - RNA, 1755 nt, Artificial Sequence; identical to SEQ ID NO: 186959
  derived and/or modified CDS sequence (opt4) from hemagglutinin__InfluenzaB__AGQ16280

SEQ ID NO: 186993 - RNA, 1755 nt, Artificial Sequence
  derived and/or modified CDS sequence (opt4) from hemagglutinin__InfluenzaB__AGQ16281
augaaggccaucaucgugcugcugaugguggugaccagcaacgccgacagaaucugcaccggcaucaccagcagcaacagcccccacguggugaagaccgccacccagggcgaggugaacgugaccggcgugaucccccugaccaccacccccaccaagagcuacuucgccaaccugaagggcaccaagaccagaggcaagcugugccccgacugccugaacugcaccgaccuggacguggcccugggcagacccaugugcgugggcaccacccccagcgccaaggccagcauccugcacgaggugagacccgugaccagcggcugcuuccccaucaugcacgacagaaccaagaucagacagcuggccaaccugcugagaggcuacgagaacaucagacugagcacccagaacgugaucgacgccgagaaggcccccggcggccccuacagacugggcaccagcggcagcugccccaacgccaccagcaagagcggcuucuucgccaccauggccugggccgugcccaaggacaacaacaagaacgccaccaacccccugaccguggaggugcccuacaucugcgccgagggcgaggaccagaucaccguguggggcuuccacagcgacaacaagacccagaugaagaaccuguacggcgacagcaacccccagaaguucaccagcagcgccaacggcgugaccacccacuacgugagccagaucggcagcuuccccgaccagaccgaggacggcggccugccccagagcggcagaaucgugguggacuacaugaugcagaagcccggcaagaccggcaccaucguguaccagagaggcgugcugcugccccagaagguguggugcgccagcggcagaagcaaggugaucaagggcagccugccccugaucggcgaggccgacugccugcacgagaaguacggcggccugaacaagagcaagcccuacuacaccggcgagcacgccaaggccaucggcaacugccccaucugggugaagaccccccugaagcuggccaacggcaccaaguacagaccccccgccaagcugcugaaggagagaggcuucuucggcgccaucgccggcuuccuggagggcggcugggagggcaugaucgccggcuggcacggcuacaccagccacggcgcccacggcguggccguggccgccgaccugaagagcacccaggaggccaucaacaagaucaccaagaaccugaacagccugagcgagcuggaggugaagaaccugcagagacugagcggcgccauggacgagcugcacaacgagauccuggagcuggacgagaagguggacgaccugagagccgacaccaucagcagccagaucgagcuggccgugcugcugagcaacgagggcaucaucaacagcgaggacgagcaccugcuggcccuggagagaaagcugaagaagaugcugggccccagcgccguggacaucggcaacggcugcuucgagaccaagcacaagugcaaccagaccugccuggacagaaucgccgccggcaccuucaacgccggcgaguucagccugcccaccuucgacagccugaacaucaccgccgccagccugaacgacgacggccuggacaaccacaccauccugcuguacuacagcaccgccgccagcagccuggccgugacccugaugcuggccaucuucaucguguacauggugagcagagacaacgugagcugcagcaucugccuguga

SEQ ID NO: 186994 - RNA, 1755 nt, Artificial Sequence
  derived and/or modified CDS sequence (opt4) from hemagglutinin__InfluenzaB__AGQ16282
augaaggccaucaucgugcugcugaugguggugaccagcaacgccgacagaaucugcaccggcaucaccagcagcaacagcccccacguggugaagaccgccacccagggcgaggugaacgugaccggcgugaucccccugaccaccacccccaccaagagcuacuucgccaaccugaagggcaccaagaccagaggcaagcugugccccgacugccugaacugcaccgaccuggacguggcccugggcagacccaugugcgugggcaccacccccagcgccaaggccagcauccugcacgaggugagacccgugaccagcggcugcuuccccaucaugcacgacagaaccaagaucagacagcuggccaaccugcugagaggcuacgagaacaucagacugagcacccagaacgugaucgacgccgagaaggcccccggcggccccuacagacugggcaccagcggcagcugccccaacgccaccagcaagagcggcuucuucgccaccauggccugggccgugcccaagggcaacaacaagaacgccaccaacccccugaccguggaggugcccuacaucugcgccgagggcgaggaccagaucaccguguggggcuuccacagcgacaacaagacccagaugaagaaccuguacggcgacagcaacccccagagauucaccagcagcgccaacggcgugaccacccacuacgugagccagaucggcggcuuccccgaccagaccgaggacggcggccugccccagagcggcagaaucgugguggacuacaugaugcagaagcccggcaagaccggcaccaucguguaccagagaggcgugcugcugccccagaagguguggugcgccagcggcagaagcaaggugaucaagggcagccugccccugaucggcgaggccgacugccugcacgagaaguacggcggccugaacaagagcaagcccuacuacaccggcgagcacgccaaggccaucggcaacugccccaucugggugaagaccccccugaagcuggccaacggcaccaaguacagaccccccgccaagcugcugaaggagagaggcuucuucggcgccaucgccggcuuccuggagggcggcugggagggcaugaucgccggcuggcacggcuacaccagccacggcgcccacggcguggccguggccgccgaccugaagagcacccaggaggccaucaacaagaucaccaagaaccugaacagccugagcgagcuggaggugaagaaccugcagagacugagcggcgccauggacgagcugcacaacgagauccuggagcuggacgagaagguggacgaccugagagccgacaccaucagcagccagaucgagcuggccgugcugcugagcaacgagggcaucaucaacagcgaggacgagcaccugcuggcccuggagagaaagcugaagaagaugcugggccccagcgccguggacaucggcaacggcugcuucgagaccaagcacaagugcaaccagaccugccuggacagaaucgccgccggcaccuucaacgccggcgaguucagccugcccaccuucgacagccugaacaucaccgccgccagccugaacgacgacggccuggacaaccacaccauccugcuguacuacagcaccgccgccagcagccuggccgugacccugaugcuggccaucuucaucguguacauggugagcagagacaacgugagcugcagcaucugccuguga

SEQ ID NO: 186995 - RNA, 1755 nt, Artificial Sequence
  derived and/or modified CDS sequence (opt4) from hemagglutinin__InfluenzaB__AGQ16283
augaaggccaucaucgugcugcugaugguggugaccagcaacgccgacagaaucugcaccggcaucaccagcagcaacagcccccacguggugaagaccgccacccacggcgaggugaacgugaccggcgugaucccccugaccaccacccccaccaagagcuacuucgccaaccugaagggcaccaagaccagaggcaagcugugccccgacugccugaacugcaccgaccuggacguggcccugggcagacccaugugcgugggcaccacccccagcgccaaggccagcauccugcacgaggugagacccgugaccagcggcugcuuccccaucaugcacgacagaaccaagaucagacagcuggccaaccugcugagaggcuacgagaacaucagacugagcacccagaacgugaucgacgccgagaaggcccccggcggccccuacagacugggcaccagcggcagcugccccaacgccaccagcaagagcggcuucuucgccaccauggccugggccgugcccaaggacaacaacaagaacgccaccaacccccugaccguggaggugcccuacaucugcgccgagggcgaggaccagaucgccguguggggcuuccacagcgacaacaagacccagaugaagaaccuguacggcgacagcaacccccagaaguucaccagcagcgccaacggcgugaccacccacuacgugagccagaucggcggcuuccccgaccagaccgaggacggcggccugccccagagcggcagaaucgugguggacuacaugaugcagaagcccggcaagaccggcaccaucguguaccagagaggcgugcugcugccccagaagguguggugcgccagcggcagaagcaaggugaucaagggcagccugccccugaucggcgaggccgacugccugcacgagaaguacggcggccugaacaagagcaagcccuacuacaccggcgagcacgccaaggccaucggcaacugccccaucugggugaagaccccccugaagcuggccaacggcaccaaguacagaccccccgccaagcugcugaaggagagaggcuucuucggcgccaucgccggcuuccuggagggcggcugggagggcaugaucgccggcuggcacggcuacaccagccacggcgcccacggcguggccguggccgccgaccugaagagcacccaggaggccaucaacaagaucaccaagaaccugaacagccugagcgagcuggaggugaagaaccugcagagacugagcggcgccauggacgagcugcacaacgagauccuggagcuggacgagaagguggacgaccugagagccgacaccaucagcagccagaucgagcuggccgugcugcugagcaacgagggcaucaucaacagcgaggacgagcaccugcuggcccuggagagaaagcugaagaagaugcugggccccagcgccguggacaucggcaacggcugcuucgagaccaagcacaagugcaaccagaccugccuggacagaaucgccgccggcaccuucaacgccggcgaguucagccugcccaccuucgacagccugaacaucaccgccgccagccugaacgacgacggccuggacaaccacaccauccugcuguacuacagcaccgccgccagcagccuggccgugacccugaugcuggccaucuucaucguguacauggugagcagagacaacgugagcugcagcaucugccuguga

SEQ ID NO: 186996 - RNA, 1758 nt, Artificial Sequence
  derived and/or modified CDS sequence (opt4) from hemagglutinin__InfluenzaB__AGQ16284
augaaggccaucaucgugcugcugaugguggugaccagcaacgccgacagaaucugcaccggcaucaccagcagcaacagcccccacguggugaagaccgccacccagggcgaggugaacgugaccggcgugaucccccugaccaccacccccaccaagagccacuucgccaaccugaagggcaccgagaccagaggcaagcugugccccaagugccugaacugcaccgaccuggacguggcccugggcagacccaagugcaccggcaagauccccagcgccagagugagcauccugcacgaggccagacccgugaccagcggcugcuuccccaucaugcacgacagaaccaagaucagacagcugcccaaccugcugagaggcuacgagcacaucaagcugagcacccacaacgugaucaacgccgagaacgcccccggcggccccuacaagaucggcaccagcggcagcugccccaacgugaccaacggcaacggcuucuucgccaccauggccugggccgugcccaagaacgacaagaacaagaccgccaccaacccccugaccaucgaggugcccuacaucugcaccgagggcgaggaccagaucaccguguggggcuuccacagcgacaacgagacccagauggccaagcuguacggcgacagcaagccccagaaguucaccagcagcgccaacggcgugaccacccacuacgugagccagaucggcggcuuccccaaccagaccgaggacggcggccugccccagagcggcagaaucgugguggacuacauggugcagaagagcggcaagaccggcaccaucaccuaccagagaggcauccugcugccccagaagguguggugcgccagcggcagaagcaaggugaucaagggcagccugccccugaucggcgaggccgacugccugcacgagaaguacggcggccugaacaagagcaagcccuacuacaccggcgagcacgccaaggccaucggcaacugccccaucugggugaagaccccccugaagcuggccaacggcaccaaguacagaccccccgccaagcugcugaaggagagaggcuucuucggcgccaucgccggcuuccuggagggcggcugggagggcaugaucgccggcuggcacggcuacaccagccacggcgcccacggcguggccguggccgccgaccugaagagcacccaggaggccaucaacaagaucaccaagaaccugaacagccugagcgagcuggaggugaagaaccugcagagacugagcggcgccauggacgagcugcacaacgagauccuggagcuggacgagaagguggacgaccugagagccgacaccaucagcagccagaucgagcuggccgugcugcugagcaacgagggcaucaucaacagcgaggacgagcaccugcuggcccuggagagaaagcugaagaagaugcugggccccagcgccguggagaucggcaacggcugcuucgagaccaagcacaagugcaaccagaccugccuggacagaaucgccgccggcaccuucgacgccggcgaguucagccugcccaccuucgacagccugaacaucaccgccgccagccugaacgacgacggccuggacaaccacaccauccugcuguacuacagcaccgccgccagcagccuggccgugacccugaugaucgccaucuucgugguguacauggugagcagagacaacgugagcugcagcaucugccuguga

SEQ ID NO: 186997 - RNA, 1755 nt, Artificial Sequence; identical to SEQ ID NO: 186959
  derived and/or modified CDS sequence (opt4) from hemagglutinin__InfluenzaB__AGQ16285

SEQ ID NO: 186998 - RNA, 1755 nt, Artificial Sequence; identical to SEQ ID NO: 186959
  derived and/or modified CDS sequence (opt4) from hemagglutinin__InfluenzaB__AGQ16286

SEQ ID NO: 186999 - RNA, 1755 nt, Artificial Sequence
  derived and/or modified CDS sequence (opt4) from hemagglutinin__InfluenzaB__AGQ16287
augaaggccaucaucgugcugcugaugguggugaccagcaacgccgacagaaucugcaccggcaucaccagcagcaacagcccccacguggugaagaccgccacccagggcgaggugaacgugaccggcgugaucccccugaccaccacccccaccaagagcuacuucgccaaccugaagggcaccaagaccagaggcaagcugugccccgacugccugaacugcaccgaccuggacguggcccugggcagacccaugugcgugggcaccacccccagcgccaaggccagcauccugcacgaggugagacccgugaccagcggcugcuuccccaucaugcacgacagaaccaagaucagacagcuggccaaccugcugagaggcuacgagaacaucagacugagcacccagaacgugaucgacgccgagaaggcccccggcggccccuacagacugggcaccagcggcagcugccccaacgccaccagcaagagcggcuucuucgccaccauggccugggccgugcccaaggacaacaacaagaacgccaccaacccccugaccguggaggugcccuacaucugcgaggagggcgaggaccagaucaccguguggggcuuccacagcgacaacaagacccagaugaagaaccuguacggcgacagcaacccccagaaguucaccagcagcgccaacggcgugaccacccacuacgugagccagaucggcggcuuccccgaccagaccgaggacggcggccugccccagagcggcagaaucgugguggacuacaugaugcagaagcccggcaagaccggcaccaucguguaccagagaggcgugcugcugccccagaagguguggugcgccagcggcagaagcaaggugaucaagggcagccugccccugaucggcgaggccgacugccugcacgagaaguacggcggccugaacaagagcaagcccuacuacaccggcgagcacgccaaggccaucggcaacugccccaucugggugaagaccccccugaagcuggccaacggcaccaaguacagaccccccgccaagcugcugaaggagagaggcuucuucggcgccaucgccggcuuccuggagggcggcugggagggcaugaucgccggcuggcacggcuacaccagccacggcgcccacggcguggccguggccgccgaccugaagagcacccaggaggccaucaacaagaucaccaagaaccugaacagccugagcgagcuggaggugaagaaccugcagagacugagcggcgccauggacgagcugcacaacgagauccuggagcuggacgagaagguggacgaccugagagccgacaccaucagcagccagaucgagcuggccgugcugcugagcaacgagggcaucaucaacagcgaggacgagcaccugcuggcccuggagagaaagcugaagaagaugcugggccccagcgccguggacaucggcaacggcugcuucgagaccaagcacaagugcaaccagaccugccuggacagaaucgccgccggcaccuucaacgccggcgaguucagccugcccaccuucgacagccugaacaucaccgccgccagccugaacgacgacggccuggacaaccacaccauccugcuguacuacagcaccgccgccagcagccuggccgugacccugaugcuggccaucuucaucguguacauggugagcagagacaacgugagcugcagcaucugccuguga

SEQ ID NO: 187000 - RNA, 1755 nt, Artificial Sequence; identical to SEQ ID NO: 186914
  derived and/or modified CDS sequence (opt4) from hemagglutinin__InfluenzaB__AGQ16289

SEQ ID NO: 187001 - RNA, 1755 nt, Artificial Sequence; identical to SEQ ID NO: 186914
  derived and/or modified CDS sequence (opt4) from hemagglutinin__InfluenzaB__AGQ16290

SEQ ID NO: 187002 - RNA, 1755 nt, Artificial Sequence
  derived and/or modified CDS sequence (opt4) from hemagglutinin__InfluenzaB__AGQ16291
augaaggccaucaucgugcugcugaugguggugaccagcaacgccgacagaaucugcaccggcaucaccagcagcaacagcccccacguggugaagaccgccacccagggcgaggugaacgugaccggcgugaucccccugaccaccacccccaccaagagcuacuucgccaaccugaagggcaccaagaccagaggcaagcugugccccgacugccugaacugcaccgaccuggacguggcccugggcagacccaugugcgugggcaccacccccagcgccaaggccagcauccugcacgaggugagacccgugaccagcggcugcuuccccaucaugcacgacagaaccaagaucagacagcuggccaaccugcugagaggcuacgagaacaucagacugagcacccagaacgugaucgacgccgagaaggcccccggcggccccuacagacugggcaccagcggcagcugccccaacaccaccagcaagagcggcuucuucgccaccauggccugggccgugcccaaggacaacaacaagaacgccaccaacccccugaccguggaggugcccuacaucugcgccgagggcgaggaccagaucgccguguggggcuuccacagcgacaacaagacccagaugaagaaccuguacggcgacagcaacccccagaaguucaccagcagcgccaacggcgugaccacccacuacgugagccagaucggcggcuuccccgaccagaccgaggacggcggccugccccagagcggcagaaucgugguggacuacaugaugcagaagcccggcaagaccggcaccaucguguaccagagaggcgugcugcugccccagaagguguggugcgccagcggcagaagcaaggugaucaagggcagccugccccugaucggcgaggccgacugccugcacgagaaguacggcggccugaacaagagcaagcccuacuacaccggcgagcacgccaaggccaucggcaacugccccaucugggugaagaccccccugaagcuggccaacggcaccaaguacagaccccccgccaagcugcugaaggagagaggcuucuucggcgccaucgccggcuuccuggagggcggcugggagggcaugaucgccggcuggcacggcuacaccagccacggcgcccacggcguggccguggccgccgaccugaagagcacccaggaggccaucaacaagaucaccaagaaccugaacagccugagcgagcuggaggugaagaaccugcagagacugagcggcgccauggacgagcugcacaacgagauccuggagcuggacgagaagguggacgaccugagagccgacaccaucagcagccagaucgagcuggccgugcugcugagcaacgagggcaucaucaacagcgaggacgagcaccugcuggcccuggagagaaagcugaagaagaugcugggccccagcgccguggacaucggcaacggcugcuucgagaccaagcacaagugcaaccagaccugccuggacagaaucgccgccggcaccuucaacgccggcgaguucagccugcccaccuucgacagccugaacaucaccgccgccagccugaacgacgacggccuggacaaccacaccauccugcuguacuacagcaccgccgccagcagccuggccgugacccugaugcuggccaucuucaucguguacauggugagcagagacaacgugagcugcagcaucugccuguga

SEQ ID NO: 187003 - RNA, 1755 nt, Artificial Sequence
  derived and/or modified CDS sequence (opt4) from hemagglutinin__InfluenzaB__AGQ16292
augaaggccaucaucgugcugcugaugguggugaccagcaacgccgacagaaucugcaccggcaucaccagcagcaacagcccccacguggugaagaccgccacccagggcgaggugaacgugaccggcgugaucccccugaccaccacccccaccaagagcuacuucgccaaccugaagggcaccaagaccagaggcaagcugugccccgacugccugaacugcaccgaccuggacguggcccugggcagacccaugugcgugggcaccacccccagcgccaaggccagcauccugcacgaggugagacccgugaccagcggcugcuuccccaucaugcacgacagaaccaagaucagacagcuggccaaccugcugagaggcuacgagaacaucagacugagcacccagaacgugaucgacgccgagaaggcccccggcggccccuacagacugggcaccagcggcagcugccccaacgccaccagcaagagcggcuucuucgccaccauggccugggccgugcccaaggacaacaacaagaacgccaccaacccccugaccguggaggugcccuacaucugcgccgagggcgaggaccagaucgccguguggggcuuccacagcgacaacaagacccagaugaagaaccuguacggcgacagcaacccccagaaguucaccagcagcgccaacggcgugaccacccacuacgugagccagaucggcggcuuccccgaccagaccgaggacggcggccugccccagagcggcagaaucgugguggacuacaugaugcagaagcccggcaagaccggcaccaucguguaccagagaggcgugcugcugccccagaagguguggugcgccagcggcagaagcaaggugaucaagggcagccugccccugaucggcgaggccgacugccugcacgagaaguacggcggccugaacaagagcaagcccuacuacaccggcgagcacgccaaggccaucggcaacugccccaucugggugaagaccccccugaagcuggccaacggcaccaaguacagaccccccgccaagcugcugaaggagagaggcuucuucggcgccaucgccggcuuccuggagggcggcugggagggcaugaucgccggcuggcacggcuacaccagccacggcgcccacggcguggccguggccgccgaccugaagagcacccaggaggccaucaacaagaucaccaagaaccugaacagccugagcgagcuggagaucaagaaccugcagagacugagcggcgccauggacgagcugcacaacgagauccuggagcuggacgagaagguggacgaccugagagccgacaccaucagcagccagaucgagcuggccgugcugcugagcaacgagggcaucaucaacagcgaggacgagcaccugcuggcccuggagagaaagcugaagaagaugcugggccccagcgccguggacaucggcaacggcugcuucgagaccaagcacaagugcaaccagaccugccuggacagaaucgccgccggcaccuucaacgccggcgaguucagccugcccaccuucgacagccugaacaucaccgccgccagccugaacgacgacggccuggacaaccacaccauccugcuguacuacagcaccgccgccagcagccuggccgugacccugaugcuggccaucuucaucguguacauggugagcagagacaacgugagcugcagcaucugccuguga

SEQ ID NO: 187004 - RNA, 1755 nt, Artificial Sequence; identical to SEQ ID NO: 187003
  derived and/or modified CDS sequence (opt4) from hemagglutinin__InfluenzaB__AGQ16293

SEQ ID NO: 187005 - RNA, 1755 nt, Artificial Sequence; identical to SEQ ID NO: 187003
  derived and/or modified CDS sequence (opt4) from hemagglutinin__InfluenzaB__AGQ16294

SEQ ID NO: 187006 - RNA, 1758 nt, Artificial Sequence
  derived and/or modified CDS sequence (opt4) from hemagglutinin__InfluenzaB__AGQ16295
augaaggccaucaucgugcugcugaugguggugaccagcaacgccgacagaaucugcaccggcaucaccagcagcaacagcccccacguggugaagaccgccacccagggcgaggugaacgugaccggcgccaucccccugaccaccacccccaccaagagccacuucgccaaccugaagggcaccgagaccagaggcaagcugugccccaagugccugaacugcaccgaccuggacguggcccugggcagacccaagugcaccggcaagauccccagcgccagagugagcauccugcacgaggugagacccgugaccagcggcugcuuccccaucaugcacgacagaaccaagaucagacagcugcccaaccugcugagaggcuacgagcacaucagacugagcacccacaacgugaucaacgccgagaacgcccccggcggccccuacaagaucggcaccagcggcagcugccccaacgugaccaacggcaacggcuucuucgccaccauggccugggccgugcccaagaacgacaagaacaagaccgagaccaacccccugaccaucgaggugcccuacaucugcaccgaggaggaggaccagaucaccguguggggcuuccacagcgacaacgagacccagauggccaagcuguacggcgacagcaagccccagaaguucaccagcagcgccaacggcgugaccacccacuacgugagccagaucggcggcuuccccaaccagaccgaggacggcggccugccccagagcggcagaaucgugguggacuacauggugcagaagagcggcaagaccggcaccaucaccuaccagagaggcauccugcugccccagaagguguggugcgccagcggcagaagcaaggugaucaagggcagccugccccugaucggcgaggccgacugccugcacgagaaguacggcggccugaacaagagcaagcccuacuacaccggcgagcacgccaaggccaucggcaacugccccaucugggugaagaccccccugaagcuggccaacggcaccaaguacagaccccccgccaagcugcugaaggagagaggcuucuucggcgccaucgccggcuuccuggagggcggcugggagggcaugaucgccggcuggcacggcuacaccagccacggcgcccacggcguggccguggccgccgaccugaagagcacccaggaggccaucaacaagaucaccaagaaccugaacagccugagcgagcuggaggugaagaaccugcagagacugagcggcgccauggacgagcugcacaacgagauccuggagcuggacgagaagguggacgaccugagagccgacaccaucagcagccagaucgagcuggccgugcugcugagcaacgagggcaucaucaacagcgaggacgagcaccugcuggcccuggagagaaagcugaagaagaugcugggccccagcgccguggagaucggcaacggcugcuucgagaccaagcacaagugcaaccagaccugccuggacagaaucgccgccggcaccuucgacgccggcgaguucagccugcccaccuucgacagccugaacaucaccgccgccagccugaacgacgacggccuggacaaccacaccauccugcuguacuacagcaccgccgccagcagccuggccgugacccugaugaucgccaucuucgugguguacauggugagcagagacaacgugagcugcagcaucugccuguga

SEQ ID NO: 187007 - RNA, 1758 nt, Artificial Sequence; identical to SEQ ID NO: 186947
  derived and/or modified CDS sequence (opt4) from hemagglutinin__InfluenzaB__AGQ16296

SEQ ID NO: 187008 - RNA, 1755 nt, Artificial Sequence; identical to SEQ ID NO: 186914
  derived and/or modified CDS sequence (opt4) from hemagglutinin__InfluenzaB__AGQ16297

SEQ ID NO: 187009 - RNA, 1755 nt, Artificial Sequence
  derived and/or modified CDS sequence (opt4) from hemagglutinin__InfluenzaB__AGQ16298
augaaggccaucaucgugcugcugaugguggugaccagcaacgccgacagaaucugcaccggcaucaccagcagcaacagcccccacguggugaagaccgccacccagggcgaggugaacgugaccggcgugaucccccugaccaccacccccaccaagagcuacuucgccaaccugaagggcaccaagaccagaggcaagcugugccccgacugccugaacugcaccgaccuggacguggcccugggcagacccaugugcgugggcaccacccccagcgccaaggccagcauccugcacgaggugagacccgugaccagcggcugcuuccccaucaugcacgacagaaccaagaucagacagcuggccaaccugcugagaggcuacgagaacaucagacugagcacccagaacgugaucgacgccgagaaggcccccggcggccccuacagacugggcaccagcggcagcugccccaacgccaccagcaagagcggcuucuucgccaccauggccugggccgugcccaaggacaacaacaagaacgccaccaacccccugaccguggaggugcccuacaucugcgccgagggcgaggaccagaucaccguguggggcuuccacagcgacaacaagacccagaugaagaaccuguacggcgacagcaacccccagaaguucaccagcagcgccaacggcgugaccacccacuacgugagccagaucggcggcuuccccgaccagaccgaggacggcggccugccccagagcggcagaaucgugguggacuacaugaugcagaagcccggcaagaccggcaccaucguguaccagagaggcgugcugcugccccagaagguguggugcgccagcggcagaagcaaggugaucaagggcagccugccccugaucggcgaggccgacugccugcacgagaaguacggcggccugaacaagagcaagcccuacuacaccggcgagcacgccaaggccaucggcaacugccccaucugggugaagaccccccugaagcuggccaacggcaccaaguacagaccccccgccaagcugcugaaggagagaggcuucuucggcgccaucgccggcuuccuggagggcggcugggagggcaugaucgccggcuggcacggcuacaccagccacggcgcccacggcguggccaucgccgccgaccugaagagcacccaggaggccaucaacaagaucaccaagaaccugaacagccugagcgagcuggaggugaagaaccugcagagacugagcggcgccauggacgagcugcacaacgagauccuggagcuggacgagaagguggacgaccugagagccgacaccaucagcagccagaucgagcuggccgugcugcugagcaacgagggcaucaucaacagcgaggacgagcaccugcuggcccuggagagaaagcugaagaagaugcugggccccagcgccguggacaucggcaacggcugcuucgagaccaagcacaagugcaaccagaccugccuggacagaaucgccgccggcaccuucaacgccggcgaguucagccugcccaccuucgacagccugaacaucaccgccgccagccugaacgacgacggccuggacaaccacaccauccugcuguacuacagcaccgccgccagcagccuggccgugacccugaugcuggccaucuucaucguguacauggugagcagagacaacgugagcugcagcaucugccuguga

SEQ ID NO: 187010 - RNA, 1755 nt, Artificial Sequence; identical to SEQ ID NO: 186959
  derived and/or modified CDS sequence (opt4) from hemagglutinin__InfluenzaB__AGQ16299

SEQ ID NO: 187011 - RNA, 1755 nt, Artificial Sequence; identical to SEQ ID NO: 186959
  derived and/or modified CDS sequence (opt4) from hemagglutinin__InfluenzaB__AGQ16300

SEQ ID NO: 187012 - RNA, 1755 nt, Artificial Sequence; identical to SEQ ID NO: 186914
  derived and/or modified CDS sequence (opt4) from hemagglutinin__InfluenzaB__AGQ16301

SEQ ID NO: 187013 - RNA, 1755 nt, Artificial Sequence; identical to SEQ ID NO: 186914
  derived and/or modified CDS sequence (opt4) from hemagglutinin__InfluenzaB__AGQ16302

SEQ ID NO: 187014 - RNA, 1755 nt, Artificial Sequence; identical to SEQ ID NO: 186914
  derived and/or modified CDS sequence (opt4) from hemagglutinin__InfluenzaB__AGQ16303

SEQ ID NO: 187015 - RNA, 1755 nt, Artificial Sequence; identical to SEQ ID NO: 186914
  derived and/or modified CDS sequence (opt4) from hemagglutinin__InfluenzaB__AGQ16305

SEQ ID NO: 187016 - RNA, 1758 nt, Artificial Sequence
  derived and/or modified CDS sequence (opt4) from hemagglutinin__InfluenzaB__AGQ16306
augaaggccaucaucgugcugcugaugguggugaccagcaacgccgacagaaucugcaccggcaucaccagcagcaacagcccccacguggugaagaccgccacccagggcgaggugaacgugaccggcgugaucccccugaccaccacccccaccaagagccacuucgccaaccugaagggcaccgagaccagaggcaagcugugccccaagugccugaacugcaccgaccuggacguggcccugggcagacccaagugcaccggcaagauccccagcgccagagugagcauccugcacgaggugagacccgugaccagcggcugcuuccccaucaugcacgacagaaccaagaucagacagcugcccaaccugcugagaggcuacgagcacaucagacugagcacccacaacgugaucaacgccgagaacgcccccggcggccccuacaagaucggcaccagcggcagcugccccaacgugaccaacggcaacggcuucuucgccaccauggccugggccgugcccaagaacgacaagaacaagaccgagaccaacccccugaccaucgaggugcccuacaucugcaaggagggcgaggaccagaucaccguguggggcuuccacagcgacaacgagacccagauggccaagcuguacggcgacagcaagccccagaaguucaccagcagcgccaacggcgugaccacccacuacgugagccagaucggcggcuuccccaaccagaccgaggacggcggccugccccagagcggcagaaucgugguggacuacauggugcagaagagcggcaagaccggcaccaucaccuaccagagaggcauccugcugccccagaagguguggugcgccagcggcagaagcaaggugaucaagggcagccugccccugaucggcgaggccgacugccugcacgagaaguacggcggccugaacaagagcaagcccuacuacaccggcgagcacgccaaggccaucggcaacugccccaucugggugaagaccccccugaagcuggccaacggcaccaaguacagaccccccgccaagcugcugaaggagagaggcuucuucggcgccaucgccggcuuccuggagggcggcugggagggcaugaucgccggcuggcacggcuacaccagccacggcgcccacggcguggccguggccgccgaccugaagagcacccaggaggccaucaacaagaucaccaagaaccugaacagccugagcgagcuggaggugaagaaccugcagagacugagcggcgccauggacgagcugcacaacgagauccuggagcuggacgagaagguggacgaccugagagccgacaccaucagcagccagaucgagcuggccgugcugcugagcaacgagggcaucaucaacagcgaggacgagcaccugcuggcccuggagagaaagcugaagaagaugcugggccccagcgccguggagaucggcaacggcugcuucgagaccaagcacaagugcaaccagaccugccuggacagaaucgccgccggcaccuucgacgccggcgaguucagccugcccaccuucgacagccugaacaucaccgccgccagccugaacgacgacggccuggacaaccacaccauccugcuguacuacagcaccgccgccagcagccuggccgugacccugaugaucgccaucuucgugguguacauggugagcagagacaacgugagcugcagcaucugccuguga

SEQ ID NO: 187017 - RNA, 1755 nt, Artificial Sequence; identical to SEQ ID NO: 186914
  derived and/or modified CDS sequence (opt4) from hemagglutinin__InfluenzaB__AGQ16307

SEQ ID NO: 187018 - RNA, 1758 nt, Artificial Sequence; identical to SEQ ID NO: 186947
  derived and/or modified CDS sequence (opt4) from hemagglutinin__InfluenzaB__AGQ16308

SEQ ID NO: 187019 - RNA, 1755 nt, Artificial Sequence
  derived and/or modified CDS sequence (opt4) from hemagglutinin__InfluenzaB__AGQ16309
augaaggccaucaucgugcugcugaugguggugaccagcaacgccgacagaaucugcaccggcaucaccagcagcaacagcccccacguggugaagaccgccacccagggcgaggugaacgugaccggcgugaucccccugaccaccacccccaccaagagcuacuucgccaaccugaagggcaccaagaccagaggcaagcugugccccgacugccugaacugcaccgaccuggacguggcccugggcagacccaugugcgugggcaccacccccagcgccaaggccagcauccugcacgaggugagacccgugaccagcggcugcuuccccaucaugcacgacagaaccaagaucagacagcuggccaaccugcugagaggcuacgagaacaucagacugagcacccagaacgugaucgacgccgagaaggcccccggcggccccuacagacugggcaccagcggcagcugccccaacgccaccagcaagagcggcuucuucgccaccauggccugggccgugcccaaggacaacaacaagaacgccaccaacccccugaccguggaggugcccuacaucugcgccgagggcgaggaccagaucaccguguggggcuuccacagcgacaacaagacccagaugaagaaccuguacggcgacagcaacccccagaaguucaccagcagcgccaacggcgugaccacccacuacgugagccagaucggcggcuuccccgaccagaccgaggacggcggccugccccagagcggcagaaucguggccgacuacaugaugcagaagcccggcaagaccggcaccaucguguaccagagaggcgugcugcugccccagaagguguggugcgccagcggcagaagcaaggugaucaagggcagccugccccugaucggcgaggccgacugccugcacgagaaguacggcggccugaacaagagcaagcccuacuacaccggcgagcacgccaaggccaucggcaacugccccaucugggugaagaccccccugaagcuggccaacggcaccaaguacagaccccccgccaagcugcugaaggagagaggcuucuucggcgccaucgccggcuuccuggagggcggcugggagggcaugaucgccggcuggcacggcuacaccagccacggcgcccacggcguggccguggccgccgaccugaagagcacccaggaggccaucaacaagaucaccaagaaccugaacagccugagcgagcuggaggugaagaaccugcagagacugagcggcgccauggacgagcugcacaacgagauccuggagcuggacgagaagguggacgaccugagagccgacaccaucagcagccagaucgagcuggccgugcugcugagcaacgagggcaucaucaacagcgaggacgagcaccugcuggcccuggagagaaagcugaagaagaugcugggccccagcgccguggacaucggcaacggcugcuucgagaccaagcacaagugcaaccagaccugccuggacagaaucgccgccggcaccuucaacgccggcgaguucagccugcccaccuucgacagccugaacaucaccgccgccagccugaacgacgacggccuggacaaccacaccauccugcuguacuacagcaccgccgccagcagccuggccgugacccugaugcuggccaucuucaucguguacauggugagcagagacaacgugagcugcagcaucugccuguga

SEQ ID NO: 187020 - RNA, 1755 nt, Artificial Sequence
  derived and/or modified CDS sequence (opt4) from hemagglutinin__InfluenzaB__AGQ16310
augaaggccaucaucgugcugcugaugguggugaccagcaacgccgacagaaucugcaccggcaucaccagcagcaacagcccccacguggugaagaccgccacccagggcgaggugaacgugaccggcgugaucccccugaccaccacccccaccaagagcuacuucgccaaccugaagggcaccaagaccagaggcaagcugugccccgacugccugaacugcaccgaccuggacguggcccugggcagacccaugugcgugggcaccacccccagcgccaaggccagcauccugcacgaggugagacccgugaccagcggcugcuuccccaucaugcacgacagaaccaagaucagacagcuggccaaccugcugagaggcuacgagaacaucagacugagcacccagaacgugaucgacgccgagaaggcccccggcggccccuacagacugggcaccagcggcagcugccccaacgccaccagcaagagcggcuucuucgccaccauggccugggccgugcccaaggacaacaacaagaacgccaccaacccccugaccguggaggugcccuacaucugcgccgagggcgaggaccagaucaccguguggggcuuccacagcgacaacaagacccagaugaagaaccuguacggcgacagcaacccccagaaguucaccagcagcgccaacggcgugaccacccacuacgugagccagaucggcggcuuccccgaccagaccgaggacggcggccugccccagagcggcagaaucgugguggacuacaugaugcagaagcccggcaagaccggcaccaucguguaccagagaggcgugcugcugccccagaagguguggugcgccagcggcagaagcaaggugaucaagggcagccugccccugaucggcgaggccgacugccugcacgagaaguacggcggccugaacaagagcaagcccuacuacaccggcgagcacgccaaggccaucggcaacugccccaucugggugaagaccccccugaagcuggccaacggcaccaaguacagaccccccgccaagcugcugaaggagagaggcuucuucggcgccaucgccggcuuccuggagggcggcugggagggcaugguggccggcuggcacggcuacaccagccacggcgcccacggcguggccguggccgccgaccugaagagcacccaggaggccaucaacaagaucaccaagaaccugaacagccugagcgagcuggaggugaagaaccugcagagacugagcggcgccauggacgagcugcacaacgagauccuggagcuggacgagaagguggacgaccugagagccgacaccaucagcagccagaucgagcuggccgugcugcugagcaacgagggcaucaucaacagcgaggacgagcaccugcuggcccuggagagaaagcugaagaagaugcugggccccagcgccguggacaucggcaacggcugcuucgagaccaagcacaagugcaaccagaccugccuggacagaaucgccgccggcaccuucaacgccggcgaguucagccugcccaccuucgacagccugaacaucaccgccgccagccugaacgacgacggccuggacaaccacaccauccugcuguacuacagcaccgccgccagcagccuggccgugacccugaugcuggccaucuucaucguguacauggugagcagagacaacgugagcugcagcaucugccuguga

SEQ ID NO: 187021 - RNA, 1758 nt, Artificial Sequence; identical to SEQ ID NO: 186947
  derived and/or modified CDS sequence (opt4) from hemagglutinin__InfluenzaB__AGQ16311

SEQ ID NO: 187022 - RNA, 1755 nt, Artificial Sequence; identical to SEQ ID NO: 186914
  derived and/or modified CDS sequence (opt4) from hemagglutinin__InfluenzaB__AGQ16312

SEQ ID NO: 187023 - RNA, 1755 nt, Artificial Sequence
  derived and/or modified CDS sequence (opt4) from hemagglutinin__InfluenzaB__AGQ16313
augaaggccaucaucgugcugcugaugguggugaccagcaacgccgacagaaucugcaccggcaucaccagcagcaacagcccccacguggugaagaccgccacccagggcgaggugaacgugaccggcgugaucccccugaccaccacccccaccaagagcuacuucgccaaccugaagggcaccaagaccagaggcaagcugugccccgacugccugaacugcaccgaccuggacguggcccugggcagacccaugugcgugggcaccacccccagcgccaaggccagcauccugcacgaggugagacccgugaccagcggcugcuuccccaucaugcacgacagaaccaagaucagacagcuggccaaccugcugagaggcuacgagaacaucagacugagcacccagaacgugaucgacgccgagaaggcccccggcggccccuacagacugggcaccagcggcagcugccccaacgccaccagcaagagcggcuucuucgccaccauggccugggccgugcccaaggacaacaacaagaacgccaccaacccccugaccguggaggugcccuacaucugcgccgagggcgaggaccagaucgccguguggggcuuccacagcgacaacaagacccagaugaagaaccuguacggcgacagcaacccccagaaguucaccagcagcgccaacggcgugaccacccacuacgugagccagaucggcggcuuccccgaccagaccgaggacggcggccugccccagagcggcagaaucgugguggacuacaugaugcagaagcccggcaagaccggcaccaucguguaccagagaggcgugcugcugccccagaagguguggugcgccagcggcagaagcaaggugaucaagggcagccugccccugaucggcgaggccgacugccugcacgagaaguacggcggccugaacaagagcaagcccuacuacaccggcgagcacgccaaggccaucggcaacugccccaucugggugaagaccccccugaagcuggccaacggcaccaaguacagaccccccgccaagcugcugaaggagaagggcuucuucggcgccaucgccggcuuccuggagggcggcugggagggcaugaucgccggcuggcacggcuacaccagccacggcgcccacggcguggccguggccgccgaccugaagagcacccaggaggccaucaacaagaucaccaagaaccugaacagccugagcgagcuggaggugaagaaccugcagagacugagcggcgccauggacgagcugcacaacgagauccuggagcuggacgagaagguggacgaccugagagccgacaccaucagcagccagaucgagcuggccgugcugcugagcaacgagggcaucaucaacagcgaggacgagcaccugcuggcccuggagagaaagcugaagaagaugcugggccccagcgccguggacaucggcaacggcugcuucgagaccaagcacaagugcaaccagaccugccuggacagaaucgccgccggcaccuucaacgccggcgaguucagccugcccaccuucgacagccugaacaucaccgccgccagccugaacgacgacggccuggacaaccacaccauccugcuguacuacagcaccgccgccagcagccuggccgugacccugaugcuggccaucuucaucguguacauggugagcagagacaacgugagcugcagcaucugccuguga

SEQ ID NO: 187024 - RNA, 1758 nt, Artificial Sequence
  derived and/or modified CDS sequence (opt4) from hemagglutinin__InfluenzaB__AGQ16314
augaaggccaucaucgugcugcugaugguggugaccagcaacgccgacagaaucugcaccggcaucaccagcagcaacagcccccacguggugaagaccgccacccagggcgaggugaacgugaccggcgugaucccccugaccaccacccccaccaagagccacuucgccaaccugaagggcaccgagaccagaggcaagcugugccccaagugccugaacugcaccgaccuggacguggcccugggcagacccaagugcaccggcaagauccccagcgccagagugagcauccugcacgaggugagacccgugaccagcggcugcuuccccaucaugcacgacagaaccaagaucagacagcugcccaaccugcugagaggcuacgagcacaucagacugagcacccacaacgugaucaacgccgagaacgcccccggcggccccuacaagaucggcaccagcggcagcugccccaacgugaccaacggcaacggcuucuucgccaccauggccugggccgugcccaagaacgacaagaacaagaccgagaccaacccccugaccaucgaggugcccuacaucugcaccgaggaggaggaccagaucaccguguggggcuuccacagcgacaacgagacccagauggccaagcuguacggcgacagcaagccccagaaguucaccagcagcgccaacggcgugaccacccacuacgugagccagaucggcggcuuccccaaccagaccgaggacggcggccugccccagagcggcagaaucgugguggacuacauggugcagaagagcggcaagaccggcaccaucaccuaccagagaggcauccugcugccccagaagguguggugcgccagcggcagaagcaaggugaucaagggcagccugccccugaucggcgaggccgacugccugcacgagaaguacggcggccugaacaagagcaagcccuacuacaccggcgagcacgccaaggccaucggcaacugccccaucugggugaagaccccccugaagcuggccaacggcaccaaguacagaccccccgccaagcugcugaaggagagaggcuucuucggcgccaucgccggcuuccuggagggcggcugggagggcaugaucgccggcuggcacggcuacaccagccacggcgcccacggcguggccguggccgccgaccugaagagcacccaggaggccaucaacaagaucaccaagaaccugaacagccugagcgagcuggaggugaagaaccugcagagacugagcggcgccauggacgagcugcacaacgagauccuggagcuggacgagaagguggacgaccugagagccgacaccaucagcagccagaucgagcuggccgugcugcugagcaacgagggcaucaucaacagcgaggacgagcaccugcuggcccuggagagaaagcugaagaagaugcugggccccagcgccguggagaucggcaacggcugcuucgagaccaagcacaagugcaaccagaccugccuggacagaaucgccgccggcaccuucgacgccggcgaguucagccugcccaccuucgacagccugaacaucaccgccgccagccugaacgacgacggccuggacaaccacaccauccugcuguacuacagcaccgccgccagcagccuggccgugacccugaugaucgccaucuucgugguguacauggugagcagagacaacgugagcugcagcaucugccuguga

SEQ ID NO: 187025 - RNA, 1755 nt, Artificial Sequence
  derived and/or modified CDS sequence (opt4) from hemagglutinin__InfluenzaB__AGQ16315
augaaggccaucaucgugcugcugaugguggugaccagcaacgccgacagaaucugcaccggcaucaccagcagcaacagcccccacguggugaagaccgccacccagggcgaggugaacgugaccggcgugaucccccugaccaccacccccaccaagagcuacuucgccaaccugaagggcaccaagaccagaggcaagcugugccccgacugccugaacugcaccgaccuggacguggcccugggcagacccaugugcgugggcaccacccccagcgccaaggccagcauccugcacgaggugagacccgugaccagcggcugcuuccccaucaugcacgacagaaccaagaucagacagcuggccaaccugcugagaggcuacgagaacaucagacugagcacccagaccgugaucgacgccgagaaggcccccggcggccccuacagacugggcaccagcggcagcugccccaacgccaccagcaagagcggcuucuucgccaccauggccugggccgugcccaaggacaacaacaagaacgccaccaacccccugaccguggaggugcccuacaucugcgccgagggcgaggaccagaucaccguguggggcuuccacagcgacaacaagacccagaugaagaaccuguacggcgacagcaacccccagaaguucaccagcagcgccaacggcaucaccacccacuacgugagccagaucggcggcuuccccgaccagaccgaggacggcggccugccccagagcggcagaaucgugguggacuacaugaugcagaagcccggcaagaccggcaccaucguguaccagagaggcgugcugcugccccagaagguguggugcgccagcggcagaagcaaggugaucaagggcagccugccccugaucggcgaggccgacugccugcacgagaaguacggcggccugaacaagagcaagcccuacuacaccggcgagcacgccaaggccaucggcaacugccccaucugggugaagaccccccugaagcuggccaacggcaccaaguacagaccccccgccaagcugcugaaggagagaggcuucuucggcgccaucgccggcuuccuggagggcggcugggagggcaugaucgccggcuggcacggcuacaccagccacggcgcccacggcguggccguggccgccgaccugaagagcacccaggaggccaucaacaagaucaccaagaaccugaacagccugagcgagcuggaggugaagaaccugcagagacugagcggcgccauggacgagcugcacaacgagauccuggagcuggacgagaagguggacgaccugagagccgacaccaucagcagccagaucgagcuggccgugcugcugagcaacgagggcaucaucaacagcgaggacgagcaccugcuggcccuggagagaaagcugaagaagaugcugggccccagcgccguggacaucggcaacggcugcuucgagaccaagcacaagugcaaccagaccugccuggacagaaucgccgccggcaccuucaacgccggcgaguucagccugcccaccuucgacagccugaacaucaccgccgccagccugaacgacgacggccuggacaaccacaucauccugcuguacuacagcaccgccgccagcagccuggccgugacccugaugcuggccaucuucaucguguacauggugagcagagacaacgugagcugcagcaucugccuguga

SEQ ID NO: 187026 - RNA, 1755 nt, Artificial Sequence; identical to SEQ ID NO: 186914
  derived and/or modified CDS sequence (opt4) from hemagglutinin__InfluenzaB__AGQ16316

SEQ ID NO: 187027 - RNA, 1755 nt, Artificial Sequence; identical to SEQ ID NO: 186914
  derived and/or modified CDS sequence (opt4) from hemagglutinin__InfluenzaB__AGQ16317

SEQ ID NO: 187028 - RNA, 1758 nt, Artificial Sequence; identical to SEQ ID NO: 186705
  derived and/or modified CDS sequence (opt4) from hemagglutinin__InfluenzaB__AGQ16318

SEQ ID NO: 187029 - RNA, 1755 nt, Artificial Sequence
  derived and/or modified CDS sequence (opt4) from hemagglutinin__InfluenzaB__AGQ16319
augaaggccaucaucgugcugcugaugguggugaccagcaacgccgacagaaucugcaccggcaucaccagcagcaacagcccccacguggugaagaccgccacccagggcgaggugaacgugaccggcgugaucccccugaccaccacccccaccaagagcuacuucgccaaccugaagggcaccaagaccagaggcaagcugugccccggcugccugaacugcaccgaccuggacguggcccugggcagacccaugugcgugggcaccacccccagcgccaaggccagcauccugcacgaggugagacccgugaccagcggcugcuuccccaucaugcacgacagaaccaagaucagacagcuggccaaccugcugagaggcuacgagaacaucagacugagcacccagaacgugaucgacgccgagaaggcccccggcggccccuacagacugggcaccagcggcagcugccccaacgccaccagcaagagcggcuucuucgccaccauggccugggccgugcccaaggacaacaacaagaacgccaccaacccccugaccguggaggugcccuacaucugcgccgagggcgaggaccagaucgccguguggggcuuccacagcgacaacaagacccagaugaagaaccuguacggcgacagcaacccccagaaguucaccagcagcgccaacggcgugaccacccacuacgugagccagaucggcggcuuccccgaccagaccgaggacggcggccugccccagagcggcagaaucgugguggacuacaugaugcagaagcccggcaagaccggcaccaucguguaccagagaggcgugcugcugccccagaagguguggugcgccagcggcagaagcaaggugaucaagggcagccugccccugaucggcgaggccgacugccugcacgagaaguacggcggccugaacaagagcaagcccuacuacaccggcgagcacgccaaggccaucggcaacugccccaucugggugaagaccccccugaagcuggccaacggcaccaaguacagaccccccgccaagcugcugaaggagagaggcuucuucggcgccaucgccggcuuccuggagggcggcugggagggcaugaucgccggcuggcacggcuacaccagccacggcgcccacggcguggccguggccgccgaccugaagagcacccaggaggccaucaacaagaucaccaagaaccugaacagccugagcgagcuggaggugaagaaccugcagagacugagcggcgccauggacgagcugcacaacgagauccuggagcuggacgagaagguggacgaccugagagccgacaccaucagcagccagaucgagcuggccgugcugcugagcaacgagggcaucaucaacagcgaggacgagcaccugcuggcccuggagagaaagcugaagaagaugcugggccccagcgccguggacaucggcaacggcugcuucgagaccaagcacaagugcaaccagaccugccuggacagaaucgccgccggcaccuucaacgccggcgaguucagccugcccaccuucgacagccugaacaucaccgccgccagccugaacgacgacggccuggacaaccacaccauccugcuguacuacagcaccgccgccagcagccuggccgugacccugaugcuggccaucuucaucguguacauggugagcagagacaacgugagcugcagcaucugccuguga

SEQ ID NO: 187030 - RNA, 1755 nt, Artificial Sequence; identical to SEQ ID NO: 186959
  derived and/or modified CDS sequence (opt4) from hemagglutinin__InfluenzaB__AGQ16320

SEQ ID NO: 187031 - RNA, 1755 nt, Artificial Sequence; identical to SEQ ID NO: 186914
  derived and/or modified CDS sequence (opt4) from hemagglutinin__InfluenzaB__AGQ16321

SEQ ID NO: 187032 - RNA, 1755 nt, Artificial Sequence; identical to SEQ ID NO: 186914
  derived and/or modified CDS sequence (opt4) from hemagglutinin__InfluenzaB__AGQ16322

SEQ ID NO: 187033 - RNA, 1758 nt, Artificial Sequence
  derived and/or modified CDS sequence (opt4) from hemagglutinin__InfluenzaB__AGQ16323
augaaggccaucaucgugcugcugaugguggugaccagcaacgccgacagaaucugcaccggcaucaccagcagcaacagcccccacguggugaagaccgccacccagggcgaggugaacgugaccggcgugaucccccugaccaccacccccaccaagagccacuucgccagccugaagggcaccgagaccagaggcaagcugugccccaagugccugaacugcaccgaccuggacguggcccugggcagacccaagugcaccggcaagauccccagcgccagagugagcauccugcacgaggugagacccgugaccagcggcugcuuccccaucaugcacgacagaaccaagaucagacagcugcccaaccugcugagaggcuacgagcacaucagacugagcacccacaacgugaucaacgccgaggacgcccccggcggccccuacaagaucggcaccagcggcagcugccccaacgugaccaacggcaacggcuucuucgccaccauggccugggccgugcccaagaacgacaagaacaagaccgccaccaacccccugaccaucgaggugcccuacaucugcaccgagggcgaggaccagaucaccguguggggcuuccacagcgacaacgagacccagauggccaagcuguacggcgacagcaagccccagaaguucaccagcagcgccaacggcgugaccacccacuacgugagccagaucggcggcuuccccaaccagaccgaggacggcggccugccccagagcggcagaaucgugguggacuacauggugcagaagagcggcaagaccggcaccaucaccuaccagagaggcauccugcugccccagaagguguggugcgccagcggcagaagcaaggugaucaagggcagccugccccugaucggcgaggccgacugccugcacgagaaguacggcggccugaacaagagcaagcccuacuacaccggcgagcacgccaaggccaucggcaacugccccaucugggugaagaccccccugaagcuggccaacggcaccaaguacagaccccccgccaagcugcugaaggagagaggcuucuucggcgccaucgccggcuuccuggagggcggcugggagggcaugaucgccggcuggcacggcuacaccagccacggcgcccacggcguggccguggccgccgaccugaagagcacccaggaggccaucaacaagaucaccaagaaccugaacagccugagcgagcuggaggugaagaaccugcagagacugagcggcgccauggacgagcugcacaacgagauccuggagcuggacgagaagguggacgaccugagagccgacaccaucagcagccagaucgagcuggccgugcugcugagcaacgagggcaucaucaacagcgaggacgagcaccugcuggcccuggagagaaagcugaagaagaugcugggccccagcgccguggagaucggcaacggcugcuucgagaccaagcacaagugcaaccagaccugccuggacagaaucgccgccggcaccuucgacgccggcgaguucagccugcccaccuucgacagccugaacaucaccgccgccagccugaacgacgacggccuggacaaccacaccauccugcuguacuacagcaccgccgccagcagccuggccgugacccugaugaucgccaucuucgugguguacauggugagcagagacaacgugagcugcagcaucugccuguga

SEQ ID NO: 187034 - RNA, 1755 nt, Artificial Sequence; identical to SEQ ID NO: 186914
  derived and/or modified CDS sequence (opt4) from hemagglutinin__InfluenzaB__AGQ16324

SEQ ID NO: 187035 - RNA, 1755 nt, Artificial Sequence; identical to SEQ ID NO: 186914
  derived and/or modified CDS sequence (opt4) from hemagglutinin__InfluenzaB__AGQ16325

SEQ ID NO: 187036 - RNA, 1755 nt, Artificial Sequence; identical to SEQ ID NO: 186914
  derived and/or modified CDS sequence (opt4) from hemagglutinin__InfluenzaB__AGQ16326

SEQ ID NO: 187037 - RNA, 1755 nt, Artificial Sequence; identical to SEQ ID NO: 186914
  derived and/or modified CDS sequence (opt4) from hemagglutinin__InfluenzaB__AGQ16327

SEQ ID NO: 187038 - RNA, 1758 nt, Artificial Sequence
  derived and/or modified CDS sequence (opt4) from hemagglutinin__InfluenzaB__AGQ16328
augaaggccaucaucgugcugcugaugguggugaccagcaacgccgacagaaucugcaccggcaucaccagcagcaacagcccccacguggugaagaccgccacccagggcgaggugaacgugaccggcgugaucccccugaccaccacccccaccaagagccacuucgccaaccugaagggcaccgagaccagaggcaagcugugccccaagugccugaacugcaccgaccuggacguggcccugggcagacccaagugcaccggcaagacccccagcgccagagugagcauccugcacgaggugagacccgugaccagcggcugcuuccccaucaugcacgacagaaccaagaucagacagcugcccaaccugcugagaggcuacgagcacaucagacugagcacccacaacgugaucaacgccgagaacgcccccggcggccccuacaagaucggcaccagcggcagcugccccaacgugaccaacggcaacggcuucuucgccaccauggccugggccgugcccaagaacgacaagaacaagaccgccaccaacccccugaccaucgaggugcccuacaucugcaccgagggcgaggaccagaucaccguguggggcuuccacagcgacaacgagacccagauggccaagcuguacggcgacagcaacccccagaaguucaccagcagcgccaacggcgugaccacccacuacgugagccagaucggcggcuuccccaaccagaccgaggacggcggccugccccagagcggcagaaucgugguggacuacauggugcagaagagcggcaagaccggcaccaucaccuaccagagaggcauccugcugccccagaagguguggugcgccagcggcagaagcaaggugaucaagggcagccugccccugaucggcgaggccgacugccugcacgagaaguacggcggccugaacaagagcaagcccuacuacaccggcgagcacgccaaggccaucggcaacugccccaucugggugaagaccccccugaagcuggccaacggcaccaaguacagaccccccgccaagcugcugaaggagagaggcuucuucggcgccaucgccggcuuccuggagggcggcugggagggcaugaucgccggcuggcacggcuacaccagccacggcgcccacggcguggccguggccgccgaccugaagagcacccaggaggccaucaacaagaucaccaagaaccugaacagccugagcgagcuggaggugaagaaccugcagagacugagcggcgccauggacgagcugcacaacgagauccuggagcuggacgagaagguggacgaccugagagccgacaccaucagcagccagaucgagcuggccgugcugcugagcaacgagggcaucaucaacagcgaggacgagcaccugcuggcccuggagagaaagcugaagaagaugcugggccccagcgccguggagaucggcaacggcugcuucgagaccaagcacaagugcaaccagaccugccuggacagaaucgccgccggcaccuucgacgccggcgaguucagccugcccaccuucgacagccugaacaucaccgccgccagccugaacgacgacggccuggacaaccacaccauccugcuguacuacagcaccgccgccagcagccuggccgugacccugaugaucgccaucuucgugguguacauggugagcagagacaacgugagcugcagcaucugccuguga

SEQ ID NO: 187039 - RNA, 1758 nt, Artificial Sequence
  derived and/or modified CDS sequence (opt4) from hemagglutinin__InfluenzaB__AGX15487
augaaggccaucaucgugcugcugaugguggugaccagcaacgccgacagaaucugcaccggcaucaccagcagcaacagcccccacguggugaagaccgccacccagggcgaggugaacgugaccggcgugaucccccugaccaccacccccaccaagagccacuucgccaaccugaagggcaccaagaccagaggcaagcugugccccaagugccugaacugcaccgaccuggacguggcccugggcagacccaagugcaccggcaacauccccagcgccaaggugagcauccugcacgaggugagacccgugaccagcggcugcuuccccaucaugcacgacagaaccaagaucagacagcugcccaaccugcugagaggcuacgagcacaucagacugagcacccacaacgugaucaacgccgagaaggcccccggcggccccuacaagaucggcaccagcggcagcugccccaacgugaccaacggcaacggcuucuucgccaccauggccugggccgugcccaagaacgacaacaacaagaccgccaccaacagccugaccaucgaggugcccuacaucugcaccgagggcgaggaccagaucaccguguggggcuuccacagcgacaacgagacccagauggccaagcuguacggcgacagcaagccccagaaguucaccagcagcgccaacggcgugaccacccacuacgugagccagaucggcggcuuccccaaccagaccgaggacggcggccugccccagagcggcagaaucgugguggacuacauggugcagaagagcggcaagaccggcaccaucaccuaccagagaggcauccugcugccccagaagguguggugcgccagcggcagaagcaaggugaucaagggcagccugccccugaucggcgaggccgacugccugcacgagaaguacggcggccugaacaagagcaagcccuacuacaccggcgagcacgccaaggccaucggcaacugccccaucugggugaagaccccccugaagcuggccaacggcaccaaguacagaccccccgccaagcugcugaaggagagaggcuucuucggcgccaucgccggcuuccuggagggcggcugggagggcaugaucgccggcuggcacggcuacaccagccacggcgcccacggcguggccguggccgccgaccugaagagcacccaggaggccaucaacaagaucaccaagaaccugaacagccugagcgagcuggaggugaagaaccugcagagacugagcggcgccauggacgagcugcacaacgagauccuggagcuggacgagaagguggacgaccugagagccgacaccaucagcagccagaucgagcuggccgugcugcugagcaacgagggcaucaucaacagcgaggacgagcaccugcuggcccuggagagaaagcugaagaagaugcugggccccagcgccguggagaucggcaacggcugcuucgagaccaagcacaagugcaaccagaccugccuggacagaaucgccgccggcaccuucgacgccggcgaguucagccugcccaccuucgacagccugaacaucaccgccgccagccugaacgacgacggccuggacaaccacaccauccugcuguacuacagcaccgccgccagcagccuggccgugacccugaugaucgccaucuucgugguguacauggugagcagagacaacgugagcugcagcaucugccuguga

SEQ ID NO: 187040 - RNA, 1758 nt, Artificial Sequence; identical to SEQ ID NO: 187039
  derived and/or modified CDS sequence (opt4) from hemagglutinin__InfluenzaB__AGX15496

SEQ ID NO: 187041 - RNA, 1758 nt, Artificial Sequence
  derived and/or modified CDS sequence (opt4) from hemagglutinin__InfluenzaB__AGX15518
augaaggccaucaucgugcugcugaugguggugaccagcaacgccgacagaaucugcaccggcaucaccagcagcaacagcccccacguggugaagaccgccacccagggcgaggugaacgugaccggcgugaucccccugaccaccgcccccaccaagagccacuucgccaaccugaagggcaccaagaccagaggcaagcugugccccaagugccugaacugcaccgaccuggacguggcccugggcagacccaagugcaccggcaacauccccagcgccgaggugagcauccugcacgaggugagacccgugaccagcggcugcuuccccaucaugcacgacagaaccaagaucagacagcugcccaaccugcugagaggcuacgagcacaucagacugagcacccacaacgugaucaacgccgagaaggcccccggcggccccuacaagaucggcaccagcggcagcugccccaacgugaccaacggcaacggcuucuucgccaccauggccugggccgugcccaagaacgacaacaacaagaccgccaccaacagccugaccaucgaggugcccuacaucugcaccgagggcgaggaccagaucaccaucuggggcuuccacagcgacaacgagacccagauggccaagcuguacggcgacagcaagccccagaaguucaccagcagcgccaacggcgugaccacccacuacgugagccagaucggcggcuuccccaaccagaccgaggacggcggccugccccagagcggcagaaucgugguggacuacauggugcagaagcccggcaagaccggcaccaucaccuaccagagaggcauccugcugccccagaagguguggugcgccagcggcagaagcaaggugaucaagggcagccugccccugaucggcgaggccgacugccugcacgagaaguacggcggccugaacaagagcaagcccuacuacaccggcgagcacgccaaggccaucggcaacugccccaucugggugaagaccccccugaagcuggccaacggcaccaaguacagaccccccgccaagcugcugaaggagagaggcuucuucggcgccaucgccggcuuccuggagggcggcugggagggcaugaucgccggcuggcacggcuacaccagccacggcgcccacggcguggccguggccgccgaccugaagagcacccaggaggccaucaacaagaucaccaagaaccugaacagccugagcgagcuggaggugaagaaccugcagagacugagcagcgccauggacgagcugcacaacgagauccuggagcuggacgagaagguggacgaccugagagccgacaccaucagcagccagaucgagcuggccgugcugcugagcaacgagggcaucaucaacagcgaggacgagcaccugcuggcccuggagagaaagcugaagaagaugcugggccccagcgccguggagaucggcaacggcugcuucgagaccaagcacaagugcaaccagaccugccuggacagaaucgccgccggcaccuucgacgccggcgaguucagccugcccaccuucgacagccugaacaucaccgccgccagccugaacgacgacggccuggacaaccacaccauccugcuguacuacagcaccgccgccagcagccuggccgugacccugaugaucgccaucuucgugguguacauggugagcagagacaacgugagcugcagcaucugccuguga

SEQ ID NO: 187042 - RNA, 1758 nt, Artificial Sequence
  derived and/or modified CDS sequence (opt4) from hemagglutinin__InfluenzaB__AGX15529
augaaggccaucaucgugcugcugaugguggugaccagcaacgccgacagagugugcaccggcaucaccagcagcaacagcccccacguggugaagaccgccacccagggcgaggugaacgugaccggcgugaucccccugaccaccacccccaccaagagccacuucgccaaccugaagggcaccaagaccagaggcaagcugugccccaagugccugaacugcaccgaccuggacguggcccugggcagacccaagugcaccggcaacauccccagcgccgaggugagcauccuguacgaggugagacccgugaccagcggcugcuuccccaucaugcacgacagaaccaagaucagacagcugcccaaccugcugagaggcuacgagcacaucagacugagcacccacaacgugaucaacgccgagaaggcccccggcggccccuacaagaucggcaccagcggcagcugccccaacgugaccaacggcaacggcuucuucgccaccauggccugggccgugcccaagaacgacaacaacaagaccgccaccaacagccugaccaucgaggugcccuacaucugcaccgagggcgaggaccagaucaccaucuggggcuuccacagcgacaacgagacccagauggccaagcuguacggcgacagcaagccccagaaguucaccagcagcgccaacggcgugaccacccacuacgugagccagaucggcggcuuccccaaccagaccgaggacggcggccugccccagagcggcagaaucgugguggacuacauggugcagaagagcggcaagaccggcaccaucaccuaccagagaggcauccugcugccccagaagguguggugcgccagcggcagaagcaaggugaucaagggcacccugccccugaucggcgaggccgacugccugcacgagaaguacggcggccugaacaagagcaagcccuacuacaccggcgagcacgccaaggccaucggcaacugccccaucugggugaagaccccccugaagcuggccaacggcaccaaguacagaccccccgccaagcugcugaaggagagaggcuucuucggcgccaucgccggcuuccuggagggcggcugggagggcaugaucgccggcuggcacggcuacaccagccacggcgcccacggcguggccguggccgccgaccugaagagcacccaggaggccaucaacaagaucaccaagaaccugaacagccugagcgagcuggaggugaagaaccugcagagacugagcggcgccauggacgagcugcacaacgagauccuggagcuggacgagaagguggacgaccugagagccgacaccaucagcagccagaucgagcuggccgugcugcugagcaacgagggcaucaucaacagcgaggacgagcaccugcuggcccuggagagaaagcugaagaagaugcugggccccagcgccguggagaucggcaacggcugcuucgagaccaagcacaagugcaaccagaccugccuggacagaaucgccgccggcaccuucgacgccggcgaguucagccugcccaccuucgacagccugaacaucaccgccgccagccugaacgacgacggccuggacaaccacaccauccugcuguacuacagcaccgccgccagcagccuggccgugacccugaugaucgccaucuucgugguguacauggugagcagagacaacgugagcugcagcaucugccuguga

SEQ ID NO: 187043 - RNA, 1758 nt, Artificial Sequence; identical to SEQ ID NO: 186633
  derived and/or modified CDS sequence (opt4) from hemagglutinin__InfluenzaB__AGX15541

SEQ ID NO: 187044 - RNA, 1758 nt, Artificial Sequence
  derived and/or modified CDS sequence (opt4) from hemagglutinin__InfluenzaB__AGX15552
augaaggccaucaucgugcugcugaugguggugaccagcaacgccgacagaaucugcaccggcaucaccagcagcaacagcccccacguggugaagaccgccacccagggcgaggugaacgugaccggcgugaucccccugaccaccacccccaccaagagccacuucgccaaccugaagggcaccgagaccagaggcaagcugugccccaagugccugaacugcaccgaccuggacguggcccugggcagacccaagugcaccggcaacauccccagcgccagagugagcauccugcacgaggugagacccgugaccagcggcugcuuccccaucaugcacgacagaaccaagaucagacagcugcccaaccugcugagaggcuacgagcacaucagacugagcacccacaacgugaucaacgccaagaacgcccccggcggccccuacaagaucggcaccagcggcagcugccccaacgugaccaacggcaacggcuucuucgccaccauggccugggccgugcccaagaacgacaacaacaagaccgccaccaacagccugaccaucgaggugcccuacaucugcaccgagggcgaggaccagaucaccguguggggcuuccacagcgacaacgagacccagauggccaagcuguacggcgacagcaagccccagaaguucaccagcagcgccaacggcgugaccacccacuacgugagccagaucggcggcuuccccaaccagaccgaggacggcggccugccccagagcggcagaaucgugguggacuacauggugcagaagagcggcaagaccggcaccaucaccuaccagagaggcauccugcugccccagaagguguggugcgccagcggcagaagcaaggugaucaagggcagccugccccugaucggcgaggccgacugccugcacgagaaguacggcggccugaacaagagcaagcccuacuacaccggcgagcacgccaaggccaucggcaacugccccaucugggugaagaccccccugaagcuggccaacggcaccaaguacagaccccccgccaagcugcugaaggagagaggcuucuucggcgccaucgccggcuuccuggagggcggcugggagggcaugaucgccggcuggcacggcuacaccagccacggcgcccacggcguggccguggccgccgaccugaagagcacccaggaggccaucaacaagaucaccaagaaccugaacagccugagcgagcuggaggugaagaaccugcagagacugagcggcgccauggacgagcugcacaacgagauccuggagcuggacgagaagguggacgaccugagagccgacaccaucagcagccagaucgagcuggccgugcugcugagcaacgagggcaucaucaacagcgaggacgagcaccugcuggcccuggagagaaagcugaagaagaugcugggccccagcgccguggagaucggcaacggcugcuucgagaccaagcacaagugcaaccagaccugccuggacagaaucgccgccggcaccuucgacgccggcgaguucagccugcccaccuucgacagccugaacaucaccgccgccagccugaacgacgacggccuggacaaccacaccauccugcuguacuacagcaccgccgccagcagccuggccgugacccugaugaucgccaucuucgugguguacauggugagcagagacaacgugagcugcagcaucugccuguga

SEQ ID NO: 187045 - RNA, 1758 nt, Artificial Sequence; identical to SEQ ID NO: 186642
  derived and/or modified CDS sequence (opt4) from hemagglutinin__InfluenzaB__AGX15563

SEQ ID NO: 187046 - RNA, 1758 nt, Artificial Sequence; identical to SEQ ID NO: 186642
  derived and/or modified CDS sequence (opt4) from hemagglutinin__InfluenzaB__AGX15574

SEQ ID NO: 187047 - RNA, 1758 nt, Artificial Sequence
  derived and/or modified CDS sequence (opt4) from hemagglutinin__InfluenzaB__AGX15607
augaaggccaucaucgugcugcugaugguggugaccagcaacgccgacagaaucugcaccggcaucaccagcagcaacagcccccacguggugaagaccgccacccagggcgaggugaacgugaccggcgugaucccccugaccaccacccccaccaagagccacuucgccaaccugaagggcaccgagaccagaggcaagcugugccccaagugccugaacugcaccgaccuggacguggcccugggcagacccaagugcaccggcaacacccccagcgccagagugagcauccugcacgaggugagacccgugaccagcggcugcuuccccaucaugcacgacagaaccaagaucagacagcugcccaaccugcugagaggcuacgagcacaucagacugagcacccacaacgugaucaacgccgagaacgcccccggcggccccuacaagaucggcaccagcggcagcugccccaacgugaccaacggcaacggcuucuucgccaccauggccugggccgugcccaagaacgacaacaacaagaccgccaccaacagccugaccaucgaggugcccuacaucugcaccgagggcgaggaccagaucaccguguggggcuuccacagcgacaacgagacccagauggccaagcuguacggcgacagcaagccccagaaguucaccagcagcgccaacggcgugaccacccacuacgugagccagaucggcggcuuccccaaccagaccgaggacggcggccugccccagagcggcagaaucgugguggacuacauggugcagaagagcggcaagaccggcaccaucaccuaccagagaggcauccugcugccccagaagguguggugcgccagcggcagaagcaaggugaucaagggcagccugccccugaucggcgaggccgacugccugcacgagaaguacggcggccugaacaagagcaagcccuacuacaccggcgagcacgccaaggccaucggcaacugccccaucugggugaagaccccccugaagcuggccaacggcaccaaguacagaccccccgccaagcugcugaaggagagaggcuucuucggcgccaucgccggcuuccuggagggcggcugggagggcaugaucgccggcuggcacggcuacaccagccacggcgcccacggcguggccguggccgccgaccugaagagcacccaggaggccaucaacaagaucaccaagaaccugaacagccugagcgagcuggaggugaagaaccugcagagacugagcggcgccauggacgagcugcacaacgagauccuggagcuggacgagaagguggacgaccugagagccgacaccaucagcagccagaucgagcuggccgugcugcugagcaacgagggcaucaucaacagcgaggacgagcaccugcuggcccuggagagaaagcugaagaagaugcugggccccagcgccguggagaucggcaacggcugcuucgagaccaagcacaagugcaaccagaccugccuggacagaaucgccgccggcaccuucgacgccggcgaguucagccugcccaccuucgacagccugaacaucaccgccgccagccugaacgacgacggccuggacaaccacaccauccugcuguacuacagcaccgccgccagcagccuggccgugacccugaugaucgccaucuucgugguguacauggugagcagagacaacgugagcugcagcaucugccuguga

SEQ ID NO: 187048 - RNA, 1758 nt, Artificial Sequence
  derived and/or modified CDS sequence (opt4) from hemagglutinin__InfluenzaB__AGX15629
augaaggccaucaucgugcugcugaugguggugaccagcaacgccgacagaaucugcaccggcaucaccagcagcaacagcccccacguggugaagaccgccacccagggcgaggugaacgugaccggcgugaucccccugaccaccacccccaccaagagccacuucgccaaccugaagggcaccgagaccagaggcaagcugugccccaagugccugaacugcaccgaccuggacguggcccugggcagacccaagugcaccggcaacauccccagcgccagagugagcauccugcacgaggugagacccgugaccagcggcugcuuccccaucaugcacgacagaaccaagaucagacagcugcccaaccugcugagaggcuacgagcacaucagacugagcacccacaacgugaucaacgccgagaacgcccccggcggccccuacaagaucggcaccagcggcagcugccccaacgugaccaacggcaacggcuucuucgccaccauggccugggccgugcccaagaacgacaacaacaagaccgccaccaacagccugaccaucgaggugcccuacaucugcaccgagggcgaggaccagaucaccguguggggcuuccacagcgacaacgagauccagauggccaagcuguacggcgacagcaagccccagaaguucaccagcagcgccaacggcgugaccacccacuacgugagccagaucggcggcuuccccaaccagaccgaggacggcggccugccccagagcggcagaaucgugguggacuacauggugcagaagagcggcaagaccggcaccaucaccuaccagagaggcauccugcugccccagaagguguggugcaccagcggcagaagcaaggugaucaagggcagccugccccugaucggcgaggccgacugccugcacgagaaguacggcggccugaacaagagcaagcccuacuacaccggcgagcacgccaaggccaucggcaacugccccaucugggugaagaccccccugaagcuggccaacggcaccaaguacagaccccccgccaagcugcugaaggagagaggcuucuucggcgccaucgccggcuuccuggagggcggcugggagggcaugaucgccggcuggcacggcuacaccagccacggcgcccacggcguggccguggccgccgaccugaagagcacccaggaggccaucaacaagaucaccaagaaccugaacagccugagcgagcuggaggugaagaaccugcagagacugagcggcgccauggacgagcugcacaacgagauccuggagcuggacgagaagguggacgaccugagagccgacaccaucagcagccagaucgagcuggccgugcugcugagcaacgagggcaucaucaacagcgaggacgagcaccugcuggcccuggagagaaagcugaagaagaugcugggccccagcgccguggagaucggcaacggcugcuucgagaccaagcacaagugcaaccagaccugccuggacagaaucgccgccggcaccuucgacgccggcgaguucagccugcccaccuucgacagccugaacaucaccgccgccagccugaacgacgacggccuggacaaccacaccauccugcuguacuacagcaccgccgccagcagccuggccgugacccugaugaucgccaucuucgugguguacauggugagcagagacaacgugagcugcagcaucugccuguga

SEQ ID NO: 187049 - RNA, 1758 nt, Artificial Sequence
  derived and/or modified CDS sequence (opt4) from hemagglutinin__InfluenzaB__AGX15651
augaaggccaucaucgugcugcugaugguggugaccagcaacgccgacagaaucugcaccggcaucaccagcagcaacagcccccacguggugaagaccgccacccagggcgaggugaacgugaccggcgugaucccccugaccaccacccccaccaagagccacuucgccaaccugaagggcaccgagaccagaggcaagcugugccccaagugccugaacugcaccgaccuggacguggcccugggcagacccaagugcaccggcaagauccccagcgccagagugagcauccugcacgaggugagacccgugaccagcggcugcuuccccaucaugcacgacagaaccaagaucagacagcugcccaaccugcugagaggcuacgagcacaucagacugagcacccacaacgugaucaacgccgagaacgcccccggcggccccuacaagaucggcaccagcggcagcugccccaacaucaccaacggcaacggcuucuucgccaccauggccugggccgugcccaagaacgacaagaacaagaccgccaccaacccccugaccaucgaggugcccuacaucugcaccgagggcgaggaccagaucaccguguggggcuuccacagcgacaacgagacccagauggccaagcuguacggcgacagcaagccccagaaguucaccagcagcgccaacggcgugaccacccacuacgugagccagaucggcggcuuccccaaccagaccgaggacggcggccugccccagagcggcagaaucgugguggacuacauggugcagaagagcggcaagaccggcaccaucaccuaccagagaggcauccugcugccccagaagguguggugcgccagcggcagaagcaaggugaucaagggcagccugccccugaucggcgaggccgacugccugcacgagaaguacggcggccugaacaagagcaagcccuacuacaccggcgagcacgccaaggccaucggcaacugccccaucugggugaagaccccccugaagcuggccaacggcaccaaguacagaccccccgccaagcugcugaaggagagaggcuucuucggcgccaucgccggcuuccuggagggcggcugggagggcaugaucgccggcuggcacggcuacaccagccacggcgcccacggcguggccguggccgccgaccugaagagcacccaggaggccaucaacaagaucaccaagaaccugaacagccugagcgagcuggaggugaagaaccugcagagacugagcggcgccauggacgagcugcacaacgagauccuggagcuggacgagaagguggacgaccugagagccgacaccaucagcagccagaucgagcuggccgugcugcugagcaacgagggcaucaucaacagcgaggacgagcaccugcuggcccuggagagaaagcugaagaagaugcugggccccagcgccguggagaucggcaacggcugcuucgagaccaagcacaagugcaaccagaccugccuggacagaaucgccgccggcaccuucgacgccggcgaguucagccugcccaccuucgacagccugaacaucaccgccgccagccugaacgacgacggccuggacaaccacaccauccugcuguacuacagcaccgccgccagcagccuggccgugacccugaugaucgccaucuucgugguguacauggugagcagagacaacgugagcugcagcaucugccuguga

SEQ ID NO: 187050 - RNA, 1758 nt, Artificial Sequence; identical to SEQ ID NO: 187049
  derived and/or modified CDS sequence (opt4) from hemagglutinin__InfluenzaB__AGX15675

SEQ ID NO: 187051 - RNA, 1758 nt, Artificial Sequence; identical to SEQ ID NO: 187049
  derived and/or modified CDS sequence (opt4) from hemagglutinin__InfluenzaB__AGX15686

SEQ ID NO: 187052 - RNA, 1758 nt, Artificial Sequence
  derived and/or modified CDS sequence (opt4) from hemagglutinin__InfluenzaB__AGX15697
augaaggccaucaucgugcugcugaugguggugaccagcaacgccgacagaaucugcaccggcaucaccagcagcaacagcccccacguggugaagaccgccacccagggcgaggugaacgugaccggcgugaucccccugaccaccacccccaccaagagccacuucgccaaccugaagggcaccgagaccagaggcaagcugugccccaagugccugaacugcaccgaccuggacguggcccugggcagacccaagugcaccggcaagauccccagcgccagagugagcauccugcacgaggugagacccgugaccagcggcugcuuccccaucaugcacgacagaaccaagaucagacagcugcccaaccugcugagaggcuacgagcacaucagacugagcacccacaacgugaucaacgccgagaacgcccccggcggccccuacaagaucggcaccagcggcagcugccccaacaucaccaacggcaacggcuucuucgccaccauggccugggccgugcccaagaacgacaagaacaagaccgccaccaacccccugaccaucgaggugcccuacaucugcaccgagggcgaggaccagaucaccguguggggcuuccacagcgacaacgagaaccagauggccaagcuguacggcgacagcaagccccagaaguucaccagcagcgccaacggcgugaccacccacuacgugagccagaucggcggcuuccccaaccagaccgaggacggcggccugccccagagcggcagaaucgugguggacuacauggugcagaagagcggcaagaccggcaccaucaccuaccagagaggcauccugcugccccagaagguguggugcgccagcggcagaagcaaggugaucaagggcagccugccccugaucggcgaggccgacugccugcacgagaaguacggcggccugaacaagagcaagcccuacuacaccggcgagcacgccaaggccaucggcaacugccccaucugggugaagaccccccugaagcuggccaacggcaccaaguacagaccccccgccaagcugcugaaggagagaggcuucuucggcgccaucgccggcuuccuggagggcggcugggagggcaugaucgccggcuggcacggcuacaccagccacggcgcccacggcguggccguggccgccgaccugaagagcacccaggaggccaucaacaagaucaccaagaaccugaacagccugagcgagcuggaggugaagaaccugcagagacugagcggcgccauggacgagcugcacaacgagauccuggagcuggacgagaagguggacgaccugagagccgacaccaucagcagccagaucgagcuggccgugcugcugagcaacgagggcaucaucaacagcgaggacgagcaccugcuggcccuggagagaaagcugaagaagaugcugggccccagcgccguggagaucggcaacggcugcuucgagaccaagcacaagugcaaccagaccugccuggacagaaucgccgccggcaccuucgacgccggcgaguucagccugcccaccuucgacagccugaacaucaccgccgccagccugaacgacgacggccuggacaaccacaccauccugcuguacuacagcaccgccgccagcagccuggccgugacccugaugaucgccaucuucgugguguacauggugagcagagacaacgugagcugcagcaucugccuguga

SEQ ID NO: 187053 - RNA, 1758 nt, Artificial Sequence; identical to SEQ ID NO: 187049
  derived and/or modified CDS sequence (opt4) from hemagglutinin__InfluenzaB__AGX15708

SEQ ID NO: 187054 - RNA, 1758 nt, Artificial Sequence; identical to SEQ ID NO: 187049
  derived and/or modified CDS sequence (opt4) from hemagglutinin__InfluenzaB__AGX15719

SEQ ID NO: 187055 - RNA, 1758 nt, Artificial Sequence; identical to SEQ ID NO: 186574
  derived and/or modified CDS sequence (opt4) from hemagglutinin__InfluenzaB__AGX15730

SEQ ID NO: 187056 - RNA, 1758 nt, Artificial Sequence; identical to SEQ ID NO: 187049
  derived and/or modified CDS sequence (opt4) from hemagglutinin__InfluenzaB__AGX15741

SEQ ID NO: 187057 - RNA, 1758 nt, Artificial Sequence; identical to SEQ ID NO: 187049
  derived and/or modified CDS sequence (opt4) from hemagglutinin__InfluenzaB__AGX15753

SEQ ID NO: 187058 - RNA, 1758 nt, Artificial Sequence
  derived and/or modified CDS sequence (opt4) from hemagglutinin__InfluenzaB__AGX15764
augaaggccaucaucgugcugcugaugguggugaccagcaacgccgacagaaucugcaccggcaucaccagcagcaacagcccccacguggugaagaccgccacccagggcgaggugaacgugaccggcgugaucccccugaccaccacccccaccaagagccacuucgccaaccugaagggcaccgagaccagaggcaagcugugccccaagugccugaacugcaccgaccuggacguggcccugggcagacccaagugcaccggcaagauccccagcgccagagugagcauccugcacgaggugagacccgugaccagcggcugcuuccccaucaugcacgacagaaccaagaucagacagcugcccaaccugcugagaggcuacgagcacaucagacugagcacccacaacgugaucaacgccgagaacgcccccggcggccccuacaagaucggcaccagcggcagcugccccaacaucaccaacggcaacggcuucuucgccaccauggccugggccgugcccaagaacgacaagaacaagaccgccaccaacccccugaccaucgaggugcccuacaucugcaccgagggcgaggaccagaucaccguguggggcuuccacagcgacaacgagacccagauggccaagcuguacggcgacagcaagccccagaaguucaccagcagcgccaacggcgugaccacccacuacgugagccagaucggcggcuuccccaaccagaccgaggacggcggccugccccagagcggcagaaucgugguggacuacauggugcagaagagcggcaagaccggcaccaucaccuaccagagaggcauccugcugccccagaagguguggugcgccagcggcagaagcaaggugaucaagggcagccugccccugaucggcgaggccgacugccugcacgagaaguacggcggccugaacaagagcaagcccuacuacaccggcgagcacgccaaggccaucggcaacugccccaucugggugaagaccccccugaagcuggccaacggcaccaaguacagaccccccgccaagcugcugaaggagagaggcuucuucggcgccaucgccggcuuccuggagggcggcugggagggcaugaucgccggcuggcacggcuacaccagccacggcgcccacggcguggccguggccgccgaccugaagagcacccaggaggccaucaacaagaucaccaagaaccugaacagccugagcgagcuggaggugaagaaccugcagagacugagcggcgccauggacgagcugcacaacgagauccuggagcuggacgagaagguggacgaccugagagccgacaccaucagcagccagaucgagcuggccgugcugcugagcaacgagggcaucaucaacagcgaggacgagcaccugcuggcccuggagagaaagcugaagaagaugcugggccccagcgccguggagaucggcaacggcugcuucgagaccaagcacaagugcaaccagaccugccuggacagaaucgccgccggcaccuucgacgccggcgaguucagccugcccaccuucgacagccugaacaucaccgccgccagccugaacgacgacggccuggacaaccacaccauccugcuguacuacagcaccgccgccagcagccuggccaucacccugaugaucgccaucuucgugguguacauggugagcagagacaacgugagcugcagcaucugccuguga

SEQ ID NO: 187059 - RNA, 1755 nt, Artificial Sequence
  derived and/or modified CDS sequence (opt4) from hemagglutinin__InfluenzaB__AGX15775
augaaggccaucaucgugcugcugaugguggugaccagcaacgccgacagaaucugcaccggcaucaccagcagcaacagcccccacguggugaagaccgccacccagggcgaggugaacgugaccggcgugaucccccugaccaccacccccaccaagagcuacuucgccaaccugaagggcaccagaaccagaggcaagcugugccccgacugccugaacugcaccgaccuggacguggcccugggcagacccaugugcgugggcaccacccccagcgccaaggccagcauccugcacgaggugagacccgugaccagcggcugcuuccccaucaugcacgacagaaccaagaucagacagcugcccaaccugcugagaggcuacgagaacaucagacugagcacccagaacgugaucgacgccgagaaggcccccggcggccccuacagacugggcaccagcggcagcugccccaacgccaccagcaagagcggcuucuucgccaccauggccugggccgugcccaaggacaacaacaagaacgccaccaacccccugaccguggaggugcccuacaucugcaccgagggcgaggaccagaucaccguguggggcuuccacagcgacaacaagauccagaugaagaaccuguacggcgacagcaacccccagaaguucaccagcagcgccaacggcgugaccacccacuacgugagccagaucggcagcuuccccgaccagaccgaggacggcggccugccccagagcggcagaaucgugguggacuacaugaugcagaagcccggcaagaccggcaccaucguguaccagagaggcgugcugcugccccagagaguguggugcgccagcggcagaagcaaggugaucaagggcagccugccccugaucggcgaggccgacugccugcacgagaaguacggcggccugaacaagagcaagcccuacuacaccggcgagcacgccaaggccaucggcaacugccccaucugggugaagaccccccugaagcuggccaacggcaccaaguacagaccccccgccaagcugcugaaggagagaggcuucuucggcgccaucgccggcuuccuggagggcggcugggagggcaugaucgccggcuggcacggcuacaccagccacggcgcccacggcguggccguggccgccgaccugaagagcacccaggaggccaucaacaagaucaccaagaaccugaacagccugagcgagcuggaggugaagaaccugcagagacugagcggcgccauggacgagcugcacaacgagauccuggagcuggacgagaagguggacgaccugagagccgacaccaucagcagccagaucgagcuggccgugcugcugagcaacgagggcaucaucaacagcgaggacgagcaccugcuggcccuggagagaaagcugaagaagaugcugggccccagcgccguggagaucggcaacggcugcuucgagaccaagcacaagugcaaccagaccugccuggacagaaucgccgccggcaccuucaacgccggcgaguucagccugcccaccuucgacagccugaacaucaccgccgccagccugaacgacgacggccuggacaaccacaccauccugcuguacuacagcaccgccgccagcagccuggccgugacccugaugcuggccaucuucaucguguacauggugagcagagacaacgugagcugcagcaucugccuguga

SEQ ID NO: 187060 - RNA, 1758 nt, Artificial Sequence
  derived and/or modified CDS sequence (opt4) from hemagglutinin__InfluenzaB__AGX15786
augaaggccaucaucgugcugcugaugguggugaccagcaacgccgacagaaucugcaccggcaucaccagcagcaacagcccccacguggugaagaccgccacccagggcgaggugaacgugaccggcgugaucccccugaccaccacccccaccaagagccacuucgccaaccugaagggcaccgagaccagaggcaagcugugccccaagugccugaacugcaccgaccuggacguggcccugggcagacccaagugcaccggcaagauccccagcgccagagugagcauccugcacgaggugagacccgugaccagcggcugcuuccccaucaugcacgacagaaccaagaucagacagcugcccaaccugcugagaggcuacgagcacaucagacugagcacccacaacgugaucaacgccgagaacgcccccggcggccccuacaagaucggcaccagcggcagcugccccaacaucaccaacggcaacggcuucuucgccaccauggccugggccgugcccaagaacgacaagaacaagaccgccaccaacccccugaccaucgaggugcccuacaucugcaccgagggcgaggaccagaucaccguguggggcuuccacagcgacaacgagacccagauggccaagcuguacggcgacagcaagccccagaaguucaccagcagcgccaacggcgugaccacccacuacgugagccagaucggcggcuuccccaaccagaccgaggacggcggccugccccagagcggcagaaucgugguggacuacauggugcagaagagcggcaagaccggcaccaucaccuaccagagaggcauccugcugccccagaagguguggugcgccagcggcagaagcaaggugaucaagggcagccugccccugaucggcgaggccgacugccugcacgagaaguacggcggccugaacaagagcaagcccuacuacaccggcgagcacgccaaggccaucggcaacugccccaucugggugaagaccccccugaagcuggccaacggcaccaaguacagaccccccgccaagcugcugaaggagagaggcuucuucggcgccaucgccggcuuccuggagggcggcugggagggcaugaucgccggcuggcacggcuacaccagccacggcgcccacggcguggccguggccgccgaccugaagagcacccaggaggccaucaacaagaucaccaagaaccugaacagccugagcgagcuggaggugaagaaccugcagagacugagcggcgccauggacgagcugcacaacgagauccuggagcuggacgagaagguggacgaccugagagccgacaccaucagcagccagaucgagcuggccgugcugcugagcaacgagggcaucaucaacagcgaggacgagcaccugcuggcccuggagagaaagcugaagaagaugcugggccccagcgccguggagaucggcaacggcugcuucgagaccaagcacaagugcaaccagaccugccuggacagaaucgccgccggcaccuucgacgccggcgaguucuuccugcccaccuucgacagccugaacaucaccgccgccagccugaacgacgacggccuggacaaccacaccauccugcuguacuacagcaccgccgccagcagccuggccgugacccugaugaucgccaucuucgugguguacauggugagcagagacaacgugagcugcagcaucugccuguga

SEQ ID NO: 187061 - RNA, 1758 nt, Artificial Sequence; identical to SEQ ID NO: 187049
  derived and/or modified CDS sequence (opt4) from hemagglutinin__InfluenzaB__AGX15797

SEQ ID NO: 187062 - RNA, 1758 nt, Artificial Sequence
  derived and/or modified CDS sequence (opt4) from hemagglutinin__InfluenzaB__AGX15808
augaaggccaucaucgugcugcugaugguggugaccagcaacgccgacagaaucugcaccggcaucaccagcagcaacagcccccacguggugaagaccgccacccagggcgaggugaacgugaccggcgugaucccccugaccaccacccccaccaagagccacuucgccaaccugaagggcaccgagaccagaggcaagcugugccccaagugccugaacugcaccgaccuggacguggcccugggcagacccaagugcaccggcaagauccccagcgccagagugagcauccugcacgaggugagacccgugaccagcggcugcuuccccaucaugcacgacagaaccaagaucagacagcugcccaaccugcugagaggcuacgagcacaucagacugagcacccacaacgugaucaacgccgagaacgcccccggcggccccuacaagaucggcaccagcggcagcugccccaacgugaccaacggcaacggcuucuucgccaccauggccugggccgugcccaagaacgacaagaacaagaccgccaccaacccccugaccaucgaggugcccuacaucugcaccgagggcgaggaccagaucaccguguggggcuuccacagcgacaacgagacccagauggccaagcuguacggcgacagcaagccccagaaguucaccagcagcgccaacggcgugaccacccacuacgugagccagaucggcggcuuccccaaccagaccgaggacggcggccugccccagagcggcagaaucgugguggacuacauggugcagaagagcggcaagaccggcaccaucaccuaccagagaggcauccugcugccccagaagguguggugcgccaucggcagaagcaaggugaucaagggcagccugccccugaucggcgaggccgacugccugcacgagaaguacggcggccugaacaagagcaagcccuacuacaccggcgagcacgccaaggccaucggcaacugccccaucugggugaagaccccccugaagcuggccaacggcaccaaguacagaccccccgccaagcugcugaaggagagaggcuucuucggcgccaucgccggcuuccuggagggcggcugggagggcaugaucgccggcuggcacggcuacaccagccacggcgcccacggcguggccguggccgccgaccugaagagcacccaggaggccaucaacaagaucaccaagaaccugaacagccugagcgagcuggaggugaagaaccugcagagacugagcggcgccauggacgagcugcacaacgagauccuggagcuggacgagaagguggacgaccugagagccgacaccaucagcagccagaucgagcuggccgugcugcugagcaacgagggcaucaucaacagcgaggacgagcaccugcuggcccuggagagaaagcugaagaagaugcugggccccagcgccguggagaucggcaacggcugcuucgagaccaagcacaagugcaaccagaccugccuggacagaaucgccgccggcaccuucgacgccggcgaguucagccugcccaccuucgacagccugaacaucaccgccgccagccugaacgacgacggccuggacaaccacaccauccugcuguacuacagcaccgccgccagcagccuggccgugacccugaugaucgccaucuucgugguguacauggugagcagagacaacgugagcugcagcaucugccuguga

SEQ ID NO: 187063 - RNA, 1758 nt, Artificial Sequence; identical to SEQ ID NO: 186668
  derived and/or modified CDS sequence (opt4) from hemagglutinin__InfluenzaB__AGX15830

SEQ ID NO: 187064 - RNA, 1758 nt, Artificial Sequence; identical to SEQ ID NO: 186668
  derived and/or modified CDS sequence (opt4) from hemagglutinin__InfluenzaB__AGX15841

SEQ ID NO: 187065 - RNA, 1758 nt, Artificial Sequence; identical to SEQ ID NO: 186668
  derived and/or modified CDS sequence (opt4) from hemagglutinin__InfluenzaB__AGX15852

SEQ ID NO: 187066 - RNA, 1758 nt, Artificial Sequence; identical to SEQ ID NO: 186668
  derived and/or modified CDS sequence (opt4) from hemagglutinin__InfluenzaB__AGX15863

SEQ ID NO: 187067 - RNA, 1758 nt, Artificial Sequence
  derived and/or modified CDS sequence (opt4) from hemagglutinin__InfluenzaB__AGX15874
augaaggccaucaucgugcugcugaugguggugaccagcaacgccgacagaaucugcaccggcaucaccagcagcaacagcccccacguggugaagaccgccacccagggcgaggugaacgugaccggcgugaucccccugaccaccacccccaccaagagccacuucgccaaccugaagggcaccgagaccagaggcaagcugugccccaagugccccaacugcaccgaccuggacguggcccugggcagacccaagugcaccggcaagauccccagcgccagagugagcauccugcacgaggugagacccgugaccagcggcugcuuccccaucaugcacgacagaaccaagaucagacagcugcccaaccugcugagaggcuacgagcacaucagacugagcacccacaacgugaucaacgccgagaacgcccccggcggccccuacaagaucggcaccagcggcagcugccccaacgugaccaacggcaacggcuucuucgccaccauggccugggccgugcccaagaacgacaagaacaagaccgccaccaacccccugaccaucgaggugcccuacaucugcaccgagggcgaggaccagaucaccguguggggcuuccacagcgacaacgagacccagauggccaagcuguacggcgacagcaagccccagaaguucaccagcagcgccaacggcgugaccacccacuacgugagccagaucggcggcuuccccaaccagaccgaggacggcggccugccccagagcggcagaaucgugguggacuacauggugcagaagagcggcaagaccggcaccaucaccuaccagagaggcauccugcugccccagaagguguggugcgccagcggcagaagcaaggugaucaagggcagccugccccugaucggcgaggccgacugccugcacgagaaguacggcggccugaacaagagcaagcccuacuacaccggcgagcacgccaaggccaucggcaacugccccaucugggugaagaccccccugaagcuggccaacggcaccaaguacagaccccccgccaagcugcugaaggagagaggcuucuucggcgccaucgccggcuuccuggagggcggcugggagggcaugaucgccggcuggcacggcuacaccagccacggcgcccacggcguggccguggccgccgaccugaagagcacccaggaggccaucaacaagaucaccaagaaccugaacagccugagcgagcuggaggugaagaaccugcagagacugagcggcgccauggacgagcugcacaacgagauccuggagcuggacgagaagguggacgaccugagagccgacaccaucagcagccagaucgagcuggccgugcugcugagcaacgagggcaucaucaacagcgaggacgagcaccugcuggcccuggagagaaagcugaagaagaugcugggccccagcgccguggagaucggcaacggcugcuucgagaccaagcacaagugcaaccagaccugccuggacagaaucgccgccggcaccuucgacgccggcgaguucagccugcccaccuucgacagccugaacaucaccgccgccagccugaacgacgacggccugaacaaccacaccauccugcuguacuacagcaccgccgccagcagccuggccgugacccugaugaucgccaucuucgugguguacauggugagcagagacaacgugagcugcagcaucugccuguga

SEQ ID NO: 187068 - RNA, 1758 nt, Artificial Sequence; identical to SEQ ID NO: 186668
  derived and/or modified CDS sequence (opt4) from hemagglutinin__InfluenzaB__AGX15885

SEQ ID NO: 187069 - RNA, 1758 nt, Artificial Sequence
  derived and/or modified CDS sequence (opt4) from hemagglutinin__InfluenzaB__AGX15896
augaaggccaucaucgugcugcugaugguggugaccagcaacgccgacagaaucugcaccggcaucaccagcagcaacagcccccacguggugaagaccgccacccagggcgaggugaacgugaccggcgugaucccccugaccaccacccccaccaagagccacuucgccaaccugaagggcaccgagaccagaggcaagcugugccccaagugccccaacugcaccgaccuggacguggcccugggcagacccaagugcaccggcaagauccccagcgccagagugagcauccugcacgaggugagacccgugaccagcggcugcuuccccaucaugcacgacagaaccaagaucagacagcugcccaaccugcugagaggcuacgagcacaucagacugagcacccacaacgugaucaacgccgagaacgcccccggcggccccuacaagaucggcaccagcggcagcugccccaacgugaccaacggcaacggcuucuucgccaccauggccugggccgugcccaagaacgacaagaacaagaccgccaccaacccccugaccaucgaggugcccuacaucugcaccgagggcgaggaccagaucaccguguggggcuuccacagcgacaacgagacccagauggccaagcuguacggcgacagcaagccccagaaguucaccagcagcgccaacggcgugaccgcccacuacgugagccagaucggcggcuuccccaaccagaccgaggacggcggccugccccagagcggcagaaucgugguggacuacauggugcagaagagcggcaagaccggcaccaucaccuaccagagaggcauccugcugccccagaagguguggugcgccagcggcagaagcaaggugaucaagggcagccugccccugaucggcgaggccgacugccugcacgagaaguacggcggccugaacaagagcaagcccuacuacaccggcgagcacgccaaggccaucggcaacugccccaucugggugaagaccccccugaagcuggccaacggcaccaaguacagaccccccgccaagcugcugaaggagagaggcuucuucggcgccaucgccggcuuccuggagggcggcugggagggcaugaucgccggcuggcacggcuacaccagccacggcgcccacggcguggccguggccgccgaccugaagagcacccaggaggccaucaacaagaucaccaagaaccugaacagccugagcgagcuggaggugaagaaccugcagagacugagcggcgccauggacgagcugcacggcgagauccuggagcuggacgagaagguggacgaccugagagccgacaccaucagcagccagaucgagcuggccgugcugcugagcaacgagggcaucaucaacagcgaggacgagcaccugcuggcccuggagagaaagcugaagaagaugcugggccccagcgccguggagaucggcaacggcugcuucgagaccaagcacaagugcaaccagaccugccuggacagaaucgccgccggcaccuucgacgccggcgaguucagccugcccaccuucgacagccugaacaucaccgccgccagccugaacgacgacggccuggacaaccacaccauccugcuguacuacagcaccgccgccagcagccuggccgugacccugaugaucgccaucuucgugguguacauggugagcagagacaacgugagcugcagcaucugccuguga

SEQ ID NO: 187070 - RNA, 1758 nt, Artificial Sequence; identical to SEQ ID NO: 186668
  derived and/or modified CDS sequence (opt4) from hemagglutinin__InfluenzaB__AGX15907

SEQ ID NO: 187071 - RNA, 1758 nt, Artificial Sequence; identical to SEQ ID NO: 186668
  derived and/or modified CDS sequence (opt4) from hemagglutinin__InfluenzaB__AGX15918

SEQ ID NO: 187072 - RNA, 1758 nt, Artificial Sequence
  derived and/or modified CDS sequence (opt4) from hemagglutinin__InfluenzaB__AGX15929
augaaggccaucaucgugcugcugaugguggugaccagcaacgccgacagaaucugcaccggcaucaccagcagcaacagcccccacguggugaagaccgccacccagggcgaggugaacgugaccggcgugaucccccugaccaccacccccaccaagagccacuucgccaaccugaagggcaccgagaccagaggcaagcugugccccaagugccugaacugcaccgaccuggacguggcccugggcagacccaagugcaccggcaagauccccagcgccagagugagcauccugcacgaggugagacccgugaccagcggcugcuuccccaucaugcacgacagaaccaagaucagacagcugcccaaccugcugagaggcuacgagcacaucagacugagcaccaacaacgugaucaacgccgagaacgcccccggcggccccuacaagaucggcaccagcggcagcugccccaacgugaccaacggcaacggcuucuucgccaccauggccugggccgugcccaagaacgacaagaacaagaccgccaccaacccccugaccaucgaggugcccuacaucugcaccgagggcgaggaccagaucaccguguggggcuuccacagcgacaacgagacccagauggccaagcuguacggcgacagcaagccccagaaguucaccagcagcgccaacggcgugaccacccacuacgugagccagaucggcggcuuccccaaccagaccgaggacggcggccugccccagagcggcagaaucgugguggacuacauggugcagaagagcgagaagaccggcaccaucaccuaccagagaggcauccugcugccccagaagguguggugcgccagcggcagaagcaaggugaucaagggcagccugccccugaucggcgaggccgacugccugcacgagaaguacggcggccugaacaagagcaagcccuacuacaccggcgagcacgccaaggccaucggcaacugccccaucugggugaagaccccccugaagcuggccaacggcaccaaguacagaccccccgccaagcugcugaaggagagaggcuucuucggcgccaucgccggcuuccuggagggcggcugggagggcaugaucgccggcuggcacggcuacaccagccacggcgcccacggcguggccguggccgccgaccugaagagcacccaggaggccaucaacaagaucaccaagaaccugaacagccugagcgagcuggaggugaagaaccugcagagacugagcggcgccauggacgagcugcacaacgagauccuggagcuggacgagaagguggacgaccugagagccgacaccaucagcagccagaucgagcuggccgugcugcugagcaacgagggcaucaucaacagcgaggacgagcaccugcuggcccuggagagaaagcugaagaagaugcugggccccagcgccguggagaucggcaacggcugcuucgagaccaagcacaagugcaaccagaccugccuggacagaaucgccgccggcaccuucgacgccggcgaguucagccugcccaccuucgacagccugaacaucaccgccgccagccugaacgacgacggccuggacaaccacaccauccugcuguacuacagcaccgccgccagcagccuggccgugacccugaugaucgccaucuucgugguguacauggugagcagagacaacgugagcugcagcaucugccuguga

SEQ ID NO: 187073 - RNA, 1758 nt, Artificial Sequence; identical to SEQ ID NO: 186668
  derived and/or modified CDS sequence (opt4) from hemagglutinin__InfluenzaB__AGX15940

SEQ ID NO: 187074 - RNA, 1758 nt, Artificial Sequence
  derived and/or modified CDS sequence (opt4) from hemagglutinin__InfluenzaB__AGX15962
augaaggccaucaucgugcugcugaugguggugaccagcaacgccgacagaaucugcaccggcaucaccagcagcaacagcccccacaucgugaagaccgccacccagggcgaggugaacgugaccggcgugaucccccugaccaccacccccaccaagagccacuucgccaaccugaagggcaccgagaccagaggcaagcugugccccaagugccugaacugcaccgaccuggacguggcccugggcagacccaagugcaccggcaagauccccagcgccagagugagcauccugcacgaggugagacccgugaccagcggcugcuuccccaucaugcacgacagaaccaagaucagacagcugcccaaccugcugagaggcuacgagcacaucagacugagcacccacaacgugaucaacgccgagaacgcccccggcggccccuacaagaucggcaccagcggcagcugccccaacaucaccaacggcaacggcuucuucgccaccauggccugggccgugcccaagaacgacaagaacaagaccgccaccaacccccugaccaucgaggugcccuacaucugcaccgagggcgaggaccagaucaccguguggggcuuccacagcgacaacgagacccagauggccaagcuguacggcgacagcaagccccagaaguucaccagcagcgccaacggcgugaccacccacuacgugagccagaucggcggcuuccccaaccagaccgaggacggcggccugccccagagcggcagaaucgugguggacuacaugaugcagaagagcggcaagaccggcaccaucaccuaccagagaggcauccugcugccccagaagguguggugcgccagcggcagaagcaaggugaucaagggcagccugccccugaucggcgaggccgacugccugcacgagaaguacggcggccugaacaagagcaagcccuacuacaccggcgagcacgccaaggccaucggcaacugccccaucugggugaagaccccccugaagcuggccaacggcaccaaguacagaccccccgccaagcugcugaaggagagaggcuucuucggcgccaucgccggcuuccuggagggcggcugggagggcaugaucgccggcuggcacggcuacaccagccacggcgcccacggcguggccguggccgccgaccugaagagcacccaggaggccaucaacaagaucaccaagaaccugaacagccugagcgagcuggaggugaagaaccugcagagacugagcggcgccauggacgagcugcacaacgagauccuggagcuggacgagaagguggacgaccugagagccgacaccaucagcagccagaucgagcuggccgugcugcugagcaacgagggcaucaucaacagcgaggacgagcaccugcuggcccuggagagaaagcugaagaagaugcugggccccagcgccguggagaucggcaacggcugcuucgagaccaagcacaagugcaaccagaccugccuggacagaaucgccgccggcaccuucgacgccggcgaguucagccugcccaccuucgacagccugaacaucaccgccgccagccugaacgacgacggccuggacaaccacaccauccugcuguacuacagcaccgccgccagcagccuggccgugacccugaugaucgccaucuucgugguguacauggugagcagagacaacgugagcugcagcaucugccuguga

SEQ ID NO: 187075 - RNA, 1758 nt, Artificial Sequence; identical to SEQ ID NO: 186705
  derived and/or modified CDS sequence (opt4) from hemagglutinin__InfluenzaB__AGX15973

SEQ ID NO: 187076 - RNA, 1758 nt, Artificial Sequence; identical to SEQ ID NO: 186705
  derived and/or modified CDS sequence (opt4) from hemagglutinin__InfluenzaB__AGX15984

SEQ ID NO: 187077 - RNA, 1758 nt, Artificial Sequence; identical to SEQ ID NO: 186743
  derived and/or modified CDS sequence (opt4) from hemagglutinin__InfluenzaB__AGX15995

SEQ ID NO: 187078 - RNA, 1758 nt, Artificial Sequence; identical to SEQ ID NO: 186743
  derived and/or modified CDS sequence (opt4) from hemagglutinin__InfluenzaB__AGX16006

SEQ ID NO: 187079 - RNA, 1758 nt, Artificial Sequence
  derived and/or modified CDS sequence (opt4) from hemagglutinin__InfluenzaB__AGX16017
augaaggccaucaucgugcugcugaugguggugaccagcaacgccgacagaaucugcaccggcaucaccagcagcaacagcccccacaucgugaagaccgccacccagggcgaggugaacgugaccggcgugaucccccugaccaccacccccaccaagagccacuucgccaaccugaagggcaccgagaccagaggcaagcugugccccaagugccugaacugcaccgaccuggacguggcccugggcagacccaagugcaccggcaagauccccagcgccagagugagcauccugcacgaggugagacccgugaccagcggcugcuuccccaucaugcacgacagaaccaagaucagacagcugcccaaccugcugagaggcuacgagcacaucagacugagcacccacaacgugaucaacgccgagaacgcccccggcggccccuacaagaucggcaccagcggcagcugccccaacaucaccaacggcaacggcuucuucgccaccauggccugggccgugcccaagaacgacaagaacaagaccgccaccaacccccugaccaucgaggugcccuacaucugcaccgagggcgaggaccagaucaccguguggggcuuccacagcgacaacgagauccagauggccaagcuguacggcgacagcaagccccagaaguucaccagcagcgccaacggcgugaccacccacuacgugagccagaucggcggcuuccccaaccagaccgaggacggcggccugccccagagcggcagaaucgugguggacuacauggugcagaagagcggcaagaccggcaccaucaccuaccagagaggcauccugcugccccagaagguguggugcgccagcggcagaagcaaggugaucaagggcagccugccccugaucggcgaggccgacugccugcacgagaaguacggcggccugaacaagagcaagcccuacuacaccggcgagcacgccaaggccaucggcaacugccccaucugggugaagaccccccugaagcuggccaacggcaccaaguacagaccccccgccaagcugcugaaggagagaggcuucuucggcgccaucgccggcuuccuggagggcggcugggagggcaugaucgccggcuggcacggcuacaccagccacggcgcccacggcguggccguggccgccgaccugaagagcacccaggaggccaucaacaagaucaccaagaaccugaacagccugagcgagcuggaggugaagaaccugcagagacugagcggcgccauggacgagcugcacaacgagauccuggagcuggacgagaagguggacgaccugagagccgacaccaucagcagccagaucgagcuggccgugcugcugagcaacgagggcaucaucaacagcgaggacgagcaccugcuggcccuggagagaaagcugaagaagaugcugggccccagcgccguggagaucggcaacggcugcuucgagaccaagcacaagugcaaccagaccugccuggacagaaucgccgccggcaccuucgacgccggcgaguucagccugcccaccuucgacagccugaacaucaccgccgccagccugaacgacgacggccuggacaaccacaccauccugcuguacuacagcaccgccgccagcagccuggccgugacccugaugaucgccaucuucgugguguacauggugagcagagacaacgugagcugcagcaucugccuguga

SEQ ID NO: 187080 - RNA, 1755 nt, Artificial Sequence; identical to SEQ ID NO: 186486
  derived and/or modified CDS sequence (opt4) from hemagglutinin__InfluenzaB__AGX16028

SEQ ID NO: 187081 - RNA, 1755 nt, Artificial Sequence
  derived and/or modified CDS sequence (opt4) from hemagglutinin__InfluenzaB__AGX16039
augaaggccaucaucgugcugcugaugguggugaccagcaacgccgacagaaucugcaccggcaucaccagcagcaacagcccccacguggugaagaccgccacccagggcgaggugaacgugaccggcgugaucccccugaccaccacccccaccaagagcuacuucgccaaccugaagggcaccagaaccagaggcaagcugugccccgacugccugaacugcaccgaccuggacguggcccugggcagacccaugugcgugggcaccacccccagcgccaaggccagcauccugcacgaggugagacccgugaccagcggcugcuuccccaucaugcacgacagaaccaagaucagacagcugcccaaccugcugagaggcuacgagaacaucagacugagcacccagaacgugaucgacgccgagaaggcccccggcggccccuacagacugggcaccagcggcagcugccccaacgccaccagcaagagcggcuucuucgccaccauggccugggccgugcccaaggacaacaacaagaacgccaccaacccccugaccguggaggugcccuacaucugcaccgagggcgaggaccagaucaccguguggggcuuccacagcgacaacaagacccagaugaagaaccuguacggcgacagcaacccccagaaguucaccagcagcgccaacggcgugaccacccacuacgugagccagaucggcggcuuccccgaccagaccgaggacggcggccugccccagagcggcagaaucgugguggacuacaugaugcagaagcccggcaagaccggcaccaucguguaccagagaggcgugcugcugccccagaagguguggugcgccagcggcagaagcaaggugaucaagggcagccugccccugaucggcgaggccgacugccugcacgagaaguacggcggccugaacaagagcaagcccuacuacaccggcgagcacgccaaggccaucggcaacugccccaucugggugaagaccccccugaagcuggccaacggcaccaaguacagaccccccgccaagcugcugaaggagagaggcuucuucggcgccaucgccggcuuccuggagggcggcugggagggcaugaucgccggcuggcacggcuacaccagccacggcgcccacggcguggccguggccgccgaccugaagagcacccaggaggccaucaacaagaucaccaagaaccugaacagccugagcgagcuggaggugaagaaccugcagagacugagcggcgccguggacgagcugcacaacgagauccuggagcuggacgagaagguggacgaccugagagccgacaccaucagcagccagaucgagcuggccgugcugcugagcaacgagggcaucaucaacagcgaggacgagcaccugcuggcccuggagagaaagcugaagaagaugcugggccccagcgccguggacaucggcaacggcugcuucgagaccaagcacaagugcaaccagaccugccuggacagaaucgccgccggcaccuucaacgccggcgaguucagccugcccaccuucgacagccugaacaucaccgccgccagccugaacgacgacggccuggacaaccacaccauccugcuguacuacagcaccgccgccagcagccuggccgugacccugaugcuggccaucuucaucguguacauggugagcagagacaacgugagcugcagcaucugccuguga

SEQ ID NO: 187082 - RNA, 1755 nt, Artificial Sequence
  derived and/or modified CDS sequence (opt4) from hemagglutinin__InfluenzaB__AGX16050
augaaggccaucaucgugcugcugaugguggugaccagcaacgccgacagaaucugcaccggcaucaccagcagcaacagcccccacguggugaagaccgccacccagggcgaggugaacgugaccggcgugaucccccugaccaccacccccaccaagagcuacuucgccaaccugaagggcaccagaaccagaggcaagcugugccccgacugccugaacugcaccgaccuggacguggcccugggcagacccaugugcgugggcaccacccccagcgccaaggccagcauccugcacgaggugagacccgugaccagcggcugcuuccccaucaugcacgacagaaccaagaucagacagcugcccaaccugcugagaggcuacgagaacaucagacugagcacccagaacgugaucgacgccgagaacgcccccggcggccccuacagacugggcaccagcggcagcugccccaacgccaccagcaagagcggcuucuucgccaccauggccugggccgugcccaaggacaacaacaagaacgccaccaacccccugaccguggaggugcccuacaucugcaccgagggcgaggaccagaucaccguguggggcuuccacagcgacaacaagacccagaugaagaaccuguacggcgacagcaacccccagaaguucaccagcagcgccaacggcgugaccacccacuacgugagccagaucggcggcuuccccgcccagaccgaggacggcggccugccccagagcggcagaaucgugguggacuacauggugcagaagcccagaaagaccggcaccaucguguaccagagaggcgugcugcugccccagaagguguggugcgccagcggcagaagcaaggugaucaagggcagccugccccugaucggcgaggccgacugccugcacgagaaguacggcggccugaacaagagcaagcccuacuacaccggcgagcacgccaaggccaucggcaacugccccaucugggugaagaccccccugaagcuggccaacggcaccaaguacagaccccccgccaagcugcugaaggagagaggcuucuucggcgccaucgccggcuuccuggagggcggcugggagggcaugaucgccggcuggcacggcuacaccagccacggcgcccacggcguggccguggccgccgaccugaagagcacccaggaggccaucaacaagaucaccaagaaccugaacagccugagcgagcuggaggugaagaaccugcagagacugagcggcgccauggacgagcugcacaacgagauccuggagcuggacgagaagguggacgaccugagagccgacaccaucagcagccagaucgagcuggccgugcugcugagcaacgagggcaucaucaacagcgaggacgagcaccugcuggcccuggagagaaagcugaagaagaugcugggccccagcgccguggacaucggcaacggcugcuucgagaccaagcacaagugcaaccagaccugccuggacagaaucgccgccggcaccuucaacgccggcgaguucagccugcccaccuucgacagccugaacaucaccgccgccagccugaacgacgacggccuggacaaccacaccauccugcuguacuacagcaccgccgccagcagccuggccgugacccugaugcuggccaucuucaucguguacauggugagcagagacaacgugagcugcagcaucugccuguga

SEQ ID NO: 187083 - RNA, 1755 nt, Artificial Sequence
  derived and/or modified CDS sequence (opt4) from hemagglutinin__InfluenzaB__AGX16061
augaaggccaucaucgugcugcugaugguggugaccagcaacgccgacagaaucugcaccggcaucaccagcagcaacagcccccacguggugaagaccgccacccagggcgaggugaacgugaccggcgugaucccccugaccaccacccccaccaagagcuacuucgccaaccugaagggcaccagaaccagaggcaagcugugccccgacugccugaacugcaccgaccuggacguggcccugggcagacccaugugcgugggcaccacccccagcgccaaggccagcauccugcacgaggugagacccgugaccagcggcugcuuccccaucaugcacgacagaaccaagaucagacagcugcccaaccugcugagaggcuacgagaacaucagacugagcacccagaacgugaucgacgccgagaaggcccccggcggccccuacagacugggcaccagcggcagcugccccaacgccaccagcaagagcggcuucuucgccaccauggccugggccgugcccaaggacaacaacaagaacgccaccaacccccugaccguggaggugcccuacaucugcaccgagggcgaggaccagaucaccguguggggcuuccacagcgacaacaagacccagaugaagaaccuguacggcgacagcaacccccagaaguucaccagcagcgccaacggcgugaccacccacuacgugagccagaucggcggcuuccccgaccagaccgaggacggcggccugccccagagcggcagaaucgugguggacuacaugaugcagaagcccggcaagaccggcaccaucguguaccagagaggcgugcugcugccccagaagguguggugcgccagcggcagaagcaaggugaucaagggcagccugccccugaucggcgaggccgacugccugcacgagaaguacggcggccugaacaagagcaagcccuacuacaccggcgagcacgccaaggccaucggcaacugccccaucugggugaagaccccccugaagcuggccaacggcaccaaguacagaccccccgccaagcugcugaaggagagaggcuucuucggcgccaucgccggcuuccuggagggcggcugggagggcaugaucgccggcuggcacggcuacaccagccacggcgcccacggcguggccguggccgccgaccugaagagcacccaggaggccaucaacaagaucaccaagaaccugaacagccugagcgagcuggaggugaagaaccugcagagacugagcggcgccauggacgagcugcacaacgagauccuggagcuggacgagaagguggacgaccugagagccgacaccaucagcagccagaucgagcuggccgugcugcugagcaacgagggcaucaucaacagcgaggacgagcaccugcuggcccuggagagaaagcugaagaagaugcugggccccagcgccguggacaucggcaacggcugcuucgagaccaagcacaagugcaaccagaccugccuggacagaaucgccgccggcaccuucaacgccggcgaguucagccugcccaccuucgacagccugaacaucaccgccgccagccugaacgacgacggccuggacaaccacaccauccugcuguacuacagcaccgccgccagcagccuggccgugacccugaugcuggccaucuucaucguguacauggugagcagagacaacgugagcugcagcaucugccuguga

SEQ ID NO: 187084 - RNA, 1755 nt, Artificial Sequence
  derived and/or modified CDS sequence (opt4) from hemagglutinin__InfluenzaB__AGX16083
augaaggccaucaucgugcugcugaugguggugaccagcaacgccgacagaaucugcaccggcaucaccagcagcaacagcccccacguggugaagaccgccacccagggcgaggugaacgugaccggcgugaucccccugaccaccacccccaccaagagcuacuucgccaaccugaagggcaccagaaccagaggcaagcugugccccgacugccugaacugcaccgaccuggacguggcccugggcagacccaugugcgugggcaccacccccagcgccaaggccagcauccugcacgaggugagacccgugaccagcggcugcuuccccaucaugcacgacagaaccaagaucagacagcugcccaaccugcugagaggcuacgagaacaucagacugagcacccagaacgugaucgacgccgagaaggcccccggcggccccuacagacugggcaccagcggcagcugccccaacgccaccagcaagagcggcuucuucgccaccauggccugggccgugcccaaggacaacaacaagaacgccaccaacccccugaccguggaggugcccuacaucugcaccgagggcgaggaccagaucaccguguggggcuuccacagcgacaacaagacccagaugaagaaccuguacggcgacagcaacccccagaaguucaccagcagcgccaacggcgugaccacccacuacgugagccagaucggcggcuuccccgaccagaccgaggacggcggccugccccagagcggcagaaucgugguggacuacaugaugcagaagcccggcaagaccggcaccaucguguaccagagaggcgugcugcugccccagaagguguggugcgccagcggcagaagcaaggugaucaagggcagccugccccugaucggcgaggccgacugccugcacgagaaguacggcggccugaacaagagcaagcccuacuacaccggcgagcacgccaaggccaucggcaacugccccaucugggugaagaccccccugaagcuggccaacggcaccaaguacagaccccccgccaagcugcugaaggagagaggcuucuucggcgccaucgccggcuuccuggagggcggcugggagggcaugaucgccggcuggcacggcuacaccagccacggcgcccacggcguggccguggccgccgaccugaagagcacccaggaggccaucaacaagaucaccaagaaccugaacagccugagcgagcuggaggugaagaaccugcagagacugagcggcgccauggacgagcugcacaacgagauccuggagcuggacgagaagguggacgaccugagagccgacaccaucagcagccagaucgagcuggccgugcugcugagcaacgagggcaucaucaacagcgaggacgagcaccugcuggcccuggagagaaagcugaagaagaugcugggccccagcgccguggagaucggcaacggcugcuucgagaccaagcacaagugcaaccagaccugccuggacagaaucgccgccggcaccuucaacgccggcgaguucagccugcccaccuucgacagccugaacaucaccgccgccagccugaacgacgacggccuggacaaccacaccauccugcuguacuacagcaccgccgccagcagccuggccgugacccugaugcuggccaucuucaucguguacauggugagcagagacaacgugagcugcagcaucugccuguga

SEQ ID NO: 187085 - RNA, 1755 nt, Artificial Sequence
  derived and/or modified CDS sequence (opt4) from hemagglutinin__InfluenzaB__AGX16105
augaaggccaucaucgugcugcugaugguggugaccagcaacgccgacagaaucugcaccggcaucaccagcagcagcagcccccacguggugaagaccgccacccagggcgaggugaacgugaccggcgugaucccccugaccaccacccccaccaagagcuacuucgccaaccugaagggcaccagaaccagaggcaagcugugccccgacugccugaacugcaccgaccuggacguggcccugggcagacccaugugcgugggcaccacccccagcgccaaggccagcauccugcacgaggugagacccgugaccagcggcugcuuccccaucaugcacgacagaaccaagaucagacagcugcccaaccugcugagaggcuacgagaacaucagacugagcacccagaacgugaucgacgccgagaaggcccccggcggccccuacagacugggcaccagcggcagcugccccaacgccaccagcaagagcggcuucuucgccaccauggccugggccgugcccaaggacaacaacaagaacgccaccaacccccugaccguggaggugcccuacaucugcaccgagggcgaggaccagaucaccguguggggcuuccacagcgacaacaagacccagaugaagaaccuguacggcgacagcaacccccagaaguucaccagcagcgccaacggcgugaccacccacuacgugagccagaucggcggcuuccccgaccagaccgaggacggcggccugccccagagcggcagaaucgugguggacuacaugaugcagaagcccggcaagaccggcaccaucguguaccagagaggcgugcugcugccccagaagguguggugcgccagcggcagaagcaaggugaucaagggcagccugccccugaucggcgaggccgacugccugcacgagaaguacggcggccugaacaagagcaagcccuacuacaccggcgagcacgccaaggccaucggcaacugccccaucugggugaagaccccccugaagcuggccaacggcaccaaguacagaccccccgccaagcugcugaaggagagaggcuucuucggcgccaucgccggcuuccuggagggcggcugggagggcaugaucgccggcuggcacggcuacaccagccacggcgcccacggcguggccguggccgccgaccugaagagcacccaggaggccaucaacaagaucaccaagaaccugaacagccugagcgagcuggaggugaagaaccugcagagacugagcggcgccauggacgagcugcacagcgagauccuggagcuggacgagaagguggacgaccugagagccgacaccaucagcagccagaucgagcuggccgugcugcugagcaacgagggcaucaucaacagcgaggacgagcaccugcuggcccuggagagaaagcugaagaagaugcugggccccagcgccguggacaucggcaacggcugcuucgagaccaagcacaagugcaaccagaccugccuggacagaaucgccgccggcaccuucaacgccggcgaguucagccugcccaccuucgacagccugaacaucaccgccgccagccugaacgacgacggccuggacaaccacaccauccugcuguacuacagcaccgccgccagcagccuggccgugacccugaugcuggccaucuucaucguguacauggugagcagagacaacgugagcugcagcaucugccuguga

SEQ ID NO: 187086 - RNA, 1755 nt, Artificial Sequence
  derived and/or modified CDS sequence (opt4) from hemagglutinin__InfluenzaB__AGX16116
augaaggccaucaucgugcugcugaugguggugaccagcaacgccgacagaaucugcaccggcaucaccagcagcaacagcccccacguggugaagaccgccacccagggcgaggugaacgugaccggcgugaucccccugaccaccacccccaccaagagcuacuucgccaaccugaagggcaccagaaccagaggcaagcugugccccgacugccugaacugcaccgaccuggacguggcccugggcagacccaugugcgugggcaccacccccagcgccaaggccagcauccugcacgaggugagacccgugaccagcggcugcuuccccaucaugcacgacagaaccaagaucagacagcugcccaaccugcugagaggcuacgagaacaucagacugagcacccagaacgugaucgacgccgagaacgcccccggcggccccuacagacugggcaccagcggcagcugccccaacgccaccagcaagagcggcuucuucgccaccauggccugggccgugcccaaggacaacaacaagaacgccaccaacccccugaccguggaggugcccuacgugugcaccgagggcgaggaccagaucaccguguggggcuuccacagcgacaacaagacccagaugaagaaccuguacggcgacagcaacccccagaaguucaccagcagcgccaacggcgugaccacccacuacgugagccagaucggcggcuuccccgcccagaccgaggacggcggccugccccagagcggcagaaucgugguggacuacauggugcagaagcccagaaagaccggcaccaucguguaccagagaggcgugcugcugccccagaagguguggugcgccagcggcagaagcaaggugaucaagggcagccugccccugaucggcgaggccgacugccugcacgagaaguacggcggccugaacaagagcaagcccuacuacaccggcgagcacgccaaggccaucggcaacugccccaucugggugaagaccccccugaagcuggccaacggcaccaaguacagaccccccgccaagcugcugaaggagagaggcuucuucggcgccaucgccggcuuccuggagggcggcugggagggcaugaucgccggcuggcacggcuacaccagccacggcgcccacggcguggccguggccgccgaccugaagagcacccaggaggccaucaacaagaucaccaagaaccugaacagccugagcgagcuggagaucaagaaccugcagagacugagcggcgccauggacgagcugcacaacgagauccuggagcuggacgagaagguggacgaccugagagccgacaccaucagcagccagaucgagcuggccgugcugcugagcaacgagggcaucaucaacagcgaggacgagcaccugcuggcccuggagagaaagcugaagaagaugcugggccccagcgccguggacaucggcaacggcugcuucgagaccaagcacaagugcaaccagaccugccuggacagaaucgccgccggcaccuucaacgccggcgaguucagccugcccaccuucgacagccugaacaucaccgccgccagccugaacgacgacggccuggacaaccacaccauccugcuguacuacagcaccgccgccagcagccuggccgugacccugaugcuggccaucuucaucguguacauggugagcagagacaacgugagcugcagcaucugccuguga

SEQ ID NO: 187087 - RNA, 1755 nt, Artificial Sequence
  derived and/or modified CDS sequence (opt4) from hemagglutinin__InfluenzaB__AGX16127
augaaggccaucaucgugcugcugaugguggugaccagcaacgccgacagaaucugcaccggcaucaccagcagcaacagcccccacguggugaagaccgccacccagggcgaggugaacgugaccggcgugaucccccugaccaccacccccaccaagagcuacuucgccaaccugaagggcaccagaaccagaggcaagcugugccccgacugccugaacugcaccgaccuggacguggcccugggcagacccaugugcgugggcaccacccccagcgccaaggccagcauccugcacgaggugagacccgugaccagcggcugcuuccccaucaugcacgacagaaccaagaucagacagcugcccaaccugcugagaggcuacgagaacaucagacugagcacccagaacgugaucgacgccgagaacgcccccggcggccccuacagacugggcaccagcggcagcugccccaacgccaccagcaagagcggcuucuucgccaccauggccugggccgugcccaaggacaacaacaagaacgccaccaacccccugaccguggaggugcccuacgugugcaccgagggcgaggaccagaucaccguguggggcuuccacagcgacaacaagauccagaugaagaaccuguacggcgacagcaacccccagaaguucaccagcagcgccaacggcgugaccacccacuacgugagccagaucggcggcuuccccgcccagaccgaggacggcggccugccccagagcggcagaaucgugguggacuacauggugcagaagcccagaaagaccggcaccaucguguaccagagaggcgugcugcugccccagaagguguggugcgccagcggcagaagcaaggugaucaagggcagccugccccugaucggcgaggccgacugccugcacgagaaguacggcggccugaacaagagcaagcccuacuacaccggcgagcacgccaaggccaucggcaacugccccaucugggugaagaccccccugaagcuggccaacggcaccaaguacagaccccccgccaagcugcugaaggagagaggcuucuucggcgccaucgccggcuuccuggagggcggcugggagggcaugaucgccggcuggcacggcuacaccagccacggcgcccacggcguggccguggccgccgaccugaagagcacccaggaggccaucaacaagaucaccaagaaccugaacagccugagcgagcuggagaucaagaaccugcagagacugagcggcgccauggacgagcugcacaacgagauccuggagcuggacgagaagguggacgaccugagagccgacaccaucagcagccagaucgagcuggccgugcugcugagcaacgagggcaucaucaacagcgaggacgagcaccugcuggcccuggagagaaagcugaagaagaugcugggccccagcgccguggacaucggcaacggcugcuucgagaccaagcacaagugcaaccagaccugccuggacagaaucgccgccggcaccuucaacgccggcgaguucagccugcccaccuucgacagccugaacaucaccgccgccagccugaacgacgacggccuggacaaccacaccauccugcuguacuacagcaccgccgccagcagccuggccgugacccugaugcuggccaucuucaucguguacauggugagcagagacaacgugagcugcagcaucugccuguga

SEQ ID NO: 187088 - RNA, 1755 nt, Artificial Sequence; identical to SEQ ID NO: 187086
  derived and/or modified CDS sequence (opt4) from hemagglutinin__InfluenzaB__AGX16138

SEQ ID NO: 187089 - RNA, 1755 nt, Artificial Sequence; identical to SEQ ID NO: 187083
  derived and/or modified CDS sequence (opt4) from hemagglutinin__InfluenzaB__AGX16149

SEQ ID NO: 187090 - RNA, 1755 nt, Artificial Sequence; identical to SEQ ID NO: 187084
  derived and/or modified CDS sequence (opt4) from hemagglutinin__InfluenzaB__AGX16160

SEQ ID NO: 187091 - RNA, 1755 nt, Artificial Sequence; identical to SEQ ID NO: 187084
  derived and/or modified CDS sequence (opt4) from hemagglutinin__InfluenzaB__AGX16182

SEQ ID NO: 187092 - RNA, 1755 nt, Artificial Sequence; identical to SEQ ID NO: 186486
  derived and/or modified CDS sequence (opt4) from hemagglutinin__InfluenzaB__AGX16193

SEQ ID NO: 187093 - RNA, 1755 nt, Artificial Sequence; identical to SEQ ID NO: 186486
  derived and/or modified CDS sequence (opt4) from hemagglutinin__InfluenzaB__AGX16215

SEQ ID NO: 187094 - RNA, 1755 nt, Artificial Sequence; identical to SEQ ID NO: 186486
  derived and/or modified CDS sequence (opt4) from hemagglutinin__InfluenzaB__AGX16226

SEQ ID NO: 187095 - RNA, 1755 nt, Artificial Sequence
  derived and/or modified CDS sequence (opt4) from hemagglutinin__InfluenzaB__AGX16237
augaaggccaucaucgugcugcugaugguggugaccagcaacgccgacagaaucugcaccggcaucaccagcagcaacagcccccacguggugaagaccgccacccagggcgaggugaacgugaccggcgugaucccccugaccaccacccccaccaagagcuacuucgccaaccugaagggcaccagaaccagaggcaagcugugccccgacugccugaacugcaccgaccuggacguggcccugggcagacccaugugcgugggcaccacccccagcgccaaggccagcauccugcacgaggugagacccgugaccagcggcugcuuccccaucaugcacgacagaaccaagaucagacagcugcccaaccugcugagaggcuacgagaacaucagacugagcacccagaacgugaucgacgccgagaaggcccccggcggccccuacagacugggcaccagcggcagcugccccaacgccaccagcaagagcggcuucuucgccaccauggccugggccgugcccaaggacaacaacaagaacgccaccaacccccugaccguggaggugcccuacaucugcaccgagggcgaggaccagaucaccguguggggcuuccacagcgacaacaagacccagaugaagaaccuguacggcgacagcaacccccagaaguucaccagcagcgccaacggcgugaccacccacuacgugagccagaucggcggcuuccccgaccagaccgaggacggcggccugccccagagcggcagaaucgugguggacuacaugaugcagaagcccggcaagaccggcaccaucguguaccagagaggcgugcugcugccccagaagguguggugcgccagcggcagaagcaaggugaucaagggcagccugccccugaucggcgaggccgacugccugcacgagaaguacggcggccugaacaagagcaagcccuacuacaccggcgagcacgccaaggccaucggcaacugccccaucugggugaagaccccccugaagcuggccaacggcaccaaguacagaccccccgccaagcugcugaaggagagaggcuucuucggcgccaucgccggcuuccuggagggcggcugggagggcaugaucgccggcuggcacggcuacaccagccacggcgcccacggcguggccguggccgccgaccugaagagcacccaggaggccaucaacaagaucaccaagaaccugaacagccugagcgagcuggaggugaagaaccugcagagacugagcggcgccauggacgagcugcacaacgagauccuggagcuggacgagaagguggacgaccugagagccgacaccaucagcagccagaucgagcuggccgugcugcugagcaacgagggcaucaucaacagcgaggacgagcaccugcuggcccuggagagaaagcugaagaagaugcugggccccagcgccguggacaucggcaacggcugcuucgagaccaagcacaagugcaaccagaccugccuggacagaaucgccgccggcaccuucaacgccggcgaguucagccugcccaccuucgacagccugaacaucaccgccgccagccugaacgacgacggccuggacaaccacaccauccugcuguacuacagcaccgccgccagcagccuggccaucacccugaugcuggccaucuucaucguguacauggugagcagagacaacgugagcugcagcaucugccuguga

SEQ ID NO: 187096 - RNA, 1755 nt, Artificial Sequence; identical to SEQ ID NO: 186486
  derived and/or modified CDS sequence (opt4) from hemagglutinin__InfluenzaB__AGX16248

SEQ ID NO: 187097 - RNA, 1755 nt, Artificial Sequence; identical to SEQ ID NO: 186486
  derived and/or modified CDS sequence (opt4) from hemagglutinin__InfluenzaB__AGX16259

SEQ ID NO: 187098 - RNA, 1755 nt, Artificial Sequence
  derived and/or modified CDS sequence (opt4) from hemagglutinin__InfluenzaB__AGX16270
augaaggccaucaucgugcugcugaugguggugaccagcaacgccgacagaaucugcaccggcaucaccagcagcaacagcccccacguggugaagaccgccacccagggcgaggugaacgugaccggcgugaucccccugaccaccacccccaccaagagcuacuucgccaaccugaagggcaccagaaccagaggcaagcugugccccgacugccugaacugcaccgaccuggacguggcccugggcagacccaugugcgugggcaccacccccagcgccaaggccagcauccugcacgaggugagacccgugaccagcggcugcuuccccaucaugcacgacagaaccaagaucagacagcuggccaaccugcugagaggcuacgagaacaucagacugagcacccagaacgugaucgacgccgagaaggcccccggcggccccuacagacugggcaccagcggcagcugccccaacgccaccagcaagagcggcuucuucgccaccauggccugggccgugcccaaggacaacaacaagaacgccaccaacccccugaccguggaggugcccuacaucugcaaggagggcgaggaccagaucaccguguggggcuuccacagcgacaacaagacccagaugaagaaccuguacggcgacagcaacccccagaaguucaccagcagcgccaacggcgugaccacccacuacgugagccagaucggcggcuuccccgaccagaccgaggacggcggccugccccagagcggcagaaucgugguggacuacaugauccagaagcccggcaagaccggcaccaucguguaccagagaggcgugcugcugccccagaagguguggugcgccagcggcagaagcaaggugaucaagggcagccugccccugaucggcgaggccgacugccugcacgagaaguacggcggccugaacaagagcaagcccuacuacaccggcgagcacgccaaggccaucggcaacugccccaucugggugaagaccccccugaagcuggccaacggcaccaaguacagaccccccgccaagcugcugaaggagagaggcuucuucggcgccaucgccggcuuccuggagggcggcugggagggcaugaucgccggcuggcacggcuacaccagccacggcgcccacggcguggccguggccgccgaccugaagagcacccaggaggccaucaacaagaucaccaagaaccugaacagccugagcgagcuggaggugaagaaccugcagagacugagcggcgccauggacgagcugcacaacgagauccuggagcuggacgagaagguggacgaccugagagccgacaccaucagcagccagaucgagcuggccgugcugcugagcaacgagggcaucaucaacagcgaggacgagcaccugcuggcccuggagagaaagcugaagaagaugcugggccccagcgccguggacaucggcaacggcugcuucgagaccaagcacaagugcaaccagaccugccuggacagaaucgccgccggcaccuucaacgccggcgaguucagccugcccaccuucgacagccugaacaucaccgccgccagccugaacgacgacggccuggacaaccacaccauccugcuguacuacagcaccgccgccagcagccuggccgugacccugaugcuggccaucuucaucguguacauggugagcagagacaacgugagcugcagcaucugccuguga

SEQ ID NO: 187099 - RNA, 1755 nt, Artificial Sequence; identical to SEQ ID NO: 187098
  derived and/or modified CDS sequence (opt4) from hemagglutinin__InfluenzaB__AGX16281

SEQ ID NO: 187100 - RNA, 1755 nt, Artificial Sequence
  derived and/or modified CDS sequence (opt4) from hemagglutinin__InfluenzaB__AGX16292
augaaggccaucaucgugcugcugaugguggugaccagcaacgccgacagaaucugcaccggcaucaccagcagcaacagcccccacguggugaagaccgccacccagggcgaggugaacgugaccggcgugaucccccugaccaccacccccaccaagagcuacuucgccaaccugaagggcaccagaaccagaggcaagcugugccccgacugccugaacugcaccgaccuggacguggcccugggcagacccaugugcgugggcaccacccccagcgccaaggccagcauccugcacgaggugagacccgugaccagcggcugcuuccccaucaugcacgacagaaccaagaucagacagcuggccaaccugcugagaggcuacgagaacaucagacugagcaaccagaacgugaucgacgccgagaaggcccccggcggccccuacagacugggcaccagcggcagcugccccaacgccaccagcaagagcggcuucuucgccaccauggccugggccgugcccaaggacaacaacaagaacgccaccaacccccugaccguggaggugcccuacaucugcaccgagggcgaggaccagaucaccguguggggcuuccacagcgacaacaagacccagaugaagaaccuguacggcgacagcaacccccagaaguucaccagcagcgccaacggcgugaccacccacuacgugagccagaucggcggcuuccccgaccagaccgaggacggcggccugccccagagcggcagaaucgugguggacuacaugaugcagaagcccggcaagaccggcaccaucguguaccagagaggcgugcugcugccccagaagguguggugcgccagcggcagaagcaaggugaucaagggcgcccugccccugaucggcgaggccgacugccugcacgagaaguacggcggccugaacaagagcaagcccuacuacaccggcgagcacgccaaggccaucggcaacugccccaucugggugaagaccccccugaagcuggccaacggcaccaaguacagaccccccgccaagcugcugaaggagagaggcuucuucggcgccaucgccggcuuccuggagggcggcugggagggcaugaucgccggcuggcacggcuacaccagccacggcgcccacggcguggccguggccgccgaccugaagagcacccaggaggccaucaacaagaucaccaagaaccugaacagccugagcgagcuggaggugaagaaccugcagagacugagcggcgccauggacgagcugcacaacgagauccuggagcuggacgagaagguggacgaccugagagccgacaccaucagcagccagaucgagcuggccgugcugcugagcaacgagggcaucaucaacagcgaggacgagcaccugcuggcccuggagagaaagcugaagaagaugcugggccccagcgccguggacaucggcaacggcugcuucgagaccaagcacaagugcaaccagaccugccuggacagaaucgccgccggcaccuucaacgccggcgaguucagccugcccaccuucgacagccugaacaucaccgccgccagccugaacgacgacggccuggacaaccacaccauccugcuguacuacagcaccgccgccagcagccuggccgugacccugaugcuggccaucuucaucguguacauggugagcagagacaacgugagcugcagcaucugccuguga

SEQ ID NO: 187101 - RNA, 1758 nt, Artificial Sequence; identical to SEQ ID NO: 186574
  derived and/or modified CDS sequence (opt4) from hemagglutinin__InfluenzaB__AGX16303

SEQ ID NO: 187102 - RNA, 1755 nt, Artificial Sequence; identical to SEQ ID NO: 186486
  derived and/or modified CDS sequence (opt4) from hemagglutinin__InfluenzaB__AGX16314

SEQ ID NO: 187103 - RNA, 1755 nt, Artificial Sequence; identical to SEQ ID NO: 186486
  derived and/or modified CDS sequence (opt4) from hemagglutinin__InfluenzaB__AGX16325

SEQ ID NO: 187104 - RNA, 1755 nt, Artificial Sequence; identical to SEQ ID NO: 186791
  derived and/or modified CDS sequence (opt4) from hemagglutinin__InfluenzaB__AGX16336

SEQ ID NO: 187105 - RNA, 1755 nt, Artificial Sequence; identical to SEQ ID NO: 186791
  derived and/or modified CDS sequence (opt4) from hemagglutinin__InfluenzaB__AGX16347

SEQ ID NO: 187106 - RNA, 1755 nt, Artificial Sequence; identical to SEQ ID NO: 186791
  derived and/or modified CDS sequence (opt4) from hemagglutinin__InfluenzaB__AGX16358

SEQ ID NO: 187107 - RNA, 1755 nt, Artificial Sequence
  derived and/or modified CDS sequence (opt4) from hemagglutinin__InfluenzaB__AGX16369
augaaggccaucaucgugcugcugaugguggugaccagcaacgccgacagaaucugcaccggcaucaccagcagcaacagcccccacguggugaagaccgccacccagggcgaggugaacgugaccggcgugaucccccugaccaccacccccaccaagagcuacuucgccaaccugaagggcaccagaaccagaggcaagcugugccccgacugccugaacugcaccgaccuggacguggcccugggcagacccaugugcgugggcaccacccccagcgccaaggccagcauccugcacgaggugagacccgugaccagcggcugcuuccccaucaugcacgacagaaccaagaucagacagcugcccaaccugcugagaggcuacgagaacaucagacugagcacccagaacgugaucgacgccgagaaggcccccggcggccccuacagacugggcaccagcggcagcugccccaacgccaccagcaagagcggcuucuucgccaccauggccugggccgugcccaaggacaacaacaagaacgccaccaacccccugaccguggaggugcccuacaucugcaccgagggcgaggaccagaucaccguguggggcuuccacagcgacaacaagacccagaugaagaaccuguacggcgacagcaacccccagaaguucaccagcagcgccaacggcgugaccacccacuacgugagccagaucggcagcuuccccgaccagaccgaggacggcggccugccccagagcggcagaaucgugguggacuacaugaugcagaagcccggcaagaccggcaccaucguguaccagagaggcauccugcugccccagaagguguggugcgccagcggcagaagcaaggugaucaagggcagccugccccugaucggcgaggccgacugccugcacgagaaguacggcggccugaacaagagcaagcccuacuacaccggcgagcacgccaaggccaucggcaacugccccaucugggugaagaccccccugaagcuggccaacggcaccaaguacagaccccccgccaagcugcugaaggagagaggcuucuucggcgccaucgccggcuuccuggagggcggcugggagggcaugaucgccggcuggcacggcuacaccagccacggcgcccacggcguggccguggccgccgaccugaagagcacccaggaggccaucaacaagaucaccaagaaccugaacagccugagcgagcuggaggugaagaaccugcagagacugagcggcgccauggacgagcugcacaacgagauccuggagcuggacgagaagguggacgaccugagagccgacaccaucagcagccagaucgagcuggccgugcugcugagcaacgagggcaucaucaacagcgaggacgagcaccugcuggcccuggagagaaagcugaagaagaugcugggccccagcgccguggagaucggcaacggcugcuucgagaccaagcacaagugcaaccagaccugccuggacagaaucgccgccggcaccuucaacgccggcgaguucagccugcccaccuucgacagccugaacaucaccgccgccagccugaacgacgacggccuggacaaccacaccauccugcuguacuacagcaccgccgccagcagccuggccgugacccugaugcuggccaucuucaucguguacauggugagcagagacaacgugagcugcagcaucugccuguga

SEQ ID NO: 187108 - RNA, 1755 nt, Artificial Sequence
  derived and/or modified CDS sequence (opt4) from hemagglutinin__InfluenzaB__AGX16380
augaaggccaucguggugcugcugaugguggugaccagcaacgccgacagaaucugcaccggcaucaccagcagcaacagcccccacguggugaagaccgccacccagggcgaggugaacgugaccggcgugaucccccugaccaccacccccaccaagagcuacuucgccaaccugaagggcaccagaaccagaggcaagcugugccccgacugccugaacugcaccgaccuggacguggcccugggcagacccaugugcgugggcgccacccccagcgccaaggccagcauccugcacgaggugagacccgugaccagcggcugcuuccccaugaugcacgacagaaccaagaucagacagcugcccaaccugcugagaggcuacgagaacaucagacugagcacccagaacgugaucgacgccgagaaggcccccggcggccccuacagacugggcaccagcggcagcugccccaacgccaccagcaagagcggcuucuucgccaccauggccugggccgugcccaaggacaacaacaagaacgccaccaacccccugaccguggaggugcccuacaucugcaccgagggcgaggaccagaucaccguguggggcuuccacagcgacaacaagacccagaugaagaaccuguacggcgacagcaacccccagaaguucaccagcagcgccaacggcgugaccacccacuacgugagccagaucggcagcuuccccgaccagaccgaggacggcggccugccccagagcggcagaaucgugguggacuacaugaugcagaagcccggcaagaccggcaccaucguguaccagagaggcgugcugcugccccagaagguguggugcgccagcggcagaagcaaggugaucaagggcagccugccccugaucggcgaggccgacugccugcacgagaaguacggcggccugaacaagagcaagcccuacuacaccggcgagcacgccaaggccaucggcaacugccccaucugggugaagaccccccugaagcuggccaacggcaccaaguacagaccccccgccaagcugcugaaggagagaggcuucuucggcgccaucgccggcuuccuggagggcggcugggagggcaugaucgccggcuggcacggcuacaccagccacggcgcccacggcguggccguggccgccgaccugaagagcacccaggaggccaucaacaagaucaccaagaaccugaacagccugagcgagcuggaggugaagaaccugcagagacugagcggcgccauggacgagcugcacaacgagauccuggagcuggacgagaagguggacgaccugagagccgacaccaucagcagccagaucgagcuggccgugcugcugagcaacgagggcaucaucaacagcgaggacgagcaccugcuggcccuggagagaaagcugaagaagaugcugggccccagcgccguggagaucggcaacggcugcuucgagaccaagcacaagugcaaccagaccugccuggacagaaucgccgccggcaccuucaacgccggcgaguucagccugcccaccuucgacagccugaacaucaccgccgccagccugaacgacgacggccuggacaaccacaccauccugcuguacuacagcaccgccgccagcagccuggccgugacccugaugcuggccaucuucaucguguacauggugagcagagacaacgugagcugcagcaucugccuguga

SEQ ID NO: 187109 - RNA, 1755 nt, Artificial Sequence; identical to SEQ ID NO: 186627
  derived and/or modified CDS sequence (opt4) from hemagglutinin__InfluenzaB__AGX16391

SEQ ID NO: 187110 - RNA, 1755 nt, Artificial Sequence
  derived and/or modified CDS sequence (opt4) from hemagglutinin__InfluenzaB__AGX16402
augaaggccaucaucgugcugcugaugguggugaccagcaacgccgacagaaucugcaccggcaucaccagcagcaacagcccccacguggugaagaccgccacccagggcgaggugaacgugaccggcgugaucccccugaccaccacccccaccaagagcuacuucgccaaccugaagggcaccagaaccagaggcaagcugugccccgacugccugaacugcaccgaccuggacguggcccugggcagacccaugugcgugggcaccacccccagcgccaaggccagcauccugcacgaggugagacccgugaccagcggcugcuuccccaucaugcacgacagaaccaagaucagacagcugcccaaccugcugagaggcuacgagaacaucagacugagcacccagaacgugaucgacgccgagaaggcccccggcggccccuacagacugggcaccagcggcagcugccccaacgccaccagcaagaucggcuucuucgccaccauggccugggccgugcccaaggacaacuacaagaacgccaccaacccccugaccguggaggugcccuacaucugcaccgagggcgaggaccagaucaccguguggggcuuccacagcgacaacaagccccagaugaagaaccuguacggcgacagcaacccccagaaguucaccagcagcgccaacggcgugaccacccacuacgugagccagaucggcgacuuccccgaccagaccgaggacggcggccugccccagagcggcagaaucgugguggacuacaugaugcagaagcccggcaagaccggcaccaucguguaccagagaggcgugcugcugccccagaagguguggugcgccagcggcagaagcaaggugaucaagggcagccugccccugaucggcgaggccgacugccugcacgagaaguacggcggccugaacaagagcaagcccuacuacaccggcgagcacgccaaggccaucggcaacugccccaucugggugaagaccccccugaagcuggccaacggcaccaaguacagaccccccgccaagcugcugaaggagagaggcuucuucggcgccaucgccggcuuccuggagggcggcugggagggcaugaucgccggcuggcacggcuacaccagccacggcgcccacggcguggccguggccgccgaccugaagagcacccaggaggccaucaacaagaucaccaagaaccugaacagccugagcgagcuggaggugaagaaccugcagagacugagcggcgccauggacgagcugcacaacgagauccuggagcuggacgagaagguggacgaccugagagccgacaccaucagcagccagaucgagcuggccgugcugcugagcaacgagggcaucaucaacagcgaggacgagcaccugcuggcccuggagagaaagcugaagaagaugcugggccccagcgccguggacaucggcaacggcugcuucgagaccaagcacaagugcaaccagaccugccuggacagaaucgccgccggcaccuucaacgccggcgaguucagccugcccaccuucgacagccugaacaucaccgccgccagccugaacgacgacggccuggacaaccacaccauccugcuguacuacagcaccgccgccagcagccuggccgugacccugaugcuggccaucuucaucguguacauggugagcagagacaacgugagcugcagcaucugccuguga

SEQ ID NO: 187111 - RNA, 1755 nt, Artificial Sequence; identical to SEQ ID NO: 186880
  derived and/or modified CDS sequence (opt4) from hemagglutinin__InfluenzaB__AGX16413

SEQ ID NO: 187112 - RNA, 1755 nt, Artificial Sequence; identical to SEQ ID NO: 186880
  derived and/or modified CDS sequence (opt4) from hemagglutinin__InfluenzaB__AGX16423

SEQ ID NO: 187113 - RNA, 1755 nt, Artificial Sequence; identical to SEQ ID NO: 186880
  derived and/or modified CDS sequence (opt4) from hemagglutinin__InfluenzaB__AGX16434

SEQ ID NO: 187114 - RNA, 1755 nt, Artificial Sequence; identical to SEQ ID NO: 186880
  derived and/or modified CDS sequence (opt4) from hemagglutinin__InfluenzaB__AGX16445

SEQ ID NO: 187115 - RNA, 1755 nt, Artificial Sequence; identical to SEQ ID NO: 186880
  derived and/or modified CDS sequence (opt4) from hemagglutinin__InfluenzaB__AGX16456

SEQ ID NO: 187116 - RNA, 1755 nt, Artificial Sequence
  derived and/or modified CDS sequence (opt4) from hemagglutinin__InfluenzaB__AGX16467
augaaggccaucaucgugcugcugaugguggugaccagcaacgccgacagaaucugcaccggcaucaccagcagcaacagcccccacguggugaagaccgccacccagggcgaggugaacgugaccggcgugaucccccugaccaccacccccaccaagagcuacuucgccaaccugaagggcaccagaaccagaggcaagcugugccccgacugccugaacugcaccgaccuggacguggcccugggcagacccaugugcgugggcaccacccccagcgccaaggccagcauccugcacgaggugagacccgugaccagcggcugcuuccccaucaugcacgacagaaccaagaucagacagcugcccaaccugcugagaggcuacgagaacaucagacugagcacccagaacgugaucgacgccgagaaggcccccggcggccccuacagacugggcaccagcggcagcugccccaacgccaccagcaagagcggcuucuucgccaccauggccugggccgugcccaaggacaacaacaagaacgccaccaacccccugaccguggaggugcccuacaucugcaccgagggcgaggaccagaucaccguguggggcuuccacagcgacaacaagacccagaugaagaaccuguacggcgacagcaacccccagaaguucaccagcagcgccaacggcgugaccacccacuacgugagccagaucggcagcuuccccgaccagaccgaggacggcggccugccccagagcggcagaaucgugguggacuacaugaugcagaagcccggcaagaccggcaccaucguguaccagagaggcgugcugcugccccagagaguguggugcgccagcggcagaagcaaggugaucaagggcagccugccccugaucggcgaggccgacugccugcacgagaaguacggcggccugaacaagagcaagcccuacuacaccggcgagcacgccaaggccaucggcaacugccccaucugggugaagaccccccugaagcuggccaacggcaccaaguacagaccccccgccaagcugcugaaggagagaggcuucuucggcgccaucgccggcuuccuggagggcggcugggagggcaugaucgccggcuggcacggcuacaccagccacggcgcccacggcguggccguggccgccgaccugaagagcacccaggaggccaucaacaagaucaccaagaaccugaacagccugagcgagcuggaggugaagaaccugcagagacugagcggcgccauggacgagcugcacaacgagauccuggagcuggacgagaagguggacgaccugagagccgacaccaucagcagccagaucgagcuggccgugcugcugagcaacgagggcaucaucaacagcgaggacgagcaccugcuggcccuggagagaaagcugaagaagaugcugggccccagcgccguggagaucggcaacggcugcuucgagaccaagcacaagugcaaccagaccugccuggacagaaucgccgccggcaccuucaacgccggcgaguucagccugcccaccuucgacagccugaacaucaccgccgccagccugaacgacgacggccuggacaaccacaccauccugcuguacuacagcaccgccgccagcagccuggccgugacccugaugcuggccaucuucaucguguacauggugagcagagacaacgugagcugcagcaucugccuguga

SEQ ID NO: 187117 - RNA, 1755 nt, Artificial Sequence; identical to SEQ ID NO: 186880
  derived and/or modified CDS sequence (opt4) from hemagglutinin__InfluenzaB__AGX16478

SEQ ID NO: 187118 - RNA, 1755 nt, Artificial Sequence; identical to SEQ ID NO: 186627
  derived and/or modified CDS sequence (opt4) from hemagglutinin__InfluenzaB__AGX16489

SEQ ID NO: 187119 - RNA, 1758 nt, Artificial Sequence; identical to SEQ ID NO: 187039
  derived and/or modified CDS sequence (opt4) from hemagglutinin__InfluenzaB__AGX16500

SEQ ID NO: 187120 - RNA, 1758 nt, Artificial Sequence; identical to SEQ ID NO: 187039
  derived and/or modified CDS sequence (opt4) from hemagglutinin__InfluenzaB__AGX16511

SEQ ID NO: 187121 - RNA, 1758 nt, Artificial Sequence; identical to SEQ ID NO: 187039
  derived and/or modified CDS sequence (opt4) from hemagglutinin__InfluenzaB__AGX16522

SEQ ID NO: 187122 - RNA, 1758 nt, Artificial Sequence
  derived and/or modified CDS sequence (opt4) from hemagglutinin__InfluenzaB__AGX16533
augaaggccaucaucgugcugcugaugguggugaccagcaacgccgacagaaucugcaccggcaucaccagcagcaacagcccccacguggugaagaccgccacccagggcgaggugaacgugaccggcgugaucccccugaccaccacccccaccaagagccacuucgccaaccugaagggcaccaagaccagaggcaagcugugccccaagugccugaacugcaccgaccuggacguggcccugggcagacccaagugcaccggcaacauccccagcgccaaggugagcauccugcacgaggugagacccgugaccagcggcugcuuccccaucaugcacgacagaaccaagaucagacagcugcccaaccugcugagaggcuacgagcacaucagacugagcacccacaacgugaucaacgccgagaaggcccccggcggccccuacaagaucggcaccagcggcagcugccccaacgugaccaacggcaacggcuucuucgccaccauggccugggccgugcccaagaacgacaacaacaagaccgccaccaacagccugaccaucgaggugcccuacaucugcaccgagggcgaggaccagaucaccguguggggcuuccacagcgacaaggagacccagauggccaagcuguacggcgacagcaagccccagaaguucaccagcagcgccaacggcgugaccacccacuacgugagccagaucggcggcuuccccaaccagaccgaggacggcggccugccccagagcggcagaaucgugguggacuacauggugcagaagagcggcaagaccggcaccaucaccuaccagagaggcauccugcugccccagaagguguggugcgccagcggcagaagcaaggugaucaagggcagccugccccugaucggcgaggccgacugccugcacgagaaguacggcggccugaacaagagcaagcccuacuacaccggcgagcacgccaaggccaucggcaacugccccaucugggugaagaccccccugaagcuggccaacggcaccaaguacagaccccccgccaagcugcugaaggagagaggcuucuucggcgccaucgccggcuuccuggagggcggcugggagggcaugaucgccggcuggcacggcuacaccagccacggcgcccacggcguggccguggccgccgaccugaagagcacccaggaggccaucaacaagaucaccaagaaccugaacagccugagcgagcuggaggugaagaaccugcagagacugagcggcgccauggacgagcugcacaacgagauccuggagcuggacgagaagguggacgaccugagagccgacaccaucagcagccagaucgagcuggccgugcugcugagcaacgagggcaucaucaacagcgaggacgagcaccugcuggcccuggagagaaagcugaagaagaugcugggccccagcgccguggagaucggcaacggcugcuucgagaccaagcacaagugcaaccagaccugccuggacagaaucgccgccggcaccuucgacgccggcgaguucagccugcccaccuucgacagccugaacaucaccgccgccagccugaacgacgacggccuggacaaccacaccauccugcuguacuacagcaccgccgccagcagccuggccgugacccugaugaucgccaucuucgugguguacauggugagcagagacaacgugagcugcagcaucugccuguga

SEQ ID NO: 187123 - RNA, 1758 nt, Artificial Sequence
  derived and/or modified CDS sequence (opt4) from hemagglutinin__InfluenzaB__AGX16555
augaaggccaucaucgugcugcugaugguggugaccagcaacgccgacagaaucugcaccggcaucaccagcagcaacagcccccacguggugaagaccgccacccagggcgaggugaacgugaccggcgugaucccccugaccaccacccccaccaagagccacuucgccaaccugaagggcaccaagaccagaggcaagcugugccccaagugccugaacugcaccgaccuggacguggcccugggcagacccaagugcaccggcaacauccccagcgccaaggugagcauccugcacgaggugagacccgugaccagcggcugcuuccccaucaugcacgacagaaccaagaucagacagcugcccaaccugcugagaggcuacgagcacaucagacugagcacccacaacgugaucaacgccgagaaggcccccggcggccccuacaagaucggcaccagcggcagcugccccaacgugaccaacggcaacggcuucuucgccaccauggccugggccgugcccaagaacgacaacaacaagaccgccaccaacagccugaccaucgaggugcccuacaucugcaccgagggcgaggaccagaucaccguguggggcuuccacagcgacaacgaggcccagauggccaagcuguacggcgacagcaagccccagaaguucaccagcagcgccaacggcgugaccacccacuacgugagccagaucggcggcuuccccaaccagaccgaggacggcggccugccccagagcggcagaaucgugguggacuacauggugcagaagagcggcaagaccggcaccaucaccuaccagagaggcauccugcugccccagaagguguggugcgccagcggcagaagcaaggugaucaagggcagccugccccugaucggcgaggccgacugccugcacgagaaguacggcggccugaacaagagcaagcccuacuacaccggcgagcacgccaaggccaucggcaacugccccaucugggugaagaccccccugaagcuggccaacggcaccaaguacagaccccccgccaagcugcugaaggagagaggcuucuucggcgccaucgccggcuuccuggagggcggcugggagggcaugaucgccggcuggcacggcuacaccagccacggcgcccacggcguggccguggccgccgaccugaagagcacccaggaggccaucaacaagaucaccaagaaccugaacagccugagcgagcuggaggugaagaaccugcagagacugagcggcgccauggacgagcugcacaacgagauccuggagcuggacgagaagguggacgaccugagagccgacaccaucagcagccagaucgagcuggccgugcugcugagcaacgagggcaucaucaacagcgaggacgagcaccugcuggcccuggagagaaagcugaagaagaugcugggccccagcgccguggagaucggcaacggcugcuucgagaccaagcacaagugcaaccagaccugccuggacagaaucgccgccggcaccuucgacgccggcgaguucagccugcccaccuucgacagccugaacaucaccgccgccagccugaacgacgacggccuggacaaccacaccauccugcuguacuacagcaccgccgccagcagccuggccgugacccugaugaucgccaucuucgugguguacauggugagcagagacaacgugagcugcagcaucugccuguga

SEQ ID NO: 187124 - RNA, 1758 nt, Artificial Sequence
  derived and/or modified CDS sequence (opt4) from hemagglutinin__InfluenzaB__AGX16566
augaaggccaucaucgugcugcugaugguggugaccagcaacgccgacagaaucugcaccggcaucaccagcagcaacagcccccacguggugaagaccgccacccagggcgaggugaacgugaccggcgugaucccccugaccaccacccccaccaagagccacuucgccaaccugaagggcaccaagaccagaggcaagcugugccccaagugccugaacugcaccgaccuggacguggcccugggcagacccaagugcaccggcaacauccccagcgccaaggugagcauccugcacgaggugagacccgugaccagcggcugcuuccccaucaugcacgacagaaccaagaucagacagcugcccaaccugcugagaggcuacgagcacaucagacugagcacccacaacgugaucaacgccgagaaggcccccggcggccccuacaagaucggcaccagcggcagcugccccaacgugaccaacggcaacggcuucuucgccaccauggccugggccgugcccaagaacgacaacaacaagaccgccaccaacagccugaccaucgaggugcccuacaucugcaccgagggcgaggaccagaucaccguguggggcuuccacagcgacaacgagauccagauggccaagcuguacggcgacagcaagccccagaaguucaccagcagcgccaacggcgugaccacccacuacgugagccagaucggcggcuuccccaaccagaccgaggacggcggccugccccagagcggcagaaucgugguggacuacauggugcagaagagcggcaagaccggcaccaucaccuaccagagaggcauccugcugccccagaagguguggugcgccagcggcagaagcaaggugaucaagggcagccugccccugaucggcgaggccgacugccugcacgagaaguacggcggccugaacaagagcaagcccuacuacaccggcgagcacgccaaggccaucggcaacugccccaucugggugaagaccccccugaagcuggccaacggcaccaaguacagaccccccgccaagcugcugaaggagagaggcuucuucggcgccaucgccggcuuccuggagggcggcugggagggcaugaucgccggcuggcacggcuacaccagccacggcgcccacggcguggccguggccgccgaccugaagagcacccaggaggccaucaacaagaucaccaagaaccugaacagccugagcgagcuggaggugaagaaccugcagagacugagcggcgccauggacgagcugcacaacgagauccuggagcuggacgagaagguggacgaccugagagccgacaccaucagcagccagaucgagcuggccgugcugcugagcaacgagggcaucaucaacagcgaggacgagcaccugcuggcccuggagagaaagcugaagaagaugcugggccccagcgccguggagaucggcaacggcugcuucgagaccaagcacaagugcaaccagaccugccuggacagaaucgccgccggcaccuucgacgccggcgaguucagccugcccaccuucgacagccugaacaucaccgccgccagccugaacgacgacggccuggacaaccacaccauccugcuguacuacagcaccgccgccagcagccuggccgugacccugaugaucgccaucuucgugguguacauggugagcagagacaacgugagcugcagcaucugccuguga

SEQ ID NO: 187125 - RNA, 1758 nt, Artificial Sequence; identical to SEQ ID NO: 187039
  derived and/or modified CDS sequence (opt4) from hemagglutinin__InfluenzaB__AGX16577

SEQ ID NO: 187126 - RNA, 1758 nt, Artificial Sequence
  derived and/or modified CDS sequence (opt4) from hemagglutinin__InfluenzaB__AGX16588
augaaggccaucaucgugcugcugaugguggugaccagcaacgccgacagaaucugcaccggcaucaccagcagcaacagcccccacguggugaagaccgccacccagggcgaggugaacgugaccggcgugaucccccugaccaccacccccaccaagagccacuucgccaaccugaagggcaccaagaccagaggcaagcugugccccaagugccugaacugcaccgaccuggacguggcccugggcagacccaagugcaccggcaacauccccagcgccaaggugagcauccugcacgaggugagacccgugaccagcggcugcuuccccaucaugcacgacagaaccaagaucagacagcugcccaaccugcugagaggcuacgagcacaucagacugagcacccacaacgugaucaacgccgagaaggcccccggcggccccuacaagaucggcaccagcggcagcugccccaacgugaccaacggcaacggcuucuucgccaccauggccugggccgugcccaagaacgacaacaacaagaccgccaccaacagccugaccaucgaggugcccuacaucugcaccgagggcgaggaccagaucaccguguggggcuuccacagcgacaacgagauccagauggccaagcuguacggcgacagcaagccccagaaguucaccagcagcgccaacggcgugaccacccacuacgugagccagaucggcggcuuccccaaccagaccgaggacggcggccugccccagagcggcagaaucgugguggacuacauggugcagaagagcggcaagaccggcaccaucaccuaccagagaggcauccugcugccccagaagguguggugcgccagcggcagaagcaaggugaucaagggcagccugccccugaucggcgaggccgacugccugcacgagaaguacggcggccugaacaagagcaagcccuacuacaccggcgagcacgccaaggccaucggcaacugccccaucugggugaagaccccccugaagcuggccaacggcaccaaguacagaccccccgccaagcugcugaaggagagaggcuucuucggcgccaucgccggcuuccuggagggcggcugggagggcaugaucgccggcuggcacggcuacaccagccacggcgcccacggcguggccguggccgccgaccugaagagcacccaggaggccaucaacaagaucaccaagaaccugaacagccugagcgagcuggaggugaagaaccugcagagacugagcggcgccauggacgagcugcacaacgagauccuggagcuggacgagaagguggacgaccugagagccgacaccaucagcagccagaucgagcuggccgugcugcugagcaacgagggcaucaucaacagcgaggacgagcaccugcuggcccuggagagaaagcugaagaagaugcugggccccagcgccaucgagaucggcaacggcugcuucgagaccaagcacaagugcaaccagaccugccuggacagaaucgccgccggcaccuucgacgccggcgaguucagccugcccaccuucgacagccugaacaucaccgccgccagccugaacgacgacggccuggacaaccacaccauccugcuguacuacagcaccgccgccagcagccuggccgugacccugaugaucgccaucuucgugguguacauggugagcagagacaacgugagcugcagcaucugccuguga

SEQ ID NO: 187127 - RNA, 1758 nt, Artificial Sequence; identical to SEQ ID NO: 187039
  derived and/or modified CDS sequence (opt4) from hemagglutinin__InfluenzaB__AGX16599

SEQ ID NO: 187128 - RNA, 1758 nt, Artificial Sequence; identical to SEQ ID NO: 187122
  derived and/or modified CDS sequence (opt4) from hemagglutinin__InfluenzaB__AGX16610

SEQ ID NO: 187129 - RNA, 1758 nt, Artificial Sequence; identical to SEQ ID NO: 187039
  derived and/or modified CDS sequence (opt4) from hemagglutinin__InfluenzaB__AGX16621

SEQ ID NO: 187130 - RNA, 1758 nt, Artificial Sequence
  derived and/or modified CDS sequence (opt4) from hemagglutinin__InfluenzaB__AGX16654
augaaggccaucaucgugcugcugaugguggugaccagcaacgccgacagaaucugcaccggcaucaccagcagcaacagcccccacguggugaagaccgccacccagggcgaggugaacgugaccggcgugaucccccugaccaccacccccaccaagagccacuucgccaaccugaagggcaccaagaccagaggcaagcugugccccaagugccugaacugcaccgaccuggacguggcccugggcagacccaagugcaccggcaacauccccagcgccaaggugagcauccugcacgaggugagacccgugaccagcggcugcuuccccaucaugcacgacagaaccaagaucagacagcugcccaaccugcugagaggcuacgagcacaucagacugagcacccacaacgugaucaacgccgagaaggcccccggcggccccuacaagaucggcaccagcggcagcugccccaacgugaccaacggcaacggcuucuucgccaccauggccugggccgugcccaagaacgacaacaacaagaccgccaucaacagccugaccaucgaggugcccuacaucugcaccgagggcgaggaccagaucaccguguggggcuuccacagcgacaacgagacccagauggccaagcuguacggcgacagcaagccccagaaguucaccagcagcgccaacggcgugaccacccacuacgugagccagaucggcggcuuccccaaccagaccgaggacggcggccugccccagagcggcagaaucgugguggacuacauggugcagaagagcggcaagaccggcaccaucaccuaccagagaggcauccugcugccccagaagguguggugcgccagcggcagaagcaaggugaucaagggcagccugccccugaucggcgaggccgacugccugcacgagaaguacggcggccugaacaagagcaagcccuacuacaccggcgagcacgccaaggccaucggcaacugccccaucugggugaagaccccccugaagcuggccaacggcaccaaguacagaccccccgccaagcugcugaaggagagaggcuucuucggcgccaucgccggcuuccuggagggcggcugggagggcaugaucgccggcuggcacggcuacaccagccacggcgcccacggcguggccguggccgccgaccugaagagcacccaggaggccaucaacaagaucaccaagaaccugaacagccugagcgagcuggaggugaagaaccugcagagacugagcggcgccauggacgagcugcacaacgagauccuggagcuggacgagaagguggacgaccugagagccgacaccaucagcagccagaucgagcuggccgugcugcugagcaacgagggcaucaucaacagcgaggacgagcaccugcuggcccuggagagaaagcugaagaagaugcugggccccagcgccaucgagaucggcaacggcugcuucgagaccaagcacaagugcaaccagaccugccuggacagaaucgccgccggcaccuucgacgccggcgaguucagccugcccaccuucgacagccugaacaucaccgccgccagccugaacgacgacggccuggacaaccacaccauccugcuguacuacagcaccgccgccagcagccuggccgugacccugaugaucgccaucuucgugguguacauggugagcagagacaacgugagcugcagcaucugccuguga

SEQ ID NO: 187131 - RNA, 1758 nt, Artificial Sequence; identical to SEQ ID NO: 187039
  derived and/or modified CDS sequence (opt4) from hemagglutinin__InfluenzaB__AGX16665

SEQ ID NO: 187132 - RNA, 1758 nt, Artificial Sequence; identical to SEQ ID NO: 187039
  derived and/or modified CDS sequence (opt4) from hemagglutinin__InfluenzaB__AGX16676

SEQ ID NO: 187133 - RNA, 1758 nt, Artificial Sequence; identical to SEQ ID NO: 187039
  derived and/or modified CDS sequence (opt4) from hemagglutinin__InfluenzaB__AGX16687

SEQ ID NO: 187134 - RNA, 1758 nt, Artificial Sequence; identical to SEQ ID NO: 187039
  derived and/or modified CDS sequence (opt4) from hemagglutinin__InfluenzaB__AGX16698

SEQ ID NO: 187135 - RNA, 1758 nt, Artificial Sequence
  derived and/or modified CDS sequence (opt4) from hemagglutinin__InfluenzaB__AGX16709
augaaggccaucaucgugcugcugaugguggugaccagcaacgccgacagaaucugcaccggcaucaccagcagcaacagcccccacguggugaagaccgccacccagggcgaggugaacgugaccggcgugaucccccugaccaccacccccaccaagagccacuucgccaaccugaagggcaccaagaccagaggcaagcugugccccaagugccugaacugcaccgaccuggacguggcccugggcagacccaagugcaccgagaacauccccagcgccaaggugagcauccugcacgaggugagacccgugaccagcggcugcuuccccaucaugcacgacagaaccaagaucagacagcugcccaaccugcugagaggcuacgagcacaucagacugagcacccacaacgugaucaacgccgagaaggcccccggcggccccuacaagaucggcaccagcggcagcugccccaacgugaccaacggcaacggcuucuucgccaccauggccugggccgugcccaagaacgacaacaacaagaccgccaccaacagccugaccaucgaggugcccuacaucugcaccgagggcgaggaccagaucaccguguggggcuuccacagcgacaacgagacccagauggccaagcuguacggcgacagcaagccccagaaguucaccagcagcgccaacggcgugaccacccacuacgugagccagaucggcggcuuccccaaccagaccgaggacggcggccugccccagagcggcagaaucgugguggacuacauggugcagaagagcggcaagaccggcaccaucaccuaccagagaggcauccugcugccccagaagguguggugcgccagcggcagaagcaaggugaucaagggcagccugccccugaucggcgaggccgacugccugcacgagaaguacggcggccugaacaagagcaagcccuacuacaccggcgagcacgccaaggccaucggcaacugccccaucugggugaagaccccccugaagcuggccaacggcaccaaguacagaccccccgccaagcugcugaaggagagaggcuucuucggcgccaucgccggcuuccuggagggcggcugggagggcaugaucgccggcuggcacggcuacaccagccacggcgcccacggcguggccguggccgccgaccugaagagcacccaggaggccaucaacaagaucaccaagaaccugaacagccugagcgagcuggaggugaagaaccugcagagacugagcggcgccauggacgagcugcacaacgagauccuggagcuggacgagaagguggacgaccugagagccgacaccaucagcagccagaucgagcuggccgugcugcugagcaacgagggcaucaucaacagcgaggacgagcaccugcuggcccuggagagaaagcugaagaagaugcugggccccagcgccguggagaucggcaacggcugcuucgagaccaagcacaagugcaaccagaccugccuggacagaaucgccgccggcaccuucgacgccggcgaguucagccugcccaccuucgacagccugaacaucaccgccgccagccugaacgacgacggccuggacaaccacaccauccugcuguacuacagcaccgccgccagcagccuggccgugacccugaugaucgccaucuucgugguguacauggugagcagagacaacgugagcugcagcaucugccuguga

SEQ ID NO: 187136 - RNA, 1758 nt, Artificial Sequence; identical to SEQ ID NO: 187039
  derived and/or modified CDS sequence (opt4) from hemagglutinin__InfluenzaB__AGX16720

SEQ ID NO: 187137 - RNA, 1758 nt, Artificial Sequence; identical to SEQ ID NO: 187039
  derived and/or modified CDS sequence (opt4) from hemagglutinin__InfluenzaB__AGX16731

SEQ ID NO: 187138 - RNA, 1758 nt, Artificial Sequence
  derived and/or modified CDS sequence (opt4) from hemagglutinin__InfluenzaB__AGX16742
augaaggccaucaucgugcugcugaugguggugaccagcaacgccgacagaaucugcaccggcaucaccagcagcaacagcccccacguggugaagaccgccacccagggcgaggugaacgugaccggcgugaucccccugaccaccacccccaccaagagccacuucgccaaccugaagggcaccaagaccagaggcaagcugugccccaagugccugaacugcaccgaccuggacguggcccugggcagacccaagugcaccggcaacauccccagcgccaaggugagcaucauccacgaggugagacccgugaccagcggcugcuuccccaucaugcacgacagaaccaagaucagacagcugcccaaccugcugagaggcuacgagcacaucagacugagcacccacaacgugaucaacgccgagaaggcccccggcggccccuacaagaucggcaccagcggcagcugccccaacgugaccaacggcaacggcuucuucgccaccauggccugggccgugcccaagaacgacaacaacaagaccgccaccaacagccugaccaucgaggugcccuacaucugcaccgagggcgaggaccagaucaccguguggggcuuccacagcgacaacgagacccagauggccaagcuguacggcgacagcaagccccagaaguucaccagcagcgccaacggcgugaccacccacuacgugagccagaucggcggcuuccccaaccagaccgaggacggcggccugccccagagcggcagaaucgugguggacuacauggugcagaagagcggcaagaccggcaccaucaccuaccagagaggcauccugcugccccagaagguguggugcgccagcggcagaagcaaggugaucaagggcagccugccccugaucggcgaggccgacugccugcacgagaaguacggcggccugaacaagagcaagcccuacuacaccggcgagcacgccaaggccaucggcaacugccccaucugggugaagaccccccugaagcuggccaacggcaccaaguacagaccccccgccaagcugcugaaggagagaggcuucuucggcgccaucgccggcuuccuggagggcggcugggagggcaugaucgccggcuggcacggcuacaccagccacggcgcccacggcguggccguggccgccgaccugaagagcacccaggaggccaucaacaagaucaccaagaaccugaacagccugagcgagcuggaggugaagaaccugcagagacugagcggcgccauggacgagcugcacaacgagauccuggagcuggacgagaagguggacgaccugagagccgacaccaucagcagccagaucgagcuggccgugcugcugagcaacgagggcaucaucaacagcgaggacgagcaccugcuggcccuggagagaaagcugaagaagaugcugggccccagcgccguggagaucggcaacggcugcuucgagaccaagcacaagugcaaccagaccugccuggacagaaucgccgccggcaccuucgacgccggcgaguucagccugcccaccuucgacagccugaacaucaccgccgccagccugaacgacgacggccuggacaaccacaccauccugcuguacuacagcaccgccgccagcagccuggccgugacccugaugaucgccaucuucgugguguacauggugagcagagacaacgugagcugcagcaucugccuguga

SEQ ID NO: 187139 - RNA, 1758 nt, Artificial Sequence; identical to SEQ ID NO: 187039
  derived and/or modified CDS sequence (opt4) from hemagglutinin__InfluenzaB__AGX16753

SEQ ID NO: 187140 - RNA, 1758 nt, Artificial Sequence; identical to SEQ ID NO: 187039
  derived and/or modified CDS sequence (opt4) from hemagglutinin__InfluenzaB__AGX16764

SEQ ID NO: 187141 - RNA, 1758 nt, Artificial Sequence; identical to SEQ ID NO: 187039
  derived and/or modified CDS sequence (opt4) from hemagglutinin__InfluenzaB__AGX16775

SEQ ID NO: 187142 - RNA, 1758 nt, Artificial Sequence
  derived and/or modified CDS sequence (opt4) from hemagglutinin__InfluenzaB__AGX16797
augaaggccaucaucgugcugcugaugguggugaccagcaacgccgacagaaucugcaccggcaucaccagcagcaacagcccccacguggugaagaccgccacccagggcgaggugaacgugaccggcgugaucccccugaccaccacccccaccaagagccacuucgccaaccugaagggcaccaagaccagaggcaagcugugccccaagugccugaacugcaccgaccuggacguggcccugggcagacccaagugcaccggcaacaugcccagcgccaaggugagcauccugcacgaggugagacccgugaccagcggcugcuuccccaucaugcacgacagaaccaagaucagacagcugcccaaccugcugagaggcuacgagcacaucagacugagcacccacaacgugaucaacgccgagaaggcccccggcggccccuacaagaucggcaccagcggcagcugccccaacgugaccaacggcaacggcuucuucgccaccauggccugggccgugcccaagaacgacaacaacaagaccgccaccaacagccugaccaucgaggugcccuacaucugcaccgagggcgaggaccagaucaccguguggggcuuccacagcgacaacgagacccagauggccaagcuguacggcgacagcaagccccagaaguucaccagcagcgccaacggcgugaccacccacuacgugagccagaucggcggcuuccccaaccagaccgaggacggcggccugccccagagcggcagaaucgugguggacuacauggugcagaagagcggcaagaccggcaccaucaccuaccagagaggcauccugcugccccagaagguguggugcgccagcggcagaagcaaggugaucaagggcagccugccccugaucggcgaggccgacugccugcacgagaaguacggcggccugaacaagagcaagcccuacuacaccggcgagcacgccaaggccaucggcaacugccccaucugggugaagaccccccugaagcuggccaacggcaccaaguacagaccccccgccaagcugcugaaggagagaggcuucuucggcgccaucgccggcuuccuggagggcggcugggagggcaugaucgccggcuggcacggcuacaccagccacggcgcccacggcguggccguggccgccgaccugaagagcacccaggaggccaucaacaagaucaccaagaaccugaacagccugagcgagcuggaggugaagaaccugcagagacugagcggcgccauggacgagcugcacaacgagauccuggagcuggacgagaagguggacgaccugagagccgacaccaucagcagccagaucgagcuggccgugcugcugagcaacgagggcaucaucaacagcgaggacgagcaccugcuggcccuggagagaaagcugaagaagaugcugggccccagcgccguggagaucggcaacggcugcuucgagaccaagcacaagugcaaccagaccugccuggacagaaucgccgccggcaccuucgacgccggcgaguucagccugcccaccuucgacagccugaacaucaccgccgccagccugaacgacgacggccuggacaaccacaccauccugcuguacuacagcaccgccgccagcagccuggccgugacccugaugaucgccaucuucgugguguacauggugagcagagacaacgugagcugcagcaucugccuguga

SEQ ID NO: 187143 - RNA, 1758 nt, Artificial Sequence; identical to SEQ ID NO: 187039
  derived and/or modified CDS sequence (opt4) from hemagglutinin__InfluenzaB__AGX16808

SEQ ID NO: 187144 - RNA, 1758 nt, Artificial Sequence
  derived and/or modified CDS sequence (opt4) from hemagglutinin__InfluenzaB__AGX16819
augaaggccaucaucgugcugcugaugguggugaccagcaacgccgacagaaucugcaccggcaucaccagcagcaacagcccccacguggugaagaccgccacccagggcgaggugaacgugaccggcgugaucccccugaccaccacccccaccaagagccacuucgccaaccugaagggcaccaagaccagaggcaagcugugccccaagugccugaacugcaccgaccuggacguggcccugggcagacccaagugcaccggcaacauccccagcgccaaggugagcauccugcacgaggugagacccgugaccagcggcugcuuccccaucaugcacgacagaaccaagaucagacagcugcccaaccugcugagaggcuacgagcacaucagacugagcacccacaacgugaucaacgccgagaaggcccccggcggccccuacaagaucggcaccagcggcagcugccccaacgugaccaacggcaacggcuucuucgccaccauggccugggccgugcccaagaacgacaacaacaagaccgccaccaacagccugaccaucgaggugcccuacaucugcaccgagggcgaggaccagaucaccguguggggcuuccacagcgacagcgagacccagauggccaagcuguacggcgacagcaagccccagaaguucaccagcagcgccaacggcgugaccacccacuacgugagccagaucggcggcuuccccaaccagaccgaggacggcggccugccccagagcggcagaaucgugguggacuacauggugcagaagagcggcaagaccggcaccaucaccuaccagagaggcauccugcugccccagaagguguggugcgccagcggcagaagcaaggugaucaagggcagccugccccugaucggcgaggccgacugccugcacgagaaguacggcggccugaacaagagcaagcccuacuacaccggcgagcacgccaaggccaucggcaacugccccaucugggugaagaccccccugaagcuggccaacggcaccaaguacagaccccccgccaagcugcugaaggagagaggcuucuucggcgccaucgccggcuuccuggagggcggcugggagggcaugaucgccggcuggcacggcuacaccagccacggcgcccacggcguggccguggccgccgaccugaagagcacccaggaggccaucaacaagaucaccaagaaccugaacagccugagcgagcuggaggugaagaaccugcagagacugagcggcgccauggacgagcugcacaacgagauccuggagcuggacgagaagguggacgaccugagagccgacaccaucagcagccagaucgagcuggccgugcugcugagcaacgagggcaucaucaacagcgaggacgagcaccugcuggcccuggagagaaagcugaagaagaugcugggccccagcgccguggagaucggcaacggcugcuucgagaccaagcacaagugcaaccagaccugccuggacagaaucgccgccggcaccuucgacgccggcgaguucagccugcccaccuucgacagccugaacaucaccgccgccagccugaacgacgacggccuggacaaccacaccauccugcuguacuacagcaccgccgccagcagccuggccgugacccugaugaucgccaucuucaucguguacauggugagcagagacaacgugagcugcagcaucugccuguga

SEQ ID NO: 187145 - RNA, 1758 nt, Artificial Sequence; identical to SEQ ID NO: 187039
  derived and/or modified CDS sequence (opt4) from hemagglutinin__InfluenzaB__AGX16830

SEQ ID NO: 187146 - RNA, 1758 nt, Artificial Sequence
  derived and/or modified CDS sequence (opt4) from hemagglutinin__InfluenzaB__AGX16841
augaaggccaucaucgugcugcugaugguggugaccagcaacgccgacagaaucugcaccggcaucaccagcagcaacagcccccacguggugaagaccgccacccagggcgaggugaacgugaccggcgugaucccccugaccaccacccccaccaagagccacuucgccaaccugaagggcaccaagaccagaggcaagcugugccccaagugccugaacugcaccgaccuggacguggcccugggcagacccaagugcaccggcaacauccccagcgccaaggugagcauccugcacgaggugagacccgugaccagcggcugcuuccccaucaugcacgacagaaccaagaucagacagcugcccaaccugcugagaggcuacgagcacaucagacugagcacccacaacgugaucaacgccgagaaggcccccggcggccccuacaagaucggcaccagcggcagcugccccaacgugaccaacggcaacggcuucuucgccaccauggccugggccgugcccaagaacgacaacaacaagaccgccaccaacagccugaccaucgaggugcccuacaucugcaccgagggcgaggaccagaucaccguguggggcuuccacagcgacaacgagacccagauggccaagcuguacggcgacagcaagccccagaaguucaccagcagcgccaacggcaugaccacccacuacgugagccagaucggcggcuuccccaaccagaccgaggacggcggccugccccagagcggcagaaucgugguggacuacauggugcagaagagcggcaagaccggcaccaucaccuaccagagaggcauccugcugccccagaagguguggugcgccagcggcagaagcaaggugaucaagggcagccugccccugaucggcgaggccgacugccugcacgagaaguacggcggccugaacaagagcaagcccuacuacaccggcgagcacgccaaggccaucggcaacugccccaucugggugaagaccccccugaagcuggccaacggcaccaaguacagaccccccgccaagcugcugaaggagagaggcuucuucggcgccaucgccggcuuccuggagggcggcugggagggcaugaucgccggcuggcacggcuacaccagccacggcgcccacggcguggccguggccgccgaccugaagagcacccaggaggccaucaacaagaucaccaagaaccugaacagccugagcgagcuggaggugaagaaccugcagagacugagcggcgccauggacgagcugcacaacgagauccuggagcuggacgagaagguggacgaccugagagccgacaccaucagcagccagaucgagcuggccgugcugcugagcaacgagggcaucaucaacagcgaggacgagcaccugcuggcccuggagagaaagcugaagaagaugcugggccccagcgccguggagaucggcaacggcugcuucgagaccaagcacaagugcaaccagaccugccuggacagaaucgccgccggcaccuucgacgccggcgaguucagccugcccaccuucgacagccugaacaucaccgccgccagccugaacggcgacggccuggacaaccacaccauccugcuguacuacagcaccgccgccagcagccuggccgugacccugaugaucgccaucuucgugguguacauggugagcagagacaacgugagcugcagcaucugccuguga

SEQ ID NO: 187147 - RNA, 1758 nt, Artificial Sequence
  derived and/or modified CDS sequence (opt4) from hemagglutinin__InfluenzaB__AGX16852
augaaggccaucaucgugcugcugaugguggugaccagcaacgccgacagaaucugcaccggcaucaccagcagcaacagcccccacguggugaagaccgccacccagggcgaggugaacgugaccggcgugaucccccugaccaccacccccaccaagagccacuucgccaaccugaagggcaccaagaccagaggcaagcugugccccaagugccugaacugcaccgaccuggacguggcccugggcagacccaagugcaccggcaacauccccagcgccaaggugagcauccugcacgaggugagacccgugaccagcggcugcuuccccaucaugcacgacagaaccaagaucagacagcugcccaaccugcugagaggcuacgagcacaucagacugagcacccacaacgugaucaacgccgagaaggcccccggcggccccuacaagaucggcaccagcggcagcugccccaacgugaccaacggcaacggcuucuucgccaccauggccugggccgugcccaagaacgacaacaacaagaccgccaccaacagccugaccaucgaggugcccuacaucugcaccgagggcgaggaccagaucaccguguggggcuuccacagcgacaacgagacccagauggccaagcuguacggcgacagcaagccccagaaguucaccagcagcgccaacggcgugaccacccacuacgugagccagaucggcggcuuccccaaccagaccgaggacggcggccugccccagagcggcagaaucgugguggacuacauggugcagaagagcggcaagaccggcaccaucaccuaccagagaggcauccugcugccccagaagguguggugcgccagcggcagaagcaaggugaucaagggcagccugccccugaucggcgaggccgacugccugcacgagaaguacggcggccugaacaagagcaagcccuacuacaccggcgagcacgccaaggccaucggcaacugccccaucugggugaagaccccccugaagcuggccaacggcaccaaguacagaccccccgccaagcugcugaaggagagaggcuucuucggcgccaucgccggcuuccuggagggcggcugggagggcaugaucgccggcuggcacggcuacaccagccacggcgcccacggcguggccguggccgccgaccugaagagcacccaggaggccaucaacaagaucaccaagaaccugaacagccugagcgagcuggaggugaagaaccugcagagaaucagcggcgccauggacgagcugcacaacgagauccuggagcuggacgagaagguggacgaccugagagccgacaccaucagcagccagaucgagcuggccgugcugcugagcaacgagggcaucaucaacagcgaggacgagcaccugcuggcccuggagagaaagcugaagaagaugcugggccccagcgccguggagaucggcaacggcugcuucgagaccaagcacaagugcaaccagaccugccuggacagaaucgccgccggcaccuucgacgccggcgaguucagccugcccaccuucgacagccugaacaucaccgccgccagccugaacgacgacggccuggacaaccacaccauccugcuguacuacagcaccgccgccagcagccuggccgugacccugaugaucgccaucuucgugguguacauggugagcagagacaacgugagcugcagcaucugccuguga

SEQ ID NO: 187148 - RNA, 1758 nt, Artificial Sequence; identical to SEQ ID NO: 187039
  derived and/or modified CDS sequence (opt4) from hemagglutinin__InfluenzaB__AGX16863

SEQ ID NO: 187149 - RNA, 1758 nt, Artificial Sequence; identical to SEQ ID NO: 187039
  derived and/or modified CDS sequence (opt4) from hemagglutinin__InfluenzaB__AGX16874

SEQ ID NO: 187150 - RNA, 1758 nt, Artificial Sequence
  derived and/or modified CDS sequence (opt4) from hemagglutinin__InfluenzaB__AGX16885
augaaggccaucaucgugcugcugaugguggugaccagcaacgccgacagaaucugcaccggcaucaccagcagcaacagcccccacguggugaagaccgccacccagggcgaggugaacgugaccggcgugaucccccugaccaccacccccaccaagagccacuucgccaaccugaagggcaccaagaccagaggcaagcugugccccaagugccugaacugcaccgaccuggacguggcccugggcagacccaagugcaccggcaacauccccagcgccaaggugagcauccugcacgaggugagacccgugaccagcggcugcuuccccaucaugcacgacagaaccaagaucagacagcugcccaaccugcugagaggcuacgagcacaucagacugagcacccacaacgugaucaacgccgagaaggcccccggcggccccuacaagaucggcaccagcggcagcugccccaacgugaccaacggcaacggcuucuucgccaccauggccugggccgugcccaagaacgacaacaacaagaccgccaccaacagccugaccaucgaggugcccuacaucugcaccgagggcgaggaccagaucaccguguggggcuuccacagcgacaacgagacccagauggccaagcuguacggcgacagcaagccccagaaguucaccagcagcgccaacggcgugaccacccacuacgugagccagaucggcggcuuccccaaccagaccgaggacggcggccugccccagagcggcagaaucgugguggacuacauggugcagaagagcggcaagaccggcaccaucaccuaccagagaggcauccugcugccccagaagguguggugcgccagcggcagaagcaaggugaucaagggcagccugccccugaucggcgaggccgacugccugcacgagaaguacggcggccugaacaagagcaagcccuacuacaccggcgagcacgccaaggccaucggcaacugccccaucugggugaagaccccccugaagcuggccaacggcaccaaguacagaccccccgccaagcugcugaaggagagaggcuucuucggcgccaucgccggcuuccuggagggcggcugggagggcaugaucgccggcuggcacggcuacaccagccacggcgcccacggcguggccguggccgccgaccugaagagcacccaggaggccaucaacaagaucaccaagaaccugaacagccugagcgagcuggaggugaagaaccugcagagacugagcggcgccauggacgagcugcacaacgagauccuggagcuggacgagaagguggacgaccugagagccgacaccaucagcagccagaucgagcuggccgugcugcugagcaacgagggcaucaucaacagcgaggacgagcaccugcuggcccuggagagaaagcugaagaagaugcugggccccagcgccaucgagaucggcaacggcugcuucgagaccaagcacaagugcaaccagaccugccuggacagaaucgccgccggcaccuucgacgccggcgaguucagccugcccaccuucgacagccugaacaucaccgccgccagccugaacgacgacggccuggacaaccacaccauccugcuguacuacagcaccgccgccagcagccuggccgugacccugaugaucgccaucuucgugguguacauggugagcagagacaacgugagcugcagcaucugccuguga

SEQ ID NO: 187151 - RNA, 1758 nt, Artificial Sequence; identical to SEQ ID NO: 187150
  derived and/or modified CDS sequence (opt4) from hemagglutinin__InfluenzaB__AGX16896

SEQ ID NO: 187152 - RNA, 1758 nt, Artificial Sequence; identical to SEQ ID NO: 187039
  derived and/or modified CDS sequence (opt4) from hemagglutinin__InfluenzaB__AGX16907

SEQ ID NO: 187153 - RNA, 1758 nt, Artificial Sequence; identical to SEQ ID NO: 187124
  derived and/or modified CDS sequence (opt4) from hemagglutinin__InfluenzaB__AGX16918

SEQ ID NO: 187154 - RNA, 1758 nt, Artificial Sequence; identical to SEQ ID NO: 187039
  derived and/or modified CDS sequence (opt4) from hemagglutinin__InfluenzaB__AGX16940

SEQ ID NO: 187155 - RNA, 1758 nt, Artificial Sequence; identical to SEQ ID NO: 187150
  derived and/or modified CDS sequence (opt4) from hemagglutinin__InfluenzaB__AGX16951

SEQ ID NO: 187156 - RNA, 1758 nt, Artificial Sequence
  derived and/or modified CDS sequence (opt4) from hemagglutinin__InfluenzaB__AGX16962
augaaggccaucaucgugcugcugaugguggugaccagcaacgccgacagaaucugcaccggcaucaccagcagcaacagcccccacguggugaagaccgccacccagggcgaggugaacgugaccggcgugaucccccugaccaccacccccaccgagagccacuucgccaaccugaagggcaccaagaccagaggcaagcugugccccaagugccugaacugcaccgaccuggacguggcccugggcagacccaagugcaccggcaacauccccagcgccaaggugagcauccugcacgaggugagacccgugaccagcggcugcuuccccaucaugcacgacagaaccaagaucagacagcugcccaaccugcugagaggcuacgagcacaucagacugagcacccacaacgugaucaacgccgagaaggcccccggcggccccuacaagaucggcaccagcggcagcugccccaacgugaccaacggcaacggcuucuucgccaccauggccugggccgugcccaagaacgacaacaacaagaccgccaccaacagccugaccaucgaggugcccuacaucugcaccgagggcgaggaccagaucaccguguggggcuuccacagcgacaacgagacccagauggccaagcuguacggcgacagcaagccccagaaguucaccagcagcgccaacggcgugaccacccacuacgugagccagaucggcggcuuccccaaccagaaggaggacggcggccugccccagagcggcagaaucgugguggacuacauggugcagaagagcggcaacaccggcaccaucaccuaccagagaggcauccugcugccccagaagguguggugcgccagcggcagaagcaaggugaucaagggcagccugccccugaucggcgaggccgacugccugcacgagaaguacggcggccugaacaagagcaagcccuacuacaccggcgagcacgccaaggccaucggcaacugccccaucugggugaagaccccccugaagcuggccaacggcaccaaguacagaccccccgccaagcugcugaaggagagaggcuucuucggcgccaucgccggcuuccuggagggcggcugggagggcaugaucgccggcuggcacggcuacaccagccacggcgcccacggcguggccguggccgccgaccugaagagcacccaggaggccaucaacaagaucaccaagaaccugaacagccugagcgagcuggaggugaagaaccugcagagacugagcggcgccauggacgagcugcacaacgagauccuggagcuggacgagaagguggacgaccugagagccgacaccaucagcagccagaucgagcuggccgugcugcugagcaacgagggcaucaucaacagcgaggacgagcaccugcuggcccuggagagaaagcugaagaagaugcugggccccagcgccguggagaucggcaacggcugcuucgagaccaagcacaagugcaaccagaccugccuggacagaaucgccgccggcaccuucgacgccggcgaguucagccugcccaccuucgacagccugaacaucaccgccgccagccugaacgacgacggccuggacaaccacaccauccugcuguacuacagcaccgccgccagcagccuggccgugacccugaugaucgccaucuucgugguguacauggugagcagagacaacgugagcugcagcaucugccuguga

SEQ ID NO: 187157 - RNA, 1758 nt, Artificial Sequence; identical to SEQ ID NO: 187039
  derived and/or modified CDS sequence (opt4) from hemagglutinin__InfluenzaB__AGX16973

SEQ ID NO: 187158 - RNA, 1758 nt, Artificial Sequence
  derived and/or modified CDS sequence (opt4) from hemagglutinin__InfluenzaB__AGX16995
augaaggccaucaucgugcugcugaugguggugaccagcaacgccgacagaaucugcaccggcaucaccagcagcaacagcccccacguggugaagaccgccacccagggcgaggugaacgugaccggcgugaucccccugaccaccacccccaccaagagccacuucgccaaccugaagggcaccaagaccagaggcaagcugugccccaagugccugaacugcaccgaccuggacguggcccugggcagacccaagugcaccggcaacauccccagcgccaaggugagcauccugcacgaggugagacccgugaccagcggcugcuuccccaucaugcacgacagaaccaagaucagacagcugcccaaccugcugagaggcuacgagcacaucagacugagcacccacaacgugaucaacgccgagaaggcccccggcggccccuacaagaucggcaccagcggcagcugccccaacgugaccaacggcaacggcuucuucgccaccauggccugggccgugcccaagaacgacaacaacaagaccgccaccaacagccugaccguggaggugcccuacaucugcaccgagggcgaggaccagaucaccguguggggcuuccacagcgacaacgagauccagauggccaagcuguacggcgacagcaagccccagaaguucaccagcagcgccaacggcgugaccacccacuacgugagccagaucggcggcuuccccaaccagaccgaggacggcggccugccccagagcggcagaaucgugguggacuacauggugcagaagagcggcaagaccggcaccaucaccuaccagagaggcauccugcugccccagaagguguggugcgccagcggcagaagcaaggugaucaagggcagccugccccugaucggcgaggccgacugccugcacgagaaguacggcggccugaacaagagcaagcccuacuacaccggcgagcacgccaaggccaucggcaacugccccaucugggugaagaccccccugaagcuggccaacggcaccaaguacagaccccccgccaagcugcugaaggagagaggcuucuucggcgccaucgccggcuuccuggagggcggcugggagggcaugaucgccggcuggcacggcuacaccagccacggcgcccacggcguggccguggccgccgaccugaagagcacccaggaggccaucaacaagaucaccaagaaccugaacagccugagcgagcuggaggugaagaaccugcagagacugagcggcgccauggacgagcugcacaacgagauccuggagcuggacgagaagguggacgaccugagagccgacaccaucagcagccagaucgagcuggccgugcugcugagcaacgagggcaucaucaacagcgaggacgagcaccugcuggcccuggagagaaagcugaagaagaugcugggccccagcgccguggagaucggcaacggcugcuucgagaccaagcacaagugcaaccagaccugccuggacagaaucgccgccggcaccuucgacgccggcgaguucagccugcccaccuucgacagccugaacaucaccgccgccagccugaacgacgacggccuggacaaccacaccauccugcuguacuacagcaccgccgccagcagccuggccgugacccugaugaucgccaucuucgugguguacauggugagcagagacaacgugagcugcagcaucugccuguga

SEQ ID NO: 187159 - RNA, 1758 nt, Artificial Sequence
  derived and/or modified CDS sequence (opt4) from hemagglutinin__InfluenzaB__AGX17006
augaaggccaucaucgugcugcugaugguggugaccagcaacgccgacagaaucugcaccggcaucaccagcagcaacagcccccacguggugaagaccgccacccagggcgaggugaacgugaccggcgugaucccccugaccaccacccccaccaagagccacuucgccaaccugaagggcaccaagaccagaggcaagcugugccccaagugccugaacugcaccgaccuggacguggcccugggcagacccaagugcaccggcaacauccccagcgccaaggugagcauccugcacgaggugagacccgugaccagcggcugcuuccccaucaugcacgacagaaccaagaucagacagcugcccaaccugcugagaggcuacgagcacaucagacugagcacccacaacgugaucaacgccgagaaggcccccggcggccccuacaagaucggcaccagcggcagcugccccaacgugaccaacggcaacggcuucuucgccaccauggccugggccgugcccaagaacgacaacaacaagaccgccaccaacagccugaccaucgaggugcccuacaucugcaccgagggcgaggaccagaucaccguguggggcuuccacagcgacaacgagaaccagauggccaagcuguacggcgacagcaagccccagaaguucaccagcagcgccaacggcgugaccacccacuacgugagccagaucggcggcuuccccaaccagaccgaggacggcggccugccccagagcggcagaaucgugguggacuacauggugcagaagagcggcaagaccggcaccaucaccuaccagagaggcauccugcugccccagaagguguggugcgccagcggcagaagcaaggugaucaagggcagccugccccugaucggcgaggccgacugccugcacgagaaguacggcggccugaacaagagcaagcccuacuacaccggcgagcacgccaaggccaucggcaacugccccaucugggugaagaccccccugaagcuggccaacggcaccaaguacagaccccccgccaagcugcugaaggagagaggcuucuucggcgccaucgccggcuuccuggagggcggcugggagggcaugaucgccggcuggcacggcuacaccagccacggcgcccacggcguggccguggccgccgaccugaagagcacccaggaggccaucaacaagaucaccaagaaccugaacagccugagcgagcuggaggugaagaaccugcagagacugagcggcgccauggacgagcugcacaacgagauccuggagcuggacgagaagguggacgaccugagagccgacaccaucagcagccagaucgagcuggccgugcugcugagcaacgagggcaucaucaacagcgaggacgagcaccugcuggcccuggagagaaagcugaagaagaugcugggccccagcgccguggagaucggcaacggcugcuucgagaccaagcacaagugcaaccagaccugccuggacagaaucgccgccggcaccuucgacgccggcgaguucagccugcccaccuucgacagccugaacaucaccgccgccagccugaacgacgacggccuggacaaccacaccauccugcuguacuacagcaccgccgccagcagccuggccgugacccugaugaucgccaucuucgugguguacauggugagcagagacaacgugagcugcagcaucugccuguga

SEQ ID NO: 187160 - RNA, 1758 nt, Artificial Sequence; identical to SEQ ID NO: 187039
  derived and/or modified CDS sequence (opt4) from hemagglutinin__InfluenzaB__AGX17017

SEQ ID NO: 187161 - RNA, 1758 nt, Artificial Sequence; identical to SEQ ID NO: 187039
  derived and/or modified CDS sequence (opt4) from hemagglutinin__InfluenzaB__AGX17028

SEQ ID NO: 187162 - RNA, 1758 nt, Artificial Sequence
  derived and/or modified CDS sequence (opt4) from hemagglutinin__InfluenzaB__AGX17039
augaaggccaucaucgugcugcugaugguggugaccagcaacgccgacagaaucugcaccggcaucaccagcagcaacagcccccacguggugaagaccgccacccagggcgaggugaacgugaccggcgugaucccccugaccaccacccccaccgagagccacuucgccaaccugaagggcaccaagaccagaggcaagcugugccccaagugccugaacugcaccgaccuggacguggcccugggcagacccaagugcaccggcaacauccccagcgccaaggugagcauccugcacgaggugagacccgugaccagcggcugcuuccccaucaugcacgacagaaccaagaucagacagcugcccaaccugcugagaggcuacgagcacaucagacugagcacccacaacgugaucaacgccgagaaggcccccggcggccccuacaagaucggcaccagcggcagcugccccaacgugaccaacggcaacggcuucuucgccaccauggccugggccgugcccaagaacgacaacaacaagaccgccaccaacagccugaccaucgaggugcccuacaucugcaccgagggcgaggaccagaucaccguguggggcuuccacagcgacaacgagacccagauggccaagcuguacggcgacagcaagccccagaaguucaccagcagcgccaacggcgugaccacccacuacgugagccagaucggcggcuuccccaaccagaccgaggacggcggccugccccagagcggcagaaucgugguggacuacauggugcagaagagcggcaacaccggcaccaucaccuaccagagaggcauccugcugccccagaagguguggugcgccagcggcagaagcaaggugaucaagggcagccugccccugaucggcgaggccgacugccugcacgagaaguacggcggccugaacaagagcaagcccuacuacaccggcgagcacgccaaggccaucggcaacugccccaucugggugaagaccccccugaagcuggccaacggcaccaaguacagaccccccgccaagcugcugaaggagagaggcuucuucggcgccaucgccggcuuccuggagggcggcugggagggcaugaucgccggcuggcacggcuacaccagccacggcgcccacggcguggccguggccgccgaccugaagagcacccaggaggccaucaacaagaucaccaagaaccugaacagccugagcgagcuggaggugaagaaccugcagagacugagcggcgccauggacgagcugcacaacgagauccuggagcuggacgagaagguggacgaccugagagccgacaccaucagcagccagaucgagcuggccgugcugcugagcaacgagggcaucaucaacagcgaggacgagcaccugcuggcccuggagagaaagcugaagaagaugcugggccccagcgccguggagaucggcaacggcugcuucgagaccaagcacaagugcaaccagaccugccuggacagaaucgccgccggcaccuucgacgccggcgaguucagccugcccaccuucgacagccugaacaucaccgccgccagccugaacgacgacggccuggacaaccacaccaucaugcuguacuacagcaccgccgccagcagccuggccgugacccugaugaucgccaucuucgugguguacauggugagcagagacaacgugagcugcagcaucugccuguga

SEQ ID NO: 187163 - RNA, 1758 nt, Artificial Sequence; identical to SEQ ID NO: 187039
  derived and/or modified CDS sequence (opt4) from hemagglutinin__InfluenzaB__AGX17050

SEQ ID NO: 187164 - RNA, 1758 nt, Artificial Sequence
  derived and/or modified CDS sequence (opt4) from hemagglutinin__InfluenzaB__AGX17061
augaaggccaucaucgugcugcugaugguggugaccagcaacgccgacagaaucugcaccggcaucaccagcagcaacagcccccacguggugaagaccgccacccagggcgaggugaacgugaccggcgugaucccccugaccaccacccccaccaagagccacuucgccaaccugaagggcaccaagaccagaggcaagcugugccccaagugccugaacugcaccgaccuggacguggcccugggcagacccaagugcaccggcaacauccccagcgccaaggugagcauccugcacgaggugagacccgugaccagcggcugcuuccccaucaugcacgacagaaccaagaucagacagcugcccaaccugcugagaggcuacgagagaaucagacugagcaaccacaacgugaucaacgccgagaaggcccccggcggccccuacaagaucggcaccagcggcagcugccccaacgugaccaacggcaacggcuucuucgccaccauggccugggccgugcccaagaacgagaacaacaagaccgccaccaacagccugaccaucgaggugcccuacaucugcaccgagggcgaggaccagaucaccguguggggcuuccacagcgacaacgagacccagauggccaagcuguacggcgacagcaagccccagaaguucaccagcagcgccaacggcgugaccacccacuacgugagccagaucggcggcuuccccaaccagaccgaggacggcggccugccccagagcggcagaaucgugguggacuacauggugcagaagagcggcaagaccggcaccaucaccuaccagagaggcauccugcugccccagaagguguggugcgccagcggcagaagcaaggugaucaagggcagccugccccugaucggcgaggccgacugccugcacgagaaguacggcggccugaacaagagcaagcccuacuacaccggcgagcacgccaaggccaucggcaacugccccaucugggugaagaccccccugaagcuggccaacggcaccaaguacagaccccccgccaagcugcugaaggagagaggcuucuucggcgccaucgccggcuuccuggagggcggcugggagggcaugaucgccggcuggcacggcuacaccagccacggcgcccacggcguggccguggccgccgaccugaagagcacccaggaggccaucaacaagaucaccaagaaccugaacagccugagcgagcuggaggugaagaaccugcagagacugagcggcgccauggacgagcugcacaacgagauccuggagcuggacgagaagguggacgaccugagagccgacaccaucagcagccagaucgagcuggccgugcugcugagcaacgagggcaucaucaacagcgaggacgagcaccugcuggcccuggagagaaagcugaagaagaugcugggccccagcgccguggagaucggcaacggcugcuucgagaccaagcacaagugcaaccagaccugccuggacagaaucgccgccggcaccuucaacgccggcgaguucagccugcccaccuucgacagccugaacaucaccgccgccagccugaacgacgacggccuggacaaccacaccauccugcuguacuacagcaccgccgccagcagccuggccgugacccugaugaucgccaucuucgugguguacauggugagcagagacaacgugagcugcagcaucugccuguga

SEQ ID NO: 187165 - RNA, 1758 nt, Artificial Sequence
  derived and/or modified CDS sequence (opt4) from hemagglutinin__InfluenzaB__AGX17072
augaaggccaucaucgugcugcugaugguggugaccagcaacgccgacagaaucugcaccggcaucaccagcagcaacagcccccacguggugaagaccgccacccagggcgaggugaacgugaccggcgugaucccccugaccaccacccccaccgagagccacuucgccaaccugaagggcaccaagaccagaggcaagcugugccccaagugccugaacugcaccgaccuggacguggcccugggcagacccaagugcaccggcaacauccccagcgccaaggugagcauccugcacgaggugagacccgugaccagcggcugcuuccccaucaugcacgacagaaccaagaucagacagcugcccaaccugcugagaggcuacgagcacaucagacugagcacccacaacgugaucaacgccgagaaggcccccggcggccccuacaagaucggcaccagcggcagcugccccaacgugaccaacggcaacggcuucuucgccaccauggccugggccgugcccaagaacgacaacaacaagaccgccaccaacagccugaccaucgaggugcccuacaucugcaccgagggcgaggaccagaucaccguguggggcuuccacagcgacaacgagacccagauggccaagcuguacggcgacagcaagccccagaaguucaccagcagcgccaacggcgugaccacccacuacgugagccagaucggcggcuuccccaaccagaccgaggacggcggccugccccagagcggcagaaucgugguggacuacauggugcagaagagcggcaacaccggcaccaucaccuaccagagaggcauccugcugccccagaagguguggugcgccagcggcagaagcaaggugaucaagggcagccugccccugaucggcgaggccgacugccugcacgagaaguacggcggccugaacaagagcaagcccuacuacaccggcgagcacgccaaggccaucggcaacugccccaucugggugaagaccccccugaagcuggccaacggcaccaaguacagaccccccgccaagcugcugaaggagagaggcuucuucggcgccaucgccggcuuccuggagggcggcugggagggcaugaucgccggcuggcacggcuacaccagccacggcgcccacggcguggccguggccgccgaccugaagagcacccaggaggccaucaacaagaucaccaagaaccugaacagccugagcgagcuggaggugaagaaccugcagagacugagcggcgccauggacgagcugcacaacgagauccuggagcuggacgagaagguggacgaccugagagccgacaccaucagcagccagaucgagcuggccgugcugcugagcaacgagggcaucaucaacagcgaggacgagcaccugcuggcccuggagagaaagcugaagaagaugcugggccccagcgccguggagaucggcaacggcugcuucgagaccaagcacaagugcaaccagaccugccuggacagaaucgccgccggcaccuucgacgccggcgaguucagccugcccaccuucgacagccugaacaucaccgccgccagccugaacgacgacggccuggacaaccacaccauccugcuguacuacagcaccgccgccagcagccuggccgugacccugaugaucgccaucuucgugguguacauggugagcagagacaacgugagcugcagcaucugccuguga

SEQ ID NO: 187166 - RNA, 1758 nt, Artificial Sequence; identical to SEQ ID NO: 187150
  derived and/or modified CDS sequence (opt4) from hemagglutinin__InfluenzaB__AGX17083

SEQ ID NO: 187167 - RNA, 1758 nt, Artificial Sequence
  derived and/or modified CDS sequence (opt4) from hemagglutinin__InfluenzaB__AGX17094
augaaggccaucaucgugcugcugaugguggugaccagcaacgccgacagaaucugcaccggcaucaccagcagcaacagcccccacguggugaagaccgccacccagggcgaggugaacgugaccggcgugaucccccugaccaccacccccaccaagagccacuucgccaaccugaagggcaccaagaccagaggcaagcugugccccaagugccugaacugcaccgaccuggacguggcccugggcagacccaagugcaccggcaacauccccagcgccaaggugagcauccugcacgaggugagacccgugaccagcggcugcuuccccaucaugcacgacagaaccaagaucagacagcugcccaaccugcugagaggcuacgagcacaucagacugagcacccacaacgugaucaacgccgagaaggcccccggcggccccuacaagaucggcaccagcggcagcugccccaacgugaccaacggcaacggcuucuucgccaccauggccugggccgugcccaagaacgacaacaacaagaccgccaccaacagccugaccaucgaggugcccuacaucugcaccgagggcgaggaccagaucaccguguggggcuuccacagcgacagcgagacccagauggccaagcuguacggcgacagcaagccccagaaguucaccagcagcgccaacggcgugaccacccacuacgugagccagaucggcggcuuccccaaccagaccgaggacggcggccugccccagagcggcagaaucgugguggacuacauggugcagaagagcggcaagaccggcaccaucaccuaccagagaggcauccugcugccccagaagguguggugcgccagcggcagaagcaaggugaucaagggcagccugccccugaucggcgaggccgacugccugcacgagaaguacggcggccugaacaagagcaagcccuacuacaccggcgagcacgccaaggccaucggcaacugccccaucugggugaagaccccccugaagcuggccaacggcaccaaguacagaccccccgccaagcugcugaaggagagaggcuucuucggcgccaucgccggcuuccuggagggcggcugggagggcaugaucgccggcuggcacggcuacaccagccacggcgcccacggcguggccguggccgccgaccugaagagcacccaggaggccaucaacaagaucaccaagaaccugaacagccugagcgagcuggaggugaagaaccugcagagacugagcggcgccauggacgagcugcacaacgagauccuggagcuggacgagaagguggacgaccugagagccgacaccaucagcagccagaucgagcuggccgugcugcugagcaacgagggcaucaucaacagcgaggacgagcaccugcuggcccuggagagaaagcugaagaagaugcugggccccagcgccguggagaucggcaacggcugcuucgagaccaagcacaagugcaaccagaccugccuggacagaaucgccgccggcaccuucgacgccggcgaguucagccugcccaccuucgacagccugaacaucaccgccgccagccugaacgacgacggccuggacaaccacaccauccugcuguacuacagcaccgccgccagcagccuggccgugacccugaugaucgccaucuucgugguguacauggugagcagagacaacgugagcugcagcaucugccuguga

SEQ ID NO: 187168 - RNA, 1758 nt, Artificial Sequence
  derived and/or modified CDS sequence (opt4) from hemagglutinin__InfluenzaB__AGX17105
augaaggccaucaucgugcugcugaugguggugaccagcaacgccgacagaaucugcaccggcaucaccagcagcaacagcccccacguggugaagaccgccacccagggcgagaucaacgugaccggcgugaucccccugaccaccacccccaccaagagccacuucgccaaccugaagggcaccaagaccagaggcaagcugugccccaagugccugaacugcaccgaccuggacguggcccugggcagacccaagugcaccggcaacauccccagcgccaaggugagcauccugcacgaggugagacccgugaccagcggcugcuuccccaucaugcacgacagaaccaagaucagacagcugcccaaccugcugagaggcuacgagcacaucagacugagcacccacaacgugaucaacgccgagaaggcccccggcggccccuacaagaucggcaccagcggcagcugccccaacgugaccaacggcaacggcuucuucgccaccauggccugggccgugcccaagaacgacaacaacaagaccgccaccaacagccugaccaucgaggugccccacaucugcaccgagggcgaggaccagaucaccguguggggcuuccacagcgacaacgagauccagauggccaagcuguacggcgacagcaagccccagaaguucaccagcagcgccaacggcgugaccacccacuacaucagccagaucggcggcuuccccaaccagaccgaggacggcggccugccccagagcggcagaaucgugguggacuacauggugcagaagagcggcaagaccggcaccaucaccuaccagagaggcauccugcugccccagaagguguggugcgccagcggcagaagcaaggugaucaagggcagccugccccugaucggcgaggccgacugccugcacgagaaguacggcggccugaacaagagcaagcccuacuacaccggcgagcacgccaaggccaucggcaacugccccaucugggugaagaccccccugaagcuggccaacggcaccaaguacagaccccccgccaagcugcugaaggagagaggcuucuucggcgccaucgccggcuuccuggagggcggcugggagggcaugaucgccggcuggcacggcuacaccagccacggcgcccacggcguggccguggccgccgaccugaagagcacccaggaggccaucaacaagaucaccaagaaccugaacagccugagcgagcuggaggugaagaaccugcagagacugagcggcgccauggacgagcugcacaacgagauccuggagcuggacgagaagguggacgaccugagagccgacaccaucagcagccagaucgagcuggccgugcugcugagcaacgagggcaucaucaacagcgaggacgagcaccugcuggcccuggagagaaagcugaagaagaugcugggccccagcgccaucgagaucggcaacggcugcuucgagaccaagcacaagugcaaccagaccugccuggacagaaucgccgccggcaccuucgacgccggcgaguucagccugcccaccuucgacagccugaacaucaccgccgccagccugaacgacgacggccuggacaaccacaccauccugcuguacuacagcaccgccgccagcagccuggccgugacccugaugaucgccaucuucgugguguacauggugagcagagacaacgugagcugcagcaucugccuguga

SEQ ID NO: 187169 - RNA, 1758 nt, Artificial Sequence; identical to SEQ ID NO: 187150
  derived and/or modified CDS sequence (opt4) from hemagglutinin__InfluenzaB__AGX17116

SEQ ID NO: 187170 - RNA, 1758 nt, Artificial Sequence
  derived and/or modified CDS sequence (opt4) from hemagglutinin__InfluenzaB__AGX17127
augaaggccaucaucgugcugcugaugguggugaccagcaacgccgacagaaucugcaccggcaucaccagcagcaacagcccccacguggugaagaccgccacccagggcgaggugaacgugaccggcgugaucccccugaccaccacccccaccgagagccacuucgccaaccugaagggcaccaagaccagaggcaagcugugccccaagugccugaacugcaccgaccuggacguggcccugggcagacccaagugcaccggcaacauccccagcgccaaggugagcauccugcacgaggugagacccgugaccagcggcugcuuccccaucaugcacgacagaaccaagaucagacagcugcccaaccugcugagaggcuacgagcacaucagacugagcacccacaacgugaucaacgccgagaaggcccccggcggccccuacaagaucggcaccagcggcagcugccccaacgugaccaacggcaacggcuucuucgccaccauggccugggccgugcccaagaacgacaacaacaagaccgccaccaacagccugaccaucgaggugcccuacaucugcaccgagggcgaggaccagaucaccguguggggcuuccacagcgacaacgagaaccagauggccaagcuguacggcgacagcaagccccagaaguucaccagcagcgccaacggcgugaccacccacuacgugagccagaucggcggcuuccccaaccagaccgaggacggcggccugccccagagcggcagaaucgugguggacuacauggugcagaagagcggcaacaccggcaccaucaccuaccagagaggcauccugcugccccagaagguguggugcgccagcggcagaagcaaggugaucaagggcagccugccccugaucggcgaggccgacugccugcacgagaaguacggcggccugaacaagagcaagcccuacuacaccggcgagcacgccaaggccaucggcaacugccccaucugggugaagaccccccugaagcuggccaacggcaccaaguacagaccccccgccaagcugcugaaggagagaggcuucuucggcgccaucgccggcuuccuggagggcggcugggagggcaugaucgccggcuggcacggcuacaccagccacggcgcccacggcguggccguggccgccgaccugaagagcacccaggaggccaucaacaagaucaccaagaaccugaacagccugagcgagcuggaggugaagaaccugcagagacugagcggcgccauggacgagcugcacaacgagauccuggagcuggacgagaagguggacgaccugagagccgacaccaucagcagccagaucgagcuggccgugcugcugagcaacgagggcaucaucaacagcgaggacgagcaccugcuggcccuggagagaaagcugaagaagaugcugggccccagcgccguggagaucggcaacggcugcuucgagaccaagcacaagugcaaccagaccugccuggacagaaucgccgccggcaccuucgacgccggcgaguucagccugcccaccuucgacagccugaacaucaccgccgccagccugaacgacgacggccuggacaaccacaccauccugcuguacuacagcaccgccgccagcagccuggccgugacccugaugaucgccaucuucgugguguacauggugagcagagacaacgugagcugcagcaucugccuguga

SEQ ID NO: 187171 - RNA, 1758 nt, Artificial Sequence; identical to SEQ ID NO: 187159
  derived and/or modified CDS sequence (opt4) from hemagglutinin__InfluenzaB__AGX17138

SEQ ID NO: 187172 - RNA, 1758 nt, Artificial Sequence; identical to SEQ ID NO: 187159
  derived and/or modified CDS sequence (opt4) from hemagglutinin__InfluenzaB__AGX17149

SEQ ID NO: 187173 - RNA, 1758 nt, Artificial Sequence
  derived and/or modified CDS sequence (opt4) from hemagglutinin__InfluenzaB__AGX17160
augaaggccaucaucgugcugcugaugguggugaccagcaacgccgacagaaucugcaccggcaucaccagcagcaacagcccccacguggugaagaccgccacccagggcgaggugaacgugaccggcaugaucccccugaccaccacccccaccaagagccacuucgccaaccugaagggcaccaagaccagaggcaagcugugccccaagugccugaacugcaccgaccuggacguggcccugggcagacccaagugcaccggcaacauccccagcgccaaggugagcauccugcacgaggugagacccgugaccagcggcugcuuccccaucaugcacgacagaaccaagaucagacagcugcccaaccugcugagaggcuacgagcacaucagacugagcacccacaacgugaucaacgccgagaaggcccccggcggccccuacaagaucggcaccagcggcagcugccccaacgugaccaacggcaacggcuucuucgccaccauggccugggccgugcccaagaacgacaacaacaagaccgccaccaacagccugaccaucgaggugcccuacaucugcaccgagggcgaggaccagaucaccguguggggcuuccacagcgacaacgagacccagauggccaagcuguacggcgacagcaagccccagaaguucaccagcagcgccaacggcgugaccacccacuacgugagccagaucggcggcuuccccaaccagaccgaggacggcggccugccccagagcggcagaaucgugguggacuacauggugcagaagagcggcaagaccggcaccaucaccuaccagagaggcauccugcugccccagaagguguggugcgccagcggcagaagcaaggugaucaagggcagccugccccugaucggcgaggccgacugccugcacgagaaguacggcggccugaacaagagcaagcccuacuacaccggcgagcacgccaaggccaucggcaacugccccaucugggugaagaccccccugaagcuggccaacggcaccaaguacagaccccccgccaagcugcugaaggagagaggcuucuucggcgccaucgccggcuuccuggagggcggcugggagggcaugaucgccggcuggcacggcuacaccagccacggcgcccacggcguggccguggccgccgaccugaagagcacccaggaggccaucaacaagaucaccaagaaccugaacagccugagcgagcuggaggugaagaaccugcagagacugagcggcgccauggacgagcugcacaacgagauccuggagcuggacgagaagguggacgaccugagagccgacaccaucagcagccagaucgagcuggccgugcugcugagcaacgagggcaucaucaacagcgaggacgagcaccugcuggcccuggagagaaagcugaagaagaugcugggccccagcgccguggagaucggcaacggcugcuucgagaccaagcacaagugcaaccagaccugccuggacagaaucgccgccggcaccuucgacgccggcgaguucagccugcccaccuucgacagccugaacaucaccgccgccagccugaacgacgacggccuggacaaccacaccauccugcuguacuacagcaccgccgccagcagccuggccgugacccugaugaucgccaucuucgugguguacauggugagcagagacaacgugagcugcagcaucugccuguga

SEQ ID NO: 187174 - RNA, 1758 nt, Artificial Sequence
  derived and/or modified CDS sequence (opt4) from hemagglutinin__InfluenzaB__AGX17171
augaaggccaucaucgugcugcugaugguggugaccagcaacgccgacagaaucugcaccggcaucaccagcagcaacagcccccacguggugaagaccgccacccagggcgaggugaacgugaccggcgugaucccccugaccaccacccccaccgagagccacuucgccaaccugaagggcaccaagaccagaggcaagcugugccccaagugccugaacugcaccgaccuggacguggcccugggcagacccaagugcaccggcaacauccccagcgccaaggugagcauccugcacgaggugagacccgugaccagcggcugcuuccccaucaugcacaacagaaccaagaucagacagcugcccaaccugcugagaggcuacgagcacaucagacugagcacccacaacgugaucaacgccgagaaggcccccggcggccccuacaagaucggcaccagcggcagcugccccaacgugaccaacggcaacggcuucuucgccaccauggccugggccgugcccaagaacgacaacaacaagaccgccaccaacagccugaccaucgaggugcccuacaucugcaccgagggcgaggaccagaucaccguguggggcuuccacagcgacaacgaggcccagauggccaagcuguacggcgacagcaagccccagaaguucaccagcagcgccaacggcgugaccacccacuacgugagccagaucggcggcuuccccaaccagaccgaggacggcggccugccccagagcggcagaaucgugguggacuacauggugcagaagagcggcaacaccggcaccaucaccuaccagagaggcauccugcugccccagaagguguggugcgccagcggcagaagcaaggugaucaagggcagccugccccugaucggcgaggccgacugccugcacgagaaguacggcggccugaacaagagcaagcccuacuacaccggcgagcacgccaaggccaucggcaacugccccaucugggugaagaccccccugaagcuggccaacggcaccaaguacagaccccccgccaagcugcugaaggagagaggcuucuucggcgccaucgccggcuuccuggagggcggcugggagggcaugaucgccggcuggcacggcuacaccagccacggcgcccacggcguggccguggccgccgaccugaagagcacccaggaggccaucaacaagaucaccaagaaccugaacagccugagcgagcuggaggugaagaaccugcagagacugagcggcgccauggacgagcugcacaacgagauccuggagcuggacgagaagguggacgaccugagagccgacaccaucagcagccagaucgagcuggccgugcugcugagcaacgagggcaucaucaacagcgaggacgagcaccugcuggcccuggagagaaagcugaagaagaugcugggccccagcgccguggagaucggcaacggcugcuucgagaccaagcacaagugcaaccagaccugccuggacagaaucgccgccggcaccuucgacgccggcgaguucagccugcccaccuucgacagccugaacaucaccgccgccagccugaacgacgacggccuggacaaccacaccauccugcuguacuacagcaccgccgccagcagccuggccgugacccugaugaucgccaucuucgugguguacauggugagcagagacaacgugagcugcagcaucugccuguga

SEQ ID NO: 187175 - RNA, 1758 nt, Artificial Sequence; identical to SEQ ID NO: 187039
  derived and/or modified CDS sequence (opt4) from hemagglutinin__InfluenzaB__AGX17182

SEQ ID NO: 187176 - RNA, 1758 nt, Artificial Sequence; identical to SEQ ID NO: 187039
  derived and/or modified CDS sequence (opt4) from hemagglutinin__InfluenzaB__AGX17193

SEQ ID NO: 187177 - RNA, 1758 nt, Artificial Sequence; identical to SEQ ID NO: 187039
  derived and/or modified CDS sequence (opt4) from hemagglutinin__InfluenzaB__AGX17204

SEQ ID NO: 187178 - RNA, 1758 nt, Artificial Sequence
  derived and/or modified CDS sequence (opt4) from hemagglutinin__InfluenzaB__AGX17215
augaaggccaucaucgugcugcugaugguggugaccagcaacgccgacagaaucugcaccggcaucaccagcagcaacagcccccacguggugaagaccgccacccagggcgaggugaacgugaccggcgugaucccccugaccaccacccccaccaagagccacuucgccaaccugaagggcaccaagaccagaggcaagcugugccccaagugccugaacugcaccgaccuggacguggcccugggcagacccaagugcaccggcaacauccccagcgccaaggugagcauccugcacgaggugagacccgugaccagcggcugcuuccccaucaugcacgacagaaccaagaucagacagcugcccaaccugcugagaggcuacgagcacaucagacugagcacccacaacgugaucaacgccgagaaggcccccggcggccccuacaagaucggcaccagcggcagcugccccaacgugaccaacggcaacggcuucuucgccaccauggccugggccgugcccaagaacgacaacaacaagaccgccaccaacagccugaccaucgaggugcccuacaucugcaccgagggcgaggaccagaucaccguguggggcuuccacagcgacaacgaggcccagauggccaagcuguacggcgacagcaagccccagaaguucaccagcagcgccaacggcgugaccacccacuacgugagccagaucggcggcuuccccaaccagaccgaggacggcggccugccccagagcggcagaaucgugguggacuacauggugcagaagagcggcaagaccggcaccaucaccuaccagagaggcauccugcugccccagaagguguggugcgccagcggcagaagcaaggugaucaagggcagccugccccugaucggcgaggccgacugccugcacgagaaguacggcggccugaacaagagcaagcccuacuacaccggcgagcacgccaaggccaucggcaacugccccaucugggugaagaccccccugaagcuggccaacggcaccaaguacagaccccccgccaagcugcugaaggagagaggcuucuucggcgccaucgccggcuuccuggagggcggcugggagggcaugaucgccggcuggcacggcuacaccagccacggcgcccacggcguggccguggccgccgaccugaagagcacccaggaggccaucaacaagaucaccaagaaccugaacagccugagcgagcuggaggugaagaaccugcagagacugagcggcgccauggacgagcugcacaacgagauccuggagcuggacgagaagguggacgaccugagagccgacaccaucagcagccagaucgagcuggccgugcugcugagcaacgagggcaucaucaacagcgaggacgagcaccugcuggcccuggagagaaagcugaagaagaugcugggccccagcgccaucgagaucggcaacggcugcuucgagaccaagcacaagugcaaccagaccugccuggacagaaucgccgccggcaccuucgacgccggcgaguucagccugcccaccuucgacagccugaacaucaccgccgccagccugaacgacgacggccuggacaaccacaccauccugcuguacuacagcaccgccgccagcagccuggccgugacccugaugaucgccaucuucgugguguacauggugagcagagacaacgugagcugcagcaucugccuguga

SEQ ID NO: 187179 - RNA, 1758 nt, Artificial Sequence; identical to SEQ ID NO: 187039
  derived and/or modified CDS sequence (opt4) from hemagglutinin__InfluenzaB__AGX17226

SEQ ID NO: 187180 - RNA, 1758 nt, Artificial Sequence
  derived and/or modified CDS sequence (opt4) from hemagglutinin__InfluenzaB__AGX17237
augaaggccaucaucgugcugcugaugguggugaccagcaacgccgacagaaucugcaccggcaucaccagcagcaacagcccccacguggugaagaccgccacccagggcgaggugaacgugaccggcgugaucccccugaccaccacccccaccaagagccacuucgccaaccugaagggcaccaagaccagaggcaagcugugccccaagugccugaacugcaccgaccuggacguggcccugggcagacccaagugcaccggcaacauccccagcgccaaggugagcauccugcacgaggugagacccgugaccagcggcugcuuccccaucaugcacgacagaaccaagaucagacagcugcccaaccugcugagaggcuacgagcacaucagacugagcacccacaacgugaucaacgccgagaaggcccccggcggccccuacaagaucggcaccagcggcagcugccccaacaucaccaacggcaacggcuucuucgccaccauggccugggccgugcccaagaacgacaacaacaagaccgccaccaacagccugaccaucgaggugcccuacaucugcaccgagggcgaggaccagaucaccguguggggcuuccacagcgacaacgagauccagauggccaagcuguacggcgacagcaagccccagaaguucaccagcagcgccaacggcgugaccacccacuacgugagccagaucggcggcuuccccaaccagaccgaggacggcggccugccccagagcggcagaaucgugguggacuacauggugcagaagagcggcaagaccggcaccaucaccuaccagagaggcauccugcugccccagaagguguggugcgccagcggcagaagcaaggugaucaagggcagccugccccugaucggcgaggccgacugccugcacgagaaguacggcggccugaacaagagcaagcccuacuacaccggcgagcacgccaaggccaucggcaacugccccaucugggugaagaccccccugaagcuggccaacggcaccaaguacagaccccccgccaagcugcugaaggagagaggcuucuucggcgccaucgccggcuuccuggagggcggcugggagggcaugaucgccggcuggcacggcuacaccagccacggcgcccacggcguggccguggccgccgaccugaagagcacccaggaggccaucaacaagaucaccaagaaccugaacagccugagcgagcuggaggugaagaaccugcagagacugagcggcgccauggacgagcugcacaacgagauccuggagcuggacgagaagguggacgaccugagagccgacaccaucagcagccagaucgagcuggccgugcugcugagcaacgagggcaucaucaacagcgaggacgagcaccugcuggcccuggagagaaagcugaagaagaugcugggccccagcgccguggagaucggcaacggcugcuucgagaccaagcacaagugcaaccagaccugccuggacagaaucgccgccggcaccuucgacgccggcgaguucagccugcccaccuucgacagccugaacaucaccgccgccagccugaacgacgacggccuggacaaccacaccauccugcuguacuacagcaccgccgccagcagccuggccgugacccugaugaucgccaucuucgugguguacauggugagcagagacaacgugagcugcagcaucugccuguga

SEQ ID NO: 187181 - RNA, 1758 nt, Artificial Sequence
  derived and/or modified CDS sequence (opt4) from hemagglutinin__InfluenzaB__AGX17248
augaaggccaucaucgugcugcugaugguggugaccagcaacgccgacagaaucugcaccggcaucaccagcagcaacagcccccacguggugaagaccgccacccagggcgaggugaacgugaccggcgugaucccccugaccaccacccccaccaagagccacuucgccaaccugaagggcaccaagaccagaggcaagcugugccccaagugccugaacugcaccgaccuggacguggcccugggcagacccaagugcaccggcaacauccccagcgccaaggugagcauccugcacgaggugagacccgugaccagcggcugcuuccccaucaugcacgacagaaccaagaucagacagcugcccaaccugcugagaggcuacgagcacaucagacugagcacccacaacgugaucaacgccgagaaggcccccggcggccccuacaagaucggcaccagcggcagcugccccaacgugaccaacggcaacggcuucuucgccaccauggccugggccgugcccaagaacgacaacaacaagaccgccaccaacagccugaccaucgaggugcccuacaucugcaccgagggcgaggaccagaucaccguguggggcuuccacagcgacaacgagacccagauggccaagcuguacggcgacagcaagccccagaaguucaccagcagcgccaacggcgugaccacccacuacgugagccagaucggcggcuuccccaaccagaccgaggacggcggccugccccagagcggcagaaucgugguggacuacauggugcagaagagcggcaagaccggcaccaucaccuaccagagaggcauccugcugccccagaagguguggugcaccagcggcagaagcaaggugaucaagggcagccugccccugaucggcgaggccgacugccugcacgagaaguacggcggccugaacaagagcaagcccuacuacaccggcgagcacgccaaggccaucggcaacugccccaucugggugaagaccccccugaagcuggccaacggcaccaaguacagaccccccgccaagcugcugaaggagagaggcuucuucggcgccaucgccggcuuccuggagggcggcugggagggcaugaucgccggcuggcacggcuacaccagccacggcgcccacggcguggccguggccgccgaccugaagagcacccaggaggccaucaacaagaucaccaagaaccugaacagccugagcgagcuggaggugaagaaccugcagagacugagcggcgccauggacgagcugcacaacgagauccuggagcuggacgagaagguggacgaccugagagccgacaccaucagcagccagaucgagcuggccgugcugcugagcaacgagggcaucaucaacagcgaggacgagcaccugcuggcccuggagagaaagcugaagaagaugcugggccccagcgccguggagaucggcaacggcugcuucgagaccaagcacaagugcaaccagaccugccuggacagaaucgccgccggcaccuucgacgccggcgaguucagccugcccaccuucgacagccugaacaucaccgccgccagccugaacgacgacggccuggacaaccacaccauccugcuguacuacagcaccgccgccagcagccuggccgugacccugaugaucgccaucuucgugguguacauggugagcagagacaacgugagcugcagcaucugccuguga

SEQ ID NO: 187182 - RNA, 1758 nt, Artificial Sequence; identical to SEQ ID NO: 187123
  derived and/or modified CDS sequence (opt4) from hemagglutinin__InfluenzaB__AGX17270

SEQ ID NO: 187183 - RNA, 1758 nt, Artificial Sequence; identical to SEQ ID NO: 187039
  derived and/or modified CDS sequence (opt4) from hemagglutinin__InfluenzaB__AGX17281

SEQ ID NO: 187184 - RNA, 1758 nt, Artificial Sequence; identical to SEQ ID NO: 187039
  derived and/or modified CDS sequence (opt4) from hemagglutinin__InfluenzaB__AGX17292

SEQ ID NO: 187185 - RNA, 1758 nt, Artificial Sequence; identical to SEQ ID NO: 187039
  derived and/or modified CDS sequence (opt4) from hemagglutinin__InfluenzaB__AGX17303

SEQ ID NO: 187186 - RNA, 1758 nt, Artificial Sequence; identical to SEQ ID NO: 187165
  derived and/or modified CDS sequence (opt4) from hemagglutinin__InfluenzaB__AGX17314

SEQ ID NO: 187187 - RNA, 1758 nt, Artificial Sequence; identical to SEQ ID NO: 187039
  derived and/or modified CDS sequence (opt4) from hemagglutinin__InfluenzaB__AGX17325

SEQ ID NO: 187188 - RNA, 1758 nt, Artificial Sequence; identical to SEQ ID NO: 187150
  derived and/or modified CDS sequence (opt4) from hemagglutinin__InfluenzaB__AGX17336

SEQ ID NO: 187189 - RNA, 1758 nt, Artificial Sequence; identical to SEQ ID NO: 187039
  derived and/or modified CDS sequence (opt4) from hemagglutinin__InfluenzaB__AGX17347

SEQ ID NO: 187190 - RNA, 1758 nt, Artificial Sequence; identical to SEQ ID NO: 187039
  derived and/or modified CDS sequence (opt4) from hemagglutinin__InfluenzaB__AGX17358

SEQ ID NO: 187191 - RNA, 1758 nt, Artificial Sequence
  derived and/or modified CDS sequence (opt4) from hemagglutinin__InfluenzaB__AGX17369
augaaggccaucaucgugcugcugaugguggugaccagcaacgccgacagaaucugcaccggcaucaccagcagcaacagcccccacguggugaagaccgccacccagggcgaggugaacgugaccggcgugaucccccugaccaccacccccaccaagagccacuucgccaaccugaagggcaccaagaccagaggcaagcugugccccaagugccugaacugcaccgaccuggacguggcccugggcagacccaagugcaccggcaacauccccagcgccaaggugagcauccugcacgaggugagacccgugaccagcggcugcuuccccaucaugcacgacagaaccaagaucagacagcugcccaaccugcugagaggcuacgagcacaucagacugagcacccacaacgugaucaacgccgagaaggcccccggcggccccuacaagaucggcaccagcggcagcugccccaacgugaccaacggcaacggcuucuucgccaccauggccugggccgugcccaagaacgacaacaacaagaccgccaccaacagccugaccaucgaggugcccuacaucugcaccgagggcgaggaccagaucaccguguggggcuuccacagcgacaacgagacccagauggccaagcuguacggcgacagcaagccccagaaguucaccagcagcgccaacggcgugaccacccacuacgugagccagaucggcggcuuccccaaccagaccgaggacggcggccugccccagagcggcagaaucguggccgacuacauggugcagaagagcggcaagaccggcaccaucaccuaccagagaggcauccugcugccccagaagguguggugcgccagcggcagaagcaaggugaucaagggcagccugccccugaucggcgaggccgacugccugcacgagaaguacggcggccugaacaagagcaagcccuacuacaccggcgagcacgccaaggccaucggcaacugccccaucugggugaagaccccccugaagcuggccaacggcaccaaguacagaccccccgccaagcugcugaaggagagaggcuucuucggcgccaucgccggcuuccuggagggcggcugggagggcaugaucgccggcuggcacggcuacaccagccacggcgcccacggcguggccguggccgccgaccugaagagcacccaggaggccaucaacaagaucaccaagaaccugaacagccugagcgagcuggaggugaagaaccugcagagacugagcggcgccauggacgagcugcacaacgagauccuggagcuggacgagaagguggacgaccugagagccgacaccaucagcagccagaucgagcuggccgugcugcugagcaacgagggcaucaucaacagcgaggacgagcaccugcuggcccuggagagaaagcugaagaagaugcugggccccagcgccguggagaucggcaacggcugcuucgagaccaagcacaagugcaaccagaccugccuggacagaaucgccgccggcaccuucgacgccggcgaguucagccugcccaccuucgacagccugaacaucaccgccgccagccugaacgacgacggccuggacaaccacaccauccugcuguacuacagcaccgccgccagcagccuggccgugacccugaugaucgccaucuucgugguguacauggugagcagagacaacgugagcugcagcaucugccuguga

SEQ ID NO: 187192 - RNA, 1758 nt, Artificial Sequence; identical to SEQ ID NO: 187165
  derived and/or modified CDS sequence (opt4) from hemagglutinin__InfluenzaB__AGX17380

SEQ ID NO: 187193 - RNA, 1758 nt, Artificial Sequence; identical to SEQ ID NO: 187039
  derived and/or modified CDS sequence (opt4) from hemagglutinin__InfluenzaB__AGX17391

SEQ ID NO: 187194 - RNA, 1758 nt, Artificial Sequence
  derived and/or modified CDS sequence (opt4) from hemagglutinin__InfluenzaB__AGX17400
augaaggccaucaucgugcugcugaugguggugaccagcaacgccgacagaaucugcaccggcaucaccagcagcaacagcccccacauggugaagaccgccacccagggcgaggugaacgugaccggcgugaucccccugaccaccacccccaccaagagccacuucgccaaccugaagggcaccaagaccagaggcaagcugugccccaagugccugaacugcaccgaccuggacguggcccugggcagacccaagugcaccggcaacauccccagcgccaaggugagcauccugcacgaggugagacccgugaccagcggcugcuuccccaucaugcacgacagaaccaagaucagacagcugcccaaccugcugagaggcuacgagcacaucagacugagcacccacaacgugaucaacgccgagaaggcccccggcggccccuacaagaucggcaccagcggcagcugccccaacgugaccaacggcaacggcuucuucgccaccauggccugggccgugcccaagaacgacaacaacaagaccgccaccaacagccugaccaucgaggugcccuacaucugcaccgagggcgaggaccagaucaccguguggggcuuccacagcgacaacgagacccagauggccaagcuguacggcgacagcaagccccagaaguucaccagcagcgccaacggcgugaccacccacuacgugagccagaucggcggcuuccccaaccagaccgaggacggcggccugccccagagcggcagaaucgugguggacuacauggugcagaagagcggcaagaccggcaccaucaccuaccagagaggcauccugcugccccagaagguguggugcgccagcggcagaagcaaggugaucaagggcagccugccccugaucggcgaggccgacugccugcacgagaaguacggcggccugaacaagagcaagcccuacuacaccggcgagcacgccaaggccaucggcaacugccccaucugggugaagaccccccugaagcuggccaacggcaccaaguacagaccccccgccaagcugcugaaggagagaggcuucuucggcgccaucgccggcuuccuggagggcggcugggagggcaugaucgccggcuggcacggcuacaccagccacggcgcccacggcguggccguggccgccgaccugaagagcacccaggaggccaucaacaagaucaccaagaaccugaacagccugagcgagcuggaggugaagaaccugcagagacugagcggcgccauggacgagcugcacaacgagauccuggagcuggacgagaagguggacgaccugagagccgacaccaucagcagccagaucgagcuggccgugcugcugagcaacgagggcaucaucaacagcgaggacgagcaccugcuggcccuggagagaaagcugaagaagaugcugggccccagcgccguggagaucggcaacggcugcuucgagaccaagcacaagugcaaccagaccugccuggacagaaucgccgccggcaccuucgacgccggcgaguucagccugcccaccuucgacagccugaacaucaccgccgccagccugaacgacgacggccuggacaaccacaccauccugcuguacuacagcaccgccgccagcagccuggccgugacccugaugaucgccaucuucgugguguacauggugagcagagacaacgugagcugcagcaucugccuguga

SEQ ID NO: 187195 - RNA, 1758 nt, Artificial Sequence; identical to SEQ ID NO: 187039
  derived and/or modified CDS sequence (opt4) from hemagglutinin__InfluenzaB__AGX17411

SEQ ID NO: 187196 - RNA, 1758 nt, Artificial Sequence; identical to SEQ ID NO: 187039
  derived and/or modified CDS sequence (opt4) from hemagglutinin__InfluenzaB__AGX17422

SEQ ID NO: 187197 - RNA, 1758 nt, Artificial Sequence; identical to SEQ ID NO: 187122
  derived and/or modified CDS sequence (opt4) from hemagglutinin__InfluenzaB__AGX17433

SEQ ID NO: 187198 - RNA, 1758 nt, Artificial Sequence; identical to SEQ ID NO: 187039
  derived and/or modified CDS sequence (opt4) from hemagglutinin__InfluenzaB__AGX17444

SEQ ID NO: 187199 - RNA, 1758 nt, Artificial Sequence; identical to SEQ ID NO: 187122
  derived and/or modified CDS sequence (opt4) from hemagglutinin__InfluenzaB__AGX17455

SEQ ID NO: 187200 - RNA, 1758 nt, Artificial Sequence; identical to SEQ ID NO: 187165
  derived and/or modified CDS sequence (opt4) from hemagglutinin__InfluenzaB__AGX17466

SEQ ID NO: 187201 - RNA, 1758 nt, Artificial Sequence; identical to SEQ ID NO: 187039
  derived and/or modified CDS sequence (opt4) from hemagglutinin__InfluenzaB__AGX17477

SEQ ID NO: 187202 - RNA, 1758 nt, Artificial Sequence; identical to SEQ ID NO: 187124
  derived and/or modified CDS sequence (opt4) from hemagglutinin__InfluenzaB__AGX17488

SEQ ID NO: 187203 - RNA, 1758 nt, Artificial Sequence; identical to SEQ ID NO: 187039
  derived and/or modified CDS sequence (opt4) from hemagglutinin__InfluenzaB__AGX17499

SEQ ID NO: 187204 - RNA, 1758 nt, Artificial Sequence; identical to SEQ ID NO: 187165
  derived and/or modified CDS sequence (opt4) from hemagglutinin__InfluenzaB__AGX17510

SEQ ID NO: 187205 - RNA, 1758 nt, Artificial Sequence; identical to SEQ ID NO: 187165
  derived and/or modified CDS sequence (opt4) from hemagglutinin__InfluenzaB__AGX17521

SEQ ID NO: 187206 - RNA, 1758 nt, Artificial Sequence; identical to SEQ ID NO: 187167
  derived and/or modified CDS sequence (opt4) from hemagglutinin__InfluenzaB__AGX17532

SEQ ID NO: 187207 - RNA, 1758 nt, Artificial Sequence
  derived and/or modified CDS sequence (opt4) from hemagglutinin__InfluenzaB__AGX17543
augaaggccaucaucgugcugcugaugguggugaccagcaacgccgacagaaucugcaccggcaucaccagcagcaacagcccccacguggugaagaccgccacccagggcgaggugaacgugaccggcgugaucccccugaccaccacccccaccaagagccacuucgccagccugaagggcaccaagaccagaggcaagcugugccccaagugccugaacugcaccgaccuggacguggcccugggcagacccaagugcaccggcaacauccccagcgccaaggugagcauccugcacgaggugagacccgugaccagcggcugcuuccccaucaugcacgacagaaccaagaucagacagcugcccaaccugcugagaggcuacgagcacaucagacugagcacccacaacgugaucaacgccgagaaggcccccggcggccccuacaagaucggcaccagcggcagcugccccaacgugaccaacggcaacggcuucuucgccaccauggccugggccgugcccaagaacgacaacaacaagaccgccaccaacagccugaccaucgaggugcccuacaucugcaccgagggcgaggaccagaucaccguguggggcuuccacagcgacaacgagacccagauggccaagcuguacggcgacagcaagccccagaaguucaccagcagcgccaacggcgugaccacccacuacgugagccagaucggcggcuuccccaaccagaccgaggacggcggccugccccagagcggcagaaucgugguggacuacauggugcagaagagcggcaagaccggcaccaucaccuaccagagaggcauccugcugccccagaagguguggugcgccagcggcagaagcaaggugaucaagggcagccugccccugaucggcgaggccgacugccugcacgagaaguacggcggccugaacaagagcaagcccuacuacaccggcgagcacgccaaggccaucggcaacugccccaucugggugaagaccccccugaagcuggccaacggcaccaaguacagaccccccgccaagcugcugaaggagagaggcuucuucggcgccaucgccggcuuccuggagggcggcugggagggcaugaucgccggcuggcacggcuacaccagccacggcgcccacggcguggccguggccgccgaccugaagagcacccaggaggccaucaacaagaucaccaagaaccugaacagccugagcgagcuggaggugaagaaccugcagagacugagcggcgccaugaacgagcugcacaacgagauccuggagcuggacgagaagguggacgaccugagagccgacaccaucagcagccagaucgagcuggccgugcugcugagcaacgagggcaucaucaacagcgaggacgagcaccugcuggcccuggagagaaagcugaagaagaugcugggccccagcgccguggagaucggcaacggcugcuucgagaccaagcacaagugcaaccagaccugccuggacagaaucgccgccggcaccuucgacgccggcgaguucagccugcccaccuucgacagccugaacaucaccgccgccagccugaacgacgacggccuggacaaccacaccauccugcuguacuacagcaccgccgccagcagccuggccgugacccugaugaucgccaucuucgugguguacauggugagcagagacaacgugagcugcagcaucugccuguga

SEQ ID NO: 187208 - RNA, 1758 nt, Artificial Sequence
  derived and/or modified CDS sequence (opt4) from hemagglutinin__InfluenzaB__AGX17554
augaaggccaucaucgugcugcugcugguggugaccagcaacgccgacagaaucugcaccggcaucaccagcagcaacagcccccacguggugaagaccgccacccagggcgaggugaacgugaccggcgugaucccccugaccaccacccccaccaagagccacuucgccaaccugaagggcaccaagaccagaggcaagcugugccccaagugccugaacugcaccgaccuggacguggcccugggcagacccaagugcaccggcaacauccccagcgccaaggugagcauccugcacgaggugagacccgugaccagcggcugcuuccccaucaugcacgacagaaccaagaucagacagcugcccaaccugcugagaggcuacgagcacaucagacugagcacccacaacgugaucaacgccgagaaggcccccggcggccccuacaagaucggcaccagcggcagcugccccaacgugaccaacggcaacggcuucuucgccaccauggccugggccgugcccaagaacgacaacaacaagaccgccaccaacagccugaccaucgaggugcccuacaucugcaccgagggcgaggaccagaucaccguguggggcuuccacagcgacaacgagacccagauggccaagcuguacggcgacagcaagccccagaaguucaccagcagcgccaacggcgugaccacccacuacgugagccagaucggcggcuuccccaaccagaccgaggacggcggccugccccagagcggcagaaucgugguggacuacauggugcagaagagcggcaagaccggcaccaucaccuaccagagaggcauccugcugccccagaagguguggugcgccagcggcagaagcaaggugaucaagggcagccugccccugaucggcgaggccgacugccugcacgagaaguacggcggccugaacaagagcaagcccuacuacaccggcgagcacgccaaggccaucggcaacugccccaucugggugaagaccccccugaagcuggccaacggcaccaaguacagaccccccgccaagcugcugaaggagagaggcuucuucggcgccaucgccggcuuccuggagggcggcugggagggcaugaucgccggcuggcacggcuacaccagccacggcgcccacggcguggccguggccgccgaccugaagagcacccaggaggccaucaacaagaucaccaagaaccugaacagccugagcgagcuggaggugaagaaccugcagagacugagcggcgccauggacgagcugcacaacgagauccuggagcuggacgagaagguggacgaccugagagccgacaccaucagcagccagaucgagcuggccgugcugcugagcaacgagggcaucaucaacagcgaggacgagcaccugcuggcccuggagagaaagcugaagaagaugcugggccccagcgccguggagaucggcaacggcugcuucgagaccaagcacaagugcaaccagaccugccuggacagaaucgccgccggcaccuucgacgccggcgaguucagccugcccaccuucgacagccugaacaucaccgccgccagccugaacgacgacggccuggacaaccacaccauccugcuguacuacagcaccgccgccagcagccuggccgugacccugaugaucgccaucuucgugguguacauggugagcagagacaacgugagcugcagcaucugccuguga

SEQ ID NO: 187209 - RNA, 1755 nt, Artificial Sequence; identical to SEQ ID NO: 187083
  derived and/or modified CDS sequence (opt4) from hemagglutinin__InfluenzaB__AGX17565

SEQ ID NO: 187210 - RNA, 1758 nt, Artificial Sequence
  derived and/or modified CDS sequence (opt4) from hemagglutinin__InfluenzaB__AGX17576
augaaggccaucaucgugcugcugaugguggugaccagcaacgccgacagaaucugcaccggcaucaccagcagcaacagcccccacguggugaagaccgccacccagggcgaggugaacgugaccggcgugaucccccugaccaccacccccaccaagagccacuucgccaaccugaagggcaccaagaccagaggcaagcugugccccaagugccugaacugcaccgaccuggacguggcccugggcagacccaagugcaccggcaacauccccagcgccgaggugagcauccugcacgaggugagacccgugaccagcggcugcuuccccaucaugcacgacagaaccaagaucagacagcugcccaaccugcugagaggcuacgagcacaucagacugagcacccacaacgugaucaacgccgagaaggcccccggcggccccuacaagaucggcaccagcggcagcugccccaacgugaccaacggcaacggcuucuucgccaccauggccugggccgugcccaagaacgacaacaacaagaccgccaccaacagccugaccaucgaggugcccuacaucugcaccgagggcgaggaccagaucaccaucuggggcuuccacagcgacaacgagacccagauggccaagcuguacggcgacagcaagccccagaaguucaccagcagcgccaacggcgugaccacccacuacgugagccagaucggcggcuuccccaaccagaccgaggacggcggccugccccagagcggcagaaucgugguggacuacauggugcagaagagcggcaagaccggcaccaucaccuaccagagaggcauccugcugccccagaagguguggugcgccagcggcagaagcaaggugaucaagggcagccugccccugaucggcgaggccgacugccugcacgagaaguacggcggccugaacaagagcaagcccuacuacaccggcgagcacgccaaggccaucggcaacugccccaucugggugaagaccccccugaagcuggccaacggcaccaaguacagaccccccgccaagcugcugaaggagagaggcuucuucggcgccaucgccggcuuccuggagggcggcugggagggcaugaucgccggcuggcacggcuacaccagccacggcgcccacggcguggccguggccgccgaccugaagagcacccaggaggccaucaacaagaucaccaagaaccugaacagccugagcgagcuggaggugaagaaccugcagagacugagcggcgccauggacgagcugcacaacgagauccuggagcuggacgagaagguggacgaccugagagccgacaccaucagcagccagaucgagcuggccgugcugcugagcaacgagggcaucaucaacagcgaggacgagcaccugcuggcccuggagagaaagcugaagaagaugcugggccccagcgccguggagaucggcaacggcugcuucgagaccaagcacaagugcaaccagaccugccuggacagaaucgccgccggcaccuucgacgccggcgaguucagccugcccaccuucgacagccugaacaucaccgccgccagccugaacgacgacggccuggacaaccacaccauccugcuguacuacagcaccgccgccagcagccuggccgugacccugaugauggccaucuucgugguguacauggugagcagagacaacgugagcugcagcaucugccuguga

SEQ ID NO: 187211 - RNA, 1758 nt, Artificial Sequence; identical to SEQ ID NO: 186574
  derived and/or modified CDS sequence (opt4) from hemagglutinin__InfluenzaB__AGX17598

SEQ ID NO: 187212 - RNA, 1758 nt, Artificial Sequence
  derived and/or modified CDS sequence (opt4) from hemagglutinin__InfluenzaB__AGX17609
augaaggccaucaucgugcugcugaugguggugaccagcaacgccgacagaaucugcaccggcaucaccagcagcaacagcccccacguggugaagaccgccacccagggcgaggugaacgugaccggcgugaucccccugaccaccacccccaccaagagccacuucgccaaccugaagggcaccgagaccagaggcaagcugugccccaagugccugaacugcaccgaccuggacguggcccugggcagacccaagugcaccggcaagauccccagcgccagagugagcauccugcacgaggugagacccgugaccagcggcugcuuccccaucaugcacgacagaaccaagaucagacagcugcccaaccugcugagaggcuacgagcacaucagacugagcacccacaacgugaucaacgccgagaacgcccccggcggccccuacaagaucggcaccagcggcagcugccccaacgugaccaacggcaacggcuucuucgccaccauggccugggccgugcccaagaacgacaacaacaagaccgccaccaacagccugaccaucgaggugcccuacaucugcaccgagggcgaggaccagaucaccguguggggcuuccacagcgacaacgagacccagauggccaagcuguacggcgacagcaagccccagaaguucaccagcagcgccaacggcgugaccacccacuacgugagccagaucggcggcuuccccaaccagaccgaggacggcggccugccccagagcggcagaaucgugguggacuacauggugcagaagagcggcaagaccggcaccaucaccuaccagagaggcauccugcugccccagaagguguggugcgccagcggcagaagcaaggugaucaagggcagccugccccugaucggcgaggccgacugccugcacgagaaguacggcggccugaacaagagcaagcccuacuacaccggcgagcacgccaaggccaucggcaacugccccaucugggugaagaccccccugaagcuggccaacggcaccaaguacagaccccccgccaagcugcugaaggagagaggcuucuucggcgccaucgccggcuuccuggagggcggcugggagggcaugaucgccggcuggcacggcuacaccagccacggcgcccacggcguggccguggccgccgaccugaagagcacccaggaggccaucaacaagaucaccaagaaccugaacagccugagcgagcuggaggugaagaaccugcagagacugagcggcgccauggacgagcugcacaacgagauccuggagcuggacgagaagguggacgaccugagagccgacaccaucagcagccagaucgagcuggccgugcugcugagcaacgagggcaucaucaacagcgaggacgagcaccugcuggcccuggagagaaagcugaagaagaugcugggccccagcgccguggagaucggcaacggcugcuucgagaccaagcacaagugcaaccagaccugccuggacagaaucgccgccggcaccuucgacgccggcgaguucagccugcccaccuucgacagccugaacaucaccgccgccagccugaacgacgacggccuggacaaccacaccauccugcuguacuacagcaccgccgccagcagccuggccgugacccugaugaucgccaucuucgugguguacauggugagcagagacaacgugagcugcagcaucugccuguga

SEQ ID NO: 187213 - RNA, 1758 nt, Artificial Sequence; identical to SEQ ID NO: 187041
  derived and/or modified CDS sequence (opt4) from hemagglutinin__InfluenzaB__AGX17620

SEQ ID NO: 187214 - RNA, 1758 nt, Artificial Sequence; identical to SEQ ID NO: 186574
  derived and/or modified CDS sequence (opt4) from hemagglutinin__InfluenzaB__AGX17631

SEQ ID NO: 187215 - RNA, 1758 nt, Artificial Sequence; identical to SEQ ID NO: 186698
  derived and/or modified CDS sequence (opt4) from hemagglutinin__InfluenzaB__AGX17642

SEQ ID NO: 187216 - RNA, 1758 nt, Artificial Sequence; identical to SEQ ID NO: 187041
  derived and/or modified CDS sequence (opt4) from hemagglutinin__InfluenzaB__AGX17653

SEQ ID NO: 187217 - RNA, 1758 nt, Artificial Sequence; identical to SEQ ID NO: 186574
  derived and/or modified CDS sequence (opt4) from hemagglutinin__InfluenzaB__AGX17664

SEQ ID NO: 187218 - RNA, 1758 nt, Artificial Sequence; identical to SEQ ID NO: 186698
  derived and/or modified CDS sequence (opt4) from hemagglutinin__InfluenzaB__AGX17675

SEQ ID NO: 187219 - RNA, 1758 nt, Artificial Sequence; identical to SEQ ID NO: 187041
  derived and/or modified CDS sequence (opt4) from hemagglutinin__InfluenzaB__AGX17686

SEQ ID NO: 187220 - RNA, 1758 nt, Artificial Sequence
  derived and/or modified CDS sequence (opt4) from hemagglutinin__InfluenzaB__AGX17697
augaaggccaucaucgugcugcugaugguggugaccagcaacgccgacagaaucugcaccggcaucaccagcagcaacagcccccacguggugaagaccgccacccagggcgaggugaacgugaccggcgugaucccccugaccaccacccccaccaagagccacuucgccaaccugaagggcaccgagaccagaggcaagcugugccccaagugccugaacugcaccgaccuggacguggcccugggcagacccaagugcaccggcgagauccccagcgccagagugagcauccugcacgaggugagacccgugaccagcggcugcuuccccaucaugcacgacagaaccaagaucagacagcugcccaaccugcugagaggcuacgagcacaucagacugagcacccacaacgccaucaacgccgagaacgcccccggcggccccuacaagaucggcaccagcggcagcugccccaacgugaccaacggcaacggcuucuucgccaccauggccugggccgugcccaagaacgacaacaacaagaccgccaccaacagccugaccaucgaggugcccuacaucugcaccgagggcgaggaccagaucaccguguggggcuuccacagcgacaacgagacccagauggccaagcuguacggcgacagcaagccccagaaguucaccagcagcgccaacggcgugaccacccacuacgugagccagaucggcggcuuccccaaccagaccgaggacggcggccugccccagagcggcagaaucgugguggacuacauggugcagaagagcggcaagaccggcaccaucaccuaccagagaggcauccugcugccccagaagguguggugcgccagcggcagaagcaaggugaucaagggcagccugccccugaucggcgaggccgacugccugcacgagaaguacggcggccugaacaagagcaagcccuacuacaccggcgagcacgccaaggccaucggcaacugccccaucugggugaagaccccccugaagcuggccaacggcaccaaguacagaccccccgccaagcugcugaaggagagaggcuucuucggcgccaucgccggcuuccuggagggcggcugggagggcaugaucgccggcuggcacggcuacaccagccacggcgcccacggcguggccguggccgccgaccugaagagcacccaggaggccaucaacaagaucaccaagaaccugaacagccugagcgagcuggaggugaagaaccugcagagacugagcggcgccauggacgagcugcacaacgagauccuggagcuggacgagaagguggacgaccugagagccgacaccaucagcagccagaucgagcuggccgugcugcugagcaacgagggcaucaucaacagcgaggacgagcaccugcuggcccuggagagaaagcugaagaagaugcugggccccagcgccguggagaucggcaacggcugcuucgagaccaagcacaagugcaaccagaccugccuggacagaaucgccgccggcaccuucgacgccggcgaguucagccugcccaccuucgacagccugaacaucaccgccgccagccugaacgacgacggccuggacaaccacaccauccugcuguacuacagcaccgccgccagcagccuggccgugacccugaugaucgccaucuucgugguguacauggugagcagagacaacgugagcugcagcaucugccuguga

SEQ ID NO: 187221 - RNA, 1758 nt, Artificial Sequence; identical to SEQ ID NO: 186698
  derived and/or modified CDS sequence (opt4) from hemagglutinin__InfluenzaB__AGX17708

SEQ ID NO: 187222 - RNA, 1758 nt, Artificial Sequence; identical to SEQ ID NO: 187041
  derived and/or modified CDS sequence (opt4) from hemagglutinin__InfluenzaB__AGX17719

SEQ ID NO: 187223 - RNA, 1758 nt, Artificial Sequence; identical to SEQ ID NO: 186698
  derived and/or modified CDS sequence (opt4) from hemagglutinin__InfluenzaB__AGX17730

SEQ ID NO: 187224 - RNA, 1758 nt, Artificial Sequence; identical to SEQ ID NO: 186574
  derived and/or modified CDS sequence (opt4) from hemagglutinin__InfluenzaB__AGX17741

SEQ ID NO: 187225 - RNA, 1758 nt, Artificial Sequence; identical to SEQ ID NO: 187041
  derived and/or modified CDS sequence (opt4) from hemagglutinin__InfluenzaB__AGX17752

SEQ ID NO: 187226 - RNA, 1758 nt, Artificial Sequence; identical to SEQ ID NO: 187041
  derived and/or modified CDS sequence (opt4) from hemagglutinin__InfluenzaB__AGX17774

SEQ ID NO: 187227 - RNA, 1758 nt, Artificial Sequence
  derived and/or modified CDS sequence (opt4) from hemagglutinin__InfluenzaB__AGX17785
augaaggccaucaucgugcugcugaugguggugaccagcaacgccgacagaaucugcaccggcaucaccagcagcaacagcccccacguggugaagaccgccacccagggcgaggugaacgugaccggcgugaucccccugaccaccacccccaccaagagccacuucgccaaccugaagggcaccaagaccagaggcaagcugugccccaagugccugaacugcaccgaccuggacguggcccugggcagacccaagugcaccggcaacauccccagcgccgaggugagcauccugcacgaggugagacccgugaccagcggcugcuuccccaucaugcacgacagaaccaagaucagacagcugcccaaccugcugagaggcuacgagcacgugagacugagcacccacaacgugaucaacgccgagaaggcccccggcggccccuacaagaucggcaccagcggcagcugccccaacgugaccaacggcaacggcuucuucgccaccauggccugggccgugcccaagaacgacaacaacaagaccgccaccaacagccugaccaucgaggugcccuacaucugcaccgagggcgaggaccagaucaccaucuggggcuuccacagcgacaacgagacccagauggccaagcuguacggcgacagcaagccccagaaguucaccagcagcgccaacggcgugaccacccacuacgugagccagaucggcggcuuccccaaccagaccgaggacggcggccugccccagagcggcagaaucgugguggacuacauggugcagaagagcggcaagaccggcaccaucaccuaccagagaggcauccugcugccccagaagguguggugcgccagcggcagaagcaaggugaucaagggcagccugccccugaucggcgaggccgacugccugcacgagaaguacggcggccugaacaagagcaagcccuacuacaccggcgagcacgccaaggccaucggcaacugccccaucugggugaagaccccccugaagcuggccaacggcaccaaguacagaccccccgccaagcugcugaaggagagaggcuucuucggcgccaucgccggcuuccuggagggcggcugggagggcaugaucgccggcuggcacggcuacaccagccacggcgcccacggcguggccguggccgccgaccugaagagcacccaggaggccaucaacaagaucaccaagaaccugaacagccugagcgagcuggaggugaagaaccugcagagacugagcggcgccauggacgagcugcacaacgagauccuggagcuggacgagaagguggacgaccugagagccgacaccaucagcagccagaucgagcuggccgugcugcugagcaacgagggcaucaucaacagcgaggacgagcaccugcuggcccuggagagaaagcugaagaagaugcugggccccagcgccguggagaucggcaacggcugcuucgagaccaagcacaagugcaaccagaccugccuggacagaaucgccgccggcaccuucgacgccggcgaguucagccugcccaccuucgacagccugaacaucaccgccgccagccugaacgacgacggccuggacaaccacaccauccugcuguacuacagcaccgccgccagcagccuggccgugacccugaugaucgccaucuucgugguguacauggugagcagagacaacgugagcugcagcaucugccuguga

SEQ ID NO: 187228 - RNA, 1758 nt, Artificial Sequence; identical to SEQ ID NO: 187041
  derived and/or modified CDS sequence (opt4) from hemagglutinin__InfluenzaB__AGX17796

SEQ ID NO: 187229 - RNA, 1758 nt, Artificial Sequence; identical to SEQ ID NO: 186625
  derived and/or modified CDS sequence (opt4) from hemagglutinin__InfluenzaB__AGX17807

SEQ ID NO: 187230 - RNA, 1758 nt, Artificial Sequence; identical to SEQ ID NO: 187212
  derived and/or modified CDS sequence (opt4) from hemagglutinin__InfluenzaB__AGX17818

SEQ ID NO: 187231 - RNA, 1758 nt, Artificial Sequence
  derived and/or modified CDS sequence (opt4) from hemagglutinin__InfluenzaB__AGX17829
augaaggccaucaucgugcugcugaugguggugaccagcaacgccgacagaaucugcaccggcaucaccagcagcaacagcccccacguggugaagaccgccacccagggcgaggugaacgugaccggcgugaucccccugaccaccacccccaccaagagccacuucgccaaccugaagggcaccgagaccagaggcaagcugugccccaagugccugaacugcaccgaccuggacguggcccugggcagacccaagugcaccggcaagauccccagcgccagagugagcauccugcacgaggugagacccgugaccagcggcugcuuccccaucaugcacgacagaaccaagaucagacagcugcccaaccugcugagaggcuacgagcacaucagacugagcacccacaacgugaucaacgccgagaacgcccccggcggccccuacaagaucggcaccagcggcagcugccccaacgugaccaacggcaacggcuucuucgccaccauggccugggccgugcccaagaacgacaacaacaagaccgccaccaacagccugaccaucgaggugcccuacaucugcaccgagggcgaggaccagaucaccguguggggcuuccacagcgacaacgagacccagauggccaagcuguacggcgacagcaagccccagaaguucaccagcagcgccaacggcgugaccacccacuacgugagccagaucggcggcuuccccaaccagaccgaggacggcggccugccccagagcggcagaaucgugguggacuacauggugcagaagagcggcaagaccggcaccaucaccuaccagagaggcauccugcugccccagaagguguggugcgccagcggcagaagcaaggugaucaagggcagccugccccugaucggcgaggccgacugccugcacgagaaguacggcggccugaacaagagcaagcccuacuacaccggcgagcacgccaaggccaucggcaacugccccaucugggugaagaccccccugaagcuggccaacggcaccaaguacagaccccccgccaagcugcugaaggagagaggcuucuucggcgccaucgccggcuuccuggagggcggcugggagggcaugaucgccggcuggcacggcuacaccagccacggcgcccacggcguggccguggccgccgaccugaagagcacccaggaggccgugaacaagaucaccaagaaccugaacagccugagcgagcuggaggugaagaaccugcagagacugagcggcgccauggacgagcugcacaacgagauccuggagcuggacgagaagguggacgaccugagagccgacaccaucagcagccagaucgagcuggccgugcugcugagcaacgagggcaucaucaacagcgaggacgagcaccugcuggcccuggagagaaagcugaagaagaugcugggccccagcgccguggagaucggcaacggcugcuucgagaccaagcacaagugcaaccagaccugccuggacagaaucgccgccggcaccuucgacgccggcgaguucagccugcccaccuucgacagccugaacaucaccgccgccagccugaacgacgacggccuggacaaccacaccauccugcuguacuacagcaccgccgccagcagccuggccgugacccugaugaucgccaucuucgugguguacauggugagcagagacaacgugagcugcagcaucugccuguga

SEQ ID NO: 187232 - RNA, 1758 nt, Artificial Sequence; identical to SEQ ID NO: 186698
  derived and/or modified CDS sequence (opt4) from hemagglutinin__InfluenzaB__AGX17840

SEQ ID NO: 187233 - RNA, 1758 nt, Artificial Sequence; identical to SEQ ID NO: 187041
  derived and/or modified CDS sequence (opt4) from hemagglutinin__InfluenzaB__AGX17851

SEQ ID NO: 187234 - RNA, 1758 nt, Artificial Sequence
  derived and/or modified CDS sequence (opt4) from hemagglutinin__InfluenzaB__AGX17862
augaaggccaucaucgugcugcugaugguggugaccagcaacgccgacagaaucugcaccggcaucaccagcagcaacagcccccacguggugaagaccgccacccagggcgaggugaacgugaccggcgugaucccccugaccaccacccccaccaagagccacuucgccaaccugaagggcaccaagaccagaggcaagcugugccccaagugccugaacugcaccgaccuggacguggcccugggcagacccaagugcaccggcaacauccccagcgccgaggugagcauccugcacgaggugagacccgugaccagcggcugcuuccccaucaugcacgacagaaccaagaucagacagcugcccaaccugcugagaggcuacgagcacaucagacugagcacccacaacgugaucaacgccgagaaggcccccggcggccccuacaagaucggcaccagcggcagcugccccaacgugaccaacggcaacggcuucuucgccaccauggccugggccgugcccaagaacgacaacaacaagaccgccaccaacagccugaccaucgaggugcccuacaucugcaccgagggcgaggaccagaucaccaucuggggcuuccacagcgacaacgagacccagauggccaagcuguacggcgacagcaagccccagaaguucaccagcagcgccaacggcgugaccacccacuacgugagccagaucggcggcuuccccaaccagaccgaggacggcggccugccccagagcggcagaaucgugguggacuacauggugcagaagagcggcaagaccggcaccaucaccuaccagagaggcauccugcugccccagaagguguggugcgccagcggcagaagcaaggugaucaagggcacccugccccugaucggcgaggccgacugccugcacgagaaguacggcggccugaacaagagcaagcccuacuacaccggcgagcacgccaaggccaucggcaacugccccaucugggugaagaccccccugaagcuggccaacggcaccaaguacagaccccccgccaagcugcugaaggagagaggcuucuucggcgccaucgccggcuuccuggagggcggcugggagggcaugaucgccggcuggcacggcuacaccagccacggcgcccacggcguggccguggccgccgaccugaagagcacccaggaggccaucaacaagaucaccaagaaccugaacagccugagcgagcuggaggugaagaaccugcagagacugagcggcgccauggacgagcugcacaacgagauccuggagcuggacgagaagguggacgaccugagagccgacaccaucagcagccagaucgagcuggccgugcugcugagcaacgagggcaucaucaacagcgaggacgagcaccugcuggcccuggagagaaagcugaagaagaugcugggccccagcgccguggagaucggcaacggcugcuucgagaccaagcacaagugcaaccagaccugccuggacagaaucgccgccggcaccuucgacgccggcgaguucagccugcccaccuucgacagccugaacaucaccgccgccagccugaacgacgacggccuggacaaccacaccauccugcuguacuacagcaccgccgccagcagccuggccgugacccugaugaucgccaucuucgugguguacauggugagcagagacaacgugagcugcagcaucugccuguga

SEQ ID NO: 187235 - RNA, 1758 nt, Artificial Sequence
  derived and/or modified CDS sequence (opt4) from hemagglutinin__InfluenzaB__AGX17873
augaaggccaucaucgugcugcugaugguggugaccagcaacgccgacagaaucugcaccggcaucaccagcagcaacagcccccacguggugaagaccgccacccagggcgaggugaacgugaccggcgugaucccccugaccaccacccccaccaagagccacuucgccaaccugaagggcaccgagaccagaggcaagcugugccccaagugccuggacugcaccgaccuggacguggcccugggcagacccaagugcaccggcaacauccccagcgccagagugagcauccugcacgaggugagacccgugaccagcggcugcuuccccaucaugcacgacagaaccaagaucagacagcugcccaaccugcugagaggcuacgagcacaucagacugagcacccacaacgugaucaacgccgagaacgcccccggcggccccuacaagaucggcaccagcggcagcugccccaacgugaccaacggcaacggcuucuucgccaccauggccugggccgugcccaagaacgacaacaacaagaccgccaccaacagccugaccaucgaggugcccuacaucugcaccgagggcgaggaccagaucaccguguggggcuuccacagcgacaacgagacccagauggccaagcuguacggcgacagcaagccccagaaguucaccagcagcgccaacggcgugaccacccacuacgugagccagaucggcggcuuccccaaccagaccgaggacggcggccugccccagagcggcagaaucgugguggacuacauggugcagaagagcggcaagaccggcaccaucaccuaccagagaggcauccugcugccccagaagguguggugcgccagcggcagaagcaaggugaucaagggcagccugccccugaucggcgaggccgacugccugcacgagaaguacggcggccugaacaagagcaagcccuacuacaccggcgagcacgccaaggccaucggcaacugccccaucugggugaagaccccccugaagcuggccaacggcaccaaguacagaccccccgccaagcugcugaaggagagaggcuucuucggcgccaucgccggcuuccuggagggcggcugggagggcaugaucgccggcuggcacggcuacaccagccacggcgcccacggcguggccguggccgccgaccugaagagcacccaggaggccaucaacaagaucaccaagaaccugaacagccugagcgagcuggaggugaagaaccugcagagacugagcggcgccauggacgagcugcacaacgagauccuggagcuggacgagaagguggacgaccugagagccgacaccaucagcagccagaucgagcuggccgugcugcugagcaacgagggcaucaucaacagcgaggacgagcaccugcuggcccuggagagaaagcugaagaagaugcugggccccagcgccguggagaucggcaacggcugcuucgagaccaagcacaagugcaaccagaccugccuggacagaaucgccgccggcaccuucgacgccggcgaguucagccugcccaccuucgacagccugaacaucaccgccgccagccugaacgacgacggccuggacaaccacaccauccugcuguacuacagcaccgccgccagcagccuggccgugacccugaugaucgccaucuucgugguguacauggugagcagagacaacgugagcugcagcaucugccuguga

SEQ ID NO: 187236 - RNA, 1758 nt, Artificial Sequence; identical to SEQ ID NO: 186698
  derived and/or modified CDS sequence (opt4) from hemagglutinin__InfluenzaB__AGX17884

SEQ ID NO: 187237 - RNA, 1758 nt, Artificial Sequence
  derived and/or modified CDS sequence (opt4) from hemagglutinin__InfluenzaB__AGX17895
augaaggccaucaucgugcugcugaugguggugaccagcaacgccgacagaaucugcaccggcaucaccagcagcaacagcccccacguggugaagaccgccacccagggcgaggugaacgugaccggcgugaucccccugaccaccacccccaccaagagccacuucgccaaccugaagggcaccgagaccagaggcaagcugugccccaagugccugaacugcaccgaccuggacguggcccugggcagacccaagugcaccggcaacauccccagcgccagagugagcauccugcacgaggugagacccgugaccagcggcugcuuccccaucaugcacgacagaaccaagaucagacagcugcccaaccugcugagaggcuacgagcacaucagacugagcacccacaacgugaucaacgccgagaacgcccccggcggccccuacaagaucggcaccagcggcagcugccccaacgugaccaacggcaacggcuucuucgccaccauggccugggccgugcccaagaacgacaacaacaagaccgccaccaacagccugaccaucgaggugcccuacaucugcaccgagggcgaggaccagaucaccguguggggcuuccacagcgacaacgagaaccagauggccaagcuguacggcgacagcaagccccagaaguucaccagcagcgccaacggcgugaccacccacuacgugagccagaucggcggcuuccccaaccagaccgaggacggcggccugccccagagcggcagaaucgugguggacuacauggugcagaagagcggcaagaccggcaccaucaccuaccagagaggcauccugcugccccagaagguguggugcgccagcggcagaagcaaggugaucaagggcagccugccccugaucggcgaggccgacugccugcacgagaaguacggcggccugaacaagagcaagcccuacuacaccggcgagcacgccaaggccaucggcaacugccccaucugggugaagaccccccugaagcuggccaacggcaccaaguacagaccccccgccaagcugcugaaggagagaggcuucuucggcgccaucgccggcuuccuggagggcggcugggagggcaugaucgccggcuggcacggcuacaccagccacggcgcccacggcguggccguggccgccgaccugaagagcacccaggaggccaucaacaagaucaccaagaaccugaacagccugagcgagcuggaggugaagaaccugcagagacugagcggcgccauggacgagcugcacaacgagauccuggagcuggacgagaagguggacgaccugagagccgacaccaucagcagccagaucgagcuggccgugcugcugagcaacgagggcaucaucaacagcgaggacgagcaccugcuggcccuggagagaaagcugaagaagaugcugggccccagcgccguggagaucggcaacggcugcuucgagaccaagcacaagugcaaccagaccugccuggacagaaucgccgccggcaccuucgacgccggcgaguucagccugcccaccuucgacagccugaacaucaccgccgccagccugaacgacgacggccuggacaaccacaccauccugcuguacuacagcaccgccgccagcagccuggccgugacccugaugaucgccaucuucgugguguacauggugagcagagacaacgugagcugcagcaucugccuguga

SEQ ID NO: 187238 - RNA, 1758 nt, Artificial Sequence; identical to SEQ ID NO: 186698
  derived and/or modified CDS sequence (opt4) from hemagglutinin__InfluenzaB__AGX17906

SEQ ID NO: 187239 - RNA, 1758 nt, Artificial Sequence; identical to SEQ ID NO: 186698
  derived and/or modified CDS sequence (opt4) from hemagglutinin__InfluenzaB__AGX17917

SEQ ID NO: 187240 - RNA, 1758 nt, Artificial Sequence
  derived and/or modified CDS sequence (opt4) from hemagglutinin__InfluenzaB__AGX17928
augaagaccaucaucgugcugcugaugguggugaccagcaacgccgacagaaucugcaccggcaucaccagcagcaacagcccccacguggugaagaccgccacccagggcgaggugaacgugaccggcgugaucccccugaccaccacccccaccaagagccacuucgccaaccugaagggcaccaagaccagaggcaagcugugccccaagugccugaacugcaccgaccuggacguggcccugggcagacccaagugcaccggcaacauccccagcgccgaggugagcauccugcacgaggugagacccgugaccagcggcugcuuccccaucaugcacgacagaaccaagaucagacagcugcccaaccugcugagaggcuacgagcacaucagacugagcacccacaacgugaucaacgccgagaaggcccccggcggccccuacaagaucggcaccagcggcagcugccccaacgugaccaacggcaacggcuucuucgccaccauggccugggccgugcccaagaacgacaacaacaagaccgccaccaacagccugaccaucgaggugcccuacaucugcaccgagggcgaggaccagaucaccaucuggggcuuccacagcgacaacgagacccagauggccaagcuguacggcgacagcaagccccagaaguucaccagcagcgccaacggcgugaccacccacuacgugagccagaucggcggcuuccccaaccagaccgaggacggcggccugccccagagcggcagaaucgugguggacuacauggugcagaagagcggcaagaccggcaccaucaccuaccagagaggcauccugcugccccagaagguguggugcgccagcggcagaagcaaggugaucaagggcacccugccccugaucggcgaggccgacugccugcacgagaaguacggcggccugaacaagagcaagcccuacuacaccggcgagcacgccaaggccaucggcaacugccccaucugggugaagaccccccugaagcuggccaacggcaccaaguacagaccccccgccaagcugcugaaggagagaggcuucuucggcgccaucgccggcuuccuggagggcggcugggagggcaugaucgccggcuggcacggcuacaccagccacggcgcccacggcguggccguggccgccgaccugaagagcacccaggaggccaucaacaagaucaccaagaaccugaacagccugagcgagcuggaggugaagaaccugcagagacugagcggcgccauggacgagcugcacaacgagauccuggagcuggacgagaagguggacgaccugagagccgacaccaucagcagccagaucgagcuggccgugcugcugagcaacgagggcaucaucaacagcgaggacgagcaccugcuggcccuggagagaaagcugaagaagaugcugggccccagcgccguggagaucggcaacggcugcuucgagaccaagcacaagugcaaccagaccugccuggacagaaucgccgccggcaccuucgacgccggcgaguucagccugcccaccuucgacagccugaacaucaccgccgccagccugaacgacgacggccuggacaaccacaccauccugcuguacuacagcaccgccgccagcagccuggccgugacccugaugaucgccaucuucgugguguacauggugagcagagacaacgugagcugcagcaucugccuguga

SEQ ID NO: 187241 - RNA, 1758 nt, Artificial Sequence; identical to SEQ ID NO: 186574
  derived and/or modified CDS sequence (opt4) from hemagglutinin__InfluenzaB__AGX17939

SEQ ID NO: 187242 - RNA, 1758 nt, Artificial Sequence; identical to SEQ ID NO: 186574
  derived and/or modified CDS sequence (opt4) from hemagglutinin__InfluenzaB__AGX17950

SEQ ID NO: 187243 - RNA, 1758 nt, Artificial Sequence; identical to SEQ ID NO: 186574
  derived and/or modified CDS sequence (opt4) from hemagglutinin__InfluenzaB__AGX17961

SEQ ID NO: 187244 - RNA, 1758 nt, Artificial Sequence; identical to SEQ ID NO: 187041
  derived and/or modified CDS sequence (opt4) from hemagglutinin__InfluenzaB__AGX17972

SEQ ID NO: 187245 - RNA, 1758 nt, Artificial Sequence; identical to SEQ ID NO: 186574
  derived and/or modified CDS sequence (opt4) from hemagglutinin__InfluenzaB__AGX17983

SEQ ID NO: 187246 - RNA, 1758 nt, Artificial Sequence; identical to SEQ ID NO: 186698
  derived and/or modified CDS sequence (opt4) from hemagglutinin__InfluenzaB__AGX17994

SEQ ID NO: 187247 - RNA, 1758 nt, Artificial Sequence
  derived and/or modified CDS sequence (opt4) from hemagglutinin__InfluenzaB__AGX18005
augaaggccaucaucgugcugcugaugguggugaccagcaacgccgacagaaucugcaccggcaucaccagcagcaacagcccccacguggugaagaccgccacccagggcgaggugaacgugaccggcgugaucccccugaccaccacccccaccaagagccacuucgccaaccugaagggcaccgagaccagaggcaagcugugccccaagugccugaacugcaccgaccuggacguggcccugggcagacccaagugcaccggcaacauccccagcgccagagugagcauccugcacgaggugagacccgugaccagcggcugcuuccccaucaugcacgacagaaccaagaucagacagcugcccaaccugcugagaggcuacgagcacaucagacugagcacccacaacgugaucaacgccgagaacgcccccggcggccccuacaagaucggcaccagcggcagcugccccaacgugaccaacggcaacggcuucuucgccaccauggccugggccgugcccaagaacgacaacaacaagaccgccaccaacagccugaccaucgaggugcccuacaucugcaccgagggcgaggaccagaucaccguguggggcuuccacagcgacaacgagacccagauggccaagcuguacggcgacagcaagccccagaaguucaccagcagcgccaacggcgugaccacccacuacgugagccagaucggcggcuuccccaaccagaccgaggacggcggccugccccagagcggcagaaucgugguggacuacauggugcagaagagcggcaagaccggcaccaucaccuaccagagaggcauccugcugccccagaagguguggugcgccagcggcagaagcaaggugaucaagggcagccugccccugaucggcgaggccgacugccugcacgagaaguacggcggccugaacaagagcaagcccuacuacaccggcgagcacgccaaggccaucggcaacugccccaucugggugaagaccccccugaagcuggccaacggcaccaaguacagaccccccgccaagcugcugaaggagagaggcuucuucggcgccaucgccggcuuccuggagggcggcugggagggcaugaucgccggcuggcacggcuacaccagccacggcgcccacggcguggccguggccgccgacaucaagagcacccaggaggccaucaacaagaucaccaagaaccugaacagccugagcgagcuggaggugaagaaccugcagagacugagcggcgccauggacgagcugcacaacgagauccuggagcuggacgagaagguggacgaccugagagccgacaccaucagcagccagaucgagcuggccgugcugcugagcaacgagggcaucaucaacagcgaggacgagcaccugcuggcccuggagagaaagcugaagaagaugcugggccccagcgccguggagaucggcaacggcugcuucgagaccaagcacaagugcaaccagaccugccuggacagaaucgccgccggcaccuucgacgccggcgaguucagccugcccaccuucgacagccugaacaucaccgccgccagccugaacgacgacggccuggacaaccacaccauccugcuguacuacagcaccgccgccagcagccuggccgugacccugaugaucgccaucuucgugguguacauggugagcagagacaacgugagcugcagcaucugccuguga

SEQ ID NO: 187248 - RNA, 1758 nt, Artificial Sequence
  derived and/or modified CDS sequence (opt4) from hemagglutinin__InfluenzaB__AGX18016
augaaggccaucaucgugcugcugaugguggugaccagcaacgccgacagaaucugcaccggcaucaccagcagcaacagcccccacguggugaagaccgccacccagggcgaggugaacgugaccggcgugaucccccugaccaccacccccaccaagagccacuucgccaaccugaagggcaccgagaccagaggcaagcugugccccaagugccugaacugcaccgaccuggacguggcccugggcagacccaagugcaccggcaacauccccagcgccagagugagcauccugcacgaggugagacccgugaccagcggcugcuuccccaucaugcacgacagaaccaagaucagacagcugcccaaccugcugagaggcuacgagcacaucagacugagcacccacaacgugaucaacgccgagaacgcccccggcggccccuacaagaucggcaccagcggcagcugccccaacgugaccaacggcaacggcuucuucgccaccauggccugggccgugcccaagaacgacaacaacaagaccgccaccaacagccugaccaucgaggugcccuacaucugcaucgagggcgaggaccagaucaccguguggggcuuccacagcgacaacgagacccagauggccaagcuguacggcgacagcaagccccagaaguucaccagcagcgccaacggcgugaccacccacuacgugagccagaucggcggcuuccccaaccagaccgaggacggcggccugccccagagcggcagaaucgugguggacuacauggugcagaagagcggcaagaccggcaccaucaccuaccagagaggcauccugcugccccagaagguguggugcgccagcggcagaagcaaggugaucaagggcagccugccccugaucggcgaggccgacugccugcacgagaaguacggcggccugaacaagagcaagcccuacuacaccggcgagcacgccaaggccaucggcaacugccccaucugggugaagaccccccugaagcuggccaacggcaccaaguacagaccccccgccaagcugcugaaggagagaggcuucuucggcgccaucgccggcuuccuggagggcggcugggagggcaugaucgccggcuggcacggcuacaccagccacggcgcccacggcguggccguggccgccgaccugaagagcacccaggaggccaucaacaagaucaccaagaaccugaacagccugagcgagcuggaggugaagaaccugcagagacugagcggcgccauggacgagcugcacaacgagauccuggagcuggacgagaagguggacgaccugagagccgacaccaucagcagccagaucgagcuggccgugcugcugagcaacgagggcaucaucaacagcgaggacgagcaccugcuggcccuggagagaaagcugaagaagaugcugggccccagcgccguggagaucggcaacggcugcuucgagaccaagcacaagugcaaccagaccugccuggacagaaucgccgccggcaccuucgacgccggcgaguucagccugcccaccuucgacagccugaacaucaccgccgccagccugaacgacgacggccuggacaaccacaccauccugcuguacuacagcaccgccgccagcagccuggccgugacccugaugaucgccaucuucgugguguacauggugagcagagacaacgugagcugcagcaucugccuguga

SEQ ID NO: 187249 - RNA, 1758 nt, Artificial Sequence; identical to SEQ ID NO: 187212
  derived and/or modified CDS sequence (opt4) from hemagglutinin__InfluenzaB__AGX18027

SEQ ID NO: 187250 - RNA, 1758 nt, Artificial Sequence; identical to SEQ ID NO: 186698
  derived and/or modified CDS sequence (opt4) from hemagglutinin__InfluenzaB__AGX18038

SEQ ID NO: 187251 - RNA, 1758 nt, Artificial Sequence; identical to SEQ ID NO: 186698
  derived and/or modified CDS sequence (opt4) from hemagglutinin__InfluenzaB__AGX18049

SEQ ID NO: 187252 - RNA, 1758 nt, Artificial Sequence; identical to SEQ ID NO: 186698
  derived and/or modified CDS sequence (opt4) from hemagglutinin__InfluenzaB__AGX18060

SEQ ID NO: 187253 - RNA, 1758 nt, Artificial Sequence; identical to SEQ ID NO: 186574
  derived and/or modified CDS sequence (opt4) from hemagglutinin__InfluenzaB__AGX18071

SEQ ID NO: 187254 - RNA, 1758 nt, Artificial Sequence; identical to SEQ ID NO: 187234
  derived and/or modified CDS sequence (opt4) from hemagglutinin__InfluenzaB__AGX18082

SEQ ID NO: 187255 - RNA, 1758 nt, Artificial Sequence; identical to SEQ ID NO: 187234
  derived and/or modified CDS sequence (opt4) from hemagglutinin__InfluenzaB__AGX18093

SEQ ID NO: 187256 - RNA, 1758 nt, Artificial Sequence; identical to SEQ ID NO: 187041
  derived and/or modified CDS sequence (opt4) from hemagglutinin__InfluenzaB__AGX18104

SEQ ID NO: 187257 - RNA, 1758 nt, Artificial Sequence; identical to SEQ ID NO: 186698
  derived and/or modified CDS sequence (opt4) from hemagglutinin__InfluenzaB__AGX18115

SEQ ID NO: 187258 - RNA, 1758 nt, Artificial Sequence; identical to SEQ ID NO: 186698
  derived and/or modified CDS sequence (opt4) from hemagglutinin__InfluenzaB__AGX18126

SEQ ID NO: 187259 - RNA, 1758 nt, Artificial Sequence; identical to SEQ ID NO: 186574
  derived and/or modified CDS sequence (opt4) from hemagglutinin__InfluenzaB__AGX18137

SEQ ID NO: 187260 - RNA, 1758 nt, Artificial Sequence; identical to SEQ ID NO: 187234
  derived and/or modified CDS sequence (opt4) from hemagglutinin__InfluenzaB__AGX18148

SEQ ID NO: 187261 - RNA, 1758 nt, Artificial Sequence; identical to SEQ ID NO: 186574
  derived and/or modified CDS sequence (opt4) from hemagglutinin__InfluenzaB__AGX18159

SEQ ID NO: 187262 - RNA, 1758 nt, Artificial Sequence; identical to SEQ ID NO: 186574
  derived and/or modified CDS sequence (opt4) from hemagglutinin__InfluenzaB__AGX18170

SEQ ID NO: 187263 - RNA, 1758 nt, Artificial Sequence; identical to SEQ ID NO: 187234
  derived and/or modified CDS sequence (opt4) from hemagglutinin__InfluenzaB__AGX18181

SEQ ID NO: 187264 - RNA, 1758 nt, Artificial Sequence
  derived and/or modified CDS sequence (opt4) from hemagglutinin__InfluenzaB__AGX18192
augaaggccaucaucgugcugcugaugguggugaccagcaacgccgacagaaucugcaccggcaucaccagcagcaacagcccccacguggugaagaccgccacccagggcgaggugaacgugaccggcgugaucccccugaccaccacccccaccaagagccacuucgccaaccugaagggcaccaagaccagaggcaagcugugccccaagugccugaacugcaccgaccuggacguggcccugggcagacccaagugcaccggcaacauccccagcgccgaggugagcauccugcacgaggugagacccgugaccagcggcugcuuccccaucaugcacgacagaaccaagaucagacagcugcccaaccugcugagaggcuacgagcacaucagacugagcacccacaacgugaucaacgccgagaaggcccccggcggccccuacaagaucggcaccagcggcagcugccccaacgugaccaacggcaacggcuucuucgccaccauggccugggccgugcccaagaacgacaacaacaagaccgccaccaacagccugaccaucgaggugcccuacaucugcaccgagggcgaggaccagaucaccaucuggggcuuccacagcgacaacgagacccagauggccaagcuguacggcgacagcaagccccagaaguucaccagcagcaccaacggcgugaccacccacuacgugagccagaucggcggcuuccccaaccagaccgaggacggcggccugccccagagcggcagaaucgugguggacuacauggugcagaagcccggcaagaccggcaccaucaccuaccagagaggcauccugcugccccagaagguguggugcgccagcggcagaagcaaggugaucaagggcagccugccccugaucggcgaggccgacugccugcacgagaaguacggcggccugaacaagagcaagcccuacuacaccggcgagcacgccaaggccaucggcaacugccccaucugggugaagaccccccugaagcuggccaacggcaccaaguacagaccccccgccaagcugcugaaggagagaggcuucuucggcgccaucgccggcuuccuggagggcggcugggagggcaugaucgccggcuggcacggcuacaccagccacggcgcccacggcguggccguggccgccgaccugaagagcacccaggaggccaucaacaagaucaccaagaaccugaacagccugagcgagcuggaggugaagaaccugcagagacugagcagcgccauggacgagcugcacaacgagauccuggagcuggacgagaagguggacgaccugagagccgacaccaucagcagccagaucgagcuggccgugcugcugagcaacgagggcaucaucaacagcgaggacgagcaccugcuggcccuggagagaaagcugaagaagaugcugggccccagcgccguggagaucggcaacggcugcuucgagaccaagcacaagugcaaccagaccugccuggacagaaucgccgccggcaccuucgacgccggcgaguucagccugcccaccuucgacagccugaacaucaccgccgccagccugaacgacgacggccuggacaaccacaccauccugcuguacuacagcaccgccgccagcagccuggccgugacccugaugaucgccaucuucgugguguacauggugagcagagacaacgugagcugcagcaucugccuguga

SEQ ID NO: 187265 - RNA, 1758 nt, Artificial Sequence; identical to SEQ ID NO: 187212
  derived and/or modified CDS sequence (opt4) from hemagglutinin__InfluenzaB__AGX18203

SEQ ID NO: 187266 - RNA, 1758 nt, Artificial Sequence
  derived and/or modified CDS sequence (opt4) from hemagglutinin__InfluenzaB__AGX18214
augaaggccaucaucgugcugcugaugguggugaccagcaacgccgacagaaucugcaccggcaucaccagcagcaacagcccccacguggugaagaccgccacccagggcgaggugaacgugaccggcgugaucccccugaccaccacccccaccaagagccacuucgccaaccugaagggcaccaagaccagaggcaagcugugccccaagugccugaacugcaccgaccuggacguggcccugggcagacccaagugcaccggcaacauccccagcgccgaggugagcauccugcacgaggugagacccgugaccagcggcugcuuccccaucaugcacgacagaaccaagaucagacagcugcccaaccugcugagaggcuacgagcacaucagacugagcacccacaacgugaucaacgccgagaaggcccccggcggccccuacaagaccggcaccagcggcagcugccccaacgugaccaacggcaacggcuucuucgccaccauggccugggccgugcccaagaacgacaacaacaagaccgccaccaacagccugaccaucgaggugcccuacaucugcaccgagggcgaggaccagaucaccaucuggggcuuccacagcgacaacgagacccagauggccaagcuguacggcgacagcaagccccagaaguucaccagcagcgccaacggcgugaccacccacuacgugagccagaucggcggcuuccccaaccagaccgaggacggcggccugccccagagcggcagaaucgugguggacuacauggugcagaagagcggcaagaccggcaccaucaccuaccagagaggcauccugcugccccagaagguguggugcgccagcggcagaagcaaggugaucaagggcagccugccccugaucggcgaggccgacugccugcacgagaaguacggcggccugaacaagagcaagcccuacuacaccggcgagcacgccaaggccaucggcaacugccccaucugggugaagaccccccugaagcuggccaacggcaccaaguacagaccccccgccaagcugcugaaggagagaggcuucuucggcgccaucgccggcuuccuggagggcggcugggagggcaugaucgccggcuggcacggcuacaccagccacggcgcccacggcguggccguggccgccgaccugaagagcacccaggaggccaucaacaagaucaccaagaaccugaacagccugagcgagcuggaggugaagaaccugcagagacugagcggcgccauggacgagcugcacaacgagauccuggagcuggacgagaagguggacgaccugagagccgacaccaucagcagccagaucgagcuggccgugcugcugagcaacgagggcaucaucaacagcgaggacgagcaccugcuggcccuggagagaaagcugaagaagaugcugggccccagcgccguggagaucggcaacggcugcuucgagaccaagcacaagugcaaccagaccugccuggacagaaucgccgccggcaccuucgacgccggcgaguucagccugcccaccuucgacagccugaacaucaccgccgccagccugaacgacgacggccuggacaaccacaucauccugcuguacuacagcaccgccgccagcagccuggccgugacccugaugaucgccaucuucgugguguacauggugagcagagacaacgugagcugcagcaucugccuguga

SEQ ID NO: 187267 - RNA, 1758 nt, Artificial Sequence
  derived and/or modified CDS sequence (opt4) from hemagglutinin__InfluenzaB__AGX18225
augaaggccaucaucgugcugcugaugguggugaccagcaacgccgacagaaucugcaccggcaucaccagcagcaacagcccccacguggugaagaccgccacccagggcgaggugaacgugaccggcgugaucccccugaccaccacccccaccaagagccacuucgccaaccugaagggcaccaagaccagaggcaagcugugccccaagugccugaacugcaccgaccuggacguggcccugggcagacccaagugcaccggcaacauccccagcgccgaggugagcauccugcacgaggugagacccgugaccagcggcugcuuccccaucaugcacgacagaaccaagaucagacagcugcccaaccugcugagaggcuacgagcacaucagacugagcacccacaacgugaucaacgccgagaaggcccccggcggccccuacaagaucggcaccagcggcagcugccccaacgugaccaacggcaacggcuucuucgccaccauggccugggccgugcccaagaacgacaacaacaagaccgccaccaacagccugaccaucgaggugcccuacaucugcaccgagggcgaggaccagaucaccaucuggggcuuccacagcgacaacgagacccagauggccaagcuguacggcgacagcaagccccagaaguucaccagcagcgccaacggcgugaccacccacuacgugagccagaucggcggcuuccccaaccagaccgaggacggcggccugccccagagcggcagaaucgugguggacuacauggugcagaagagcggcaagaccggcaccaucaccuaccagagaggcauccugcugccccagaagguguggugcgccagcggcagaagcaaggugaucaagggcagccugccccugaucggcgaggccgacugccugcacgagaaguacggcggccugaacaagagcaagcccuacuacaccggcgagcacgccaaggccaucggcaacugccccaucugggugaagaccccccugaagcuggccaacggcaccaaguacagaccccccgccaagcugcugaaggagagaggcuucuucggcgccaucgccggcuuccuggagggcggcugggagggcaugaucgccggcuggcacggcuacaccagccacggcgcccacggcguggccguggccgccgaccugaagagcacccaggaggccaucaacagaaucaccaagaaccugaacagccugagcgagcuggaggugaagaaccugcagagacugagcggcgccauggacgagcugcacaacgagauccuggagcuggacgagaagguggacgaccugagagccgacaccaucagcagccagaucgagcuggccgugcugcugagcaacgagggcaucaucaacagcgaggacgagcaccugcuggcccuggagagaaagcugaagaagaugcugggccccagcgccguggagaucggcaacggcugcuucgagaccaagcacaagugcaaccagaccugccuggacagaaucgccgccggcaccuucgacgccggcgaguucagccugcccaccuucgacagccugaacaucaccgccgccagccugaacgacgacggccuggacaaccacaccauccugcuguacuacagcaccgccgccagcagccuggccgugacccugaugaucgccaucuucgugguguacauggugagcagagacaacgugagcugcagcaucugccuguga

SEQ ID NO: 187268 - RNA, 1758 nt, Artificial Sequence
  derived and/or modified CDS sequence (opt4) from hemagglutinin__InfluenzaB__AGX18236
augaaggccaucaucgugcugcugaugguggugaccagcaacgccgacagaaucugcaccggcaucaccagcagcaacagcccccacguggugaagaccgccacccagggcgaggugaacgugaccggcgugaucccccugaccaccacccccaccaagagccacuucgccaaccugaagggcaccaagaccagaggcaagcugugccccaagugccugaacugcaccgaccuggacguggcccugggcagacccaagugcaccggcaacauccccagcgccgaggugagcauccugcacgaggugagacccgugaccagcggcugcuuccccaucaugcacgacagaaccaagaucagacagcugcccaaccugcugagaggcuacgagcacaucagacugagcacccacaacgugaucaacgccgagaaggcccccggcggccccuacaagaucggcaccagcggcagcugccccaacgugaccaacggcaacggcuucuucgccaccauggccugggccgugcccaagaacgacaacaacaagaccgccaccaacagccugaccaucgaggugcccuacaucugcaccgagggcgaggaccagaucaccaucuggggcuuccacagcgacaacgagacccagauggccaagcuguacggcgacagcaagccccagaaguucaccagcagcgccaacggcgugaccacccacuacgugagccagaucggcggcuuccccaaccagaccgaggacggcggccugccccagagcggcagaaucgugguggacuacaugaugcagaagagcggcaagaccggcaccaucaccuaccagagaggcauccugcugccccagaagguguggugcgccagcggcagaagcaaggugaucaagggcagccugccccugaucggcgaggccgacugccugcacgagaaguacggcggccugaacaagagcaagcccuacuacaccggcgagcacgccaaggccaucggcaacugccccaucugggugaagaccccccugaagcuggccaacggcaccaaguacagaccccccgccaagcugcugaaggagagaggcuucuucggcgccaucgccggcuuccuggagggcggcugggagggcaugaucgccggcuggcacggcuacaccagccacggcgcccacggcguggccguggccgccgaccugaagagcacccaggaggccaucaacaagaucaccaagaaccugaacagccugagcgagcuggaggugaagaaccugcagagacugagcggcgccauggacgagcugcacaacgagauccuggagcuggacgagaagguggacgaccugagagccgacaccaucagcagccagaucgagcuggccgugcugcugagcaacgagggcaucaucaacagcgaggacgagcaccugcuggcccuggagagaaagcugaagaagaugcugggccccagcgccguggagaucggcaacggcugcuucgagaccaagcacaagugcaaccagaccugccuggacagaaucgccgccggcaccuucgacgccggcgaguucagccugcccaccuucgacagccugaacaucaccgccgccagccugaacgacgacggccuggacaaccacaccauccugcuguacuacagcaccgccgccagcagccuggccgugacccugaugaucgccaucuucgugguguacauggugagcagagacaacgugagcugcagcaucugccuguga

SEQ ID NO: 187269 - RNA, 1758 nt, Artificial Sequence; identical to SEQ ID NO: 186625
  derived and/or modified CDS sequence (opt4) from hemagglutinin__InfluenzaB__AGX18247

SEQ ID NO: 187270 - RNA, 1758 nt, Artificial Sequence
  derived and/or modified CDS sequence (opt4) from hemagglutinin__InfluenzaB__AGX18258
augaaggccaucaucgugcugcugaugguggugaccagcaacgccgacagaaucugcaccggcaucaccagcagcaacagcccccacguggugaagaccgccacccagggcgaggugaacgugaccggcgugaucccccugaccaccacccccaccaagagccacuucgccaaccugaagggcaccaagaccagaggcaagcugugccccaagugccugaacugcaccgaccuggacguggcccugggcagacccaagugcaccggcaacauccccagcgccgaggugagcauccugcacgaggugagacccgugaccagcggcugcuuccccaucaugcacgacagaaccaagaucagacagcugcccaaccugcugagaggcuacgagcacaucagacugagcacccacaacgugaucaacgccgagaaggcccccggcggccccuacaagaucggcaccagcggcagcugccccaacgugaccaacggcaacggcuucuucgccaccauggccugggccgugcccaagaacgacaagaacaagaccgccaccaacagccugaccaucgaggugcccuacaucugcaccgagggcgaggaccagaucaccaucuggggcuuccacagcgacaacgagacccagauggccaagcuguacggcgacagcaagccccagaaguucaccagcagcgccaacggcgugaccacccacuacgugagccagaucggcggcuuccccaaccagaccgaggacggcggccugccccagagcggcagaaucgugguggacuacauggugcagaagagcggcaagaccggcaccaucaccuaccagagaggcauccugcugccccagaagguguggugcgccagcggcagaagcaaggugaucaagggcacccugccccugaucggcgaggccgacugccugcacgagaaguacggcggccugaacaagagcaagcccuacuacaccggcgagcacgccaaggccaucggcaacugccccaucugggugaagaccccccugaagcuggccaacggcaccaaguacagaccccccgccaagcugcugaaggagagaggcuucuucggcgccaucgccggcuuccuggagggcggcugggagggcaugaucgccggcuggcacggcuacaccagccacggcgcccacggcguggccguggccgccgaccugaagagcacccaggaggccaucaacaagaucaccaagaaccugaacagccugagcgagcuggaggugaagaaccugcagagacugagcggcgccauggacgagcugcacaacgagauccuggagcuggacgagaagguggacgaccugagagccgacaccaucagcagccagaucgagcuggccgugcugcugagcaacgagggcaucaucaacagcgaggacgagcaccugcuggcccuggagagaaagcugaagaagaugcugggccccagcgccguggagaucggcaacggcugcuucgagaccaagcacaagugcaaccagaccugccuggacagaaucgccgccggcaccuucgacgccggcgaguucagccugcccaccuucgacagccugaacaucaccgccgccagccugaacgacgacggccuggacaaccacaccauccugcuguacuacagcaccgccgccagcagccuggccgugacccugaugaucgccaucuucgugguguacauggugagcagagacaacgugagcugcagcaucugccuguga

SEQ ID NO: 187271 - RNA, 1758 nt, Artificial Sequence; identical to SEQ ID NO: 186574
  derived and/or modified CDS sequence (opt4) from hemagglutinin__InfluenzaB__AGX18280

SEQ ID NO: 187272 - RNA, 1758 nt, Artificial Sequence
  derived and/or modified CDS sequence (opt4) from hemagglutinin__InfluenzaB__AGX18291
augaaggccaucaucgugcugcugaugguggugaccagcaacgccgacagaaucugcaccggcaucaccagcagcaacagcccccacguggugaagaccgccacccagggcgaggugaacgugaccggcgugaucccccugaccaccacccccaccaagagccacuucgccaaccugaagggcaccaagaccagaggcaagcugugccccaagugccugaacugcaccgaccuggacguggcccugggcagacccaagugcaccggcaacauccccagcgccgaggugagcauccugcacgaggugagacccgugaccagcggcugcuuccccaucaugcacgacagaaccaagaucagacagcugcccaaccugcugagaggcuacgagcacaucagacugagcacccacaacgugaucaacgccgagaaggcccccggcggccccuacaagaucggcaccagcggcagcugccccaacgugaccaacggcaacggcuucuucgccaccauggccugggccgugcccaagaacgacaacaacaagaccgccaccaacagccugaccaucgaggugcccuacaucugcaccgagggcgaggaccagaucaccaucuggggcuuccacagcgacaacgagacccagauggccaagcuguacggcgacagcaagccccagaaguucaccagcagcgccaacggcgugaccacccacuacgugagccagaucggcggcuuccccaaccagaccgaggacggcggccugccccagagcggcagaaucgugguggacuacauggugcagaagagcggcaagaccggcaccaucaccuaccagagaggcauccugcugccccagaagguguggugcgugagcggcagaagcaaggugaucaagggcagccugccccugaucggcgaggccgacugccugcacgagaaguacggcggccugaacaagagcaagcccuacuacaccggcgagcacgccaaggccaucggcaacugccccaucugggugaagaccccccugaagcuggccaacggcaccaaguacagaccccccgccaagcugcugaaggagagaggcuucuucggcgccaucgccggcuuccuggagggcggcugggagggcaugaucgccggcuggcacggcuacaccagccacggcgcccacggcguggccguggccgccgaccugaagagcacccaggaggccaucaacaagaucaccaagaaccugaacagccugagcgagcuggaggugaagaaccugcagagacugagcggcgccauggacgagcugcacaacgagauccuggagcuggacgagaagguggacgaccugagagccgacaccaucagcagccagaucgagcuggccgugcugcugagcaacgagggcaucaucaacagcgaggacgagcaccugcuggcccuggagagaaagcugaagaagaugcugggccccagcgccguggagaucggcaacggcugcuucgagaccaagcacaagugcaaccagaccugccuggacagaaucgccgccggcaccuucgacgccggcgaguucagccugcccaccuucgacagccugaacaucaccgccgccagccugaacgacgacggccuggacaaccacaccauccugcuguacuacagcaccgccgccagcagccuggccgugacccugaugaucgccaucuucgugguguacauggugagcagagacaacgugagcugcagcaucugccuguga

SEQ ID NO: 187273 - RNA, 1758 nt, Artificial Sequence
  derived and/or modified CDS sequence (opt4) from hemagglutinin__InfluenzaB__AGX18302
augaaggccaucaucgugcugcugaugguggugaccagcaacgccgacagaaucugcaccggcaucaccagcagcaacagcccccacguggugaagaccgccacccagggcgaggugaacgugaccggcgugaucccccugaccaccacccccaccaagagccacuucgccaaccugaagggcaccaagaccagaggcaagcugugccccaagugccugaacugcaccgaccuggacguggcccugggcagacccaagugcaccggcaacauccccagcgccgaggugagcauccugcacgaggugagacccgugaccagcggcugcuuccccaucaugcacgacagaaccaagaucagacagcugcccaaccugcugagaggcuacaagcacaucagacugagcacccacaacgugaucaacgccgagaaggcccccggcggccccuacaagaucggcaccagcggcagcugccccaacgugaccaacggcaacggcuucuucgccaccauggccugggccgugcccaagaacgacaacaacaagaccgccaccaacagccugaccaucgaggugcccuacaucugcaccgagggcgaggaccagaucaccaucuggggcuuccacagcgacaacgagacccagauggccaagcuguacggcgacagcaagccccagaaguucaccagcagcgccaacggcgugaccacccacuacgugagccagaucggcggcuuccccaaccagaccgaggacggcggccugccccagagcggcagaaucgugguggacuacauggugcagaagagcggcaagaccggcaccaucaccuaccagagaggcauccugcugccccagaagguguggugcgccagcggcagaagcaaggugaucaagggcacccugccccugaucggcgaggccgacugccugcacgagaaguacggcggccugaacaagagcaagcccuacuacaccggcgagcacgccaaggccaucggcaacugccccaucugggugaagaccccccugaagcuggccaacggcaccaaguacagaccccccgccaagcugcugaaggagagaggcuucuucggcgccaucgccggcuuccuggagggcggcugggagggcaugaucgccggcuggcacggcuacaccagccacggcgcccacggcguggccguggccgccgaccugaagagcacccaggaggccaucaacaagaucaccaagaaccugaacagccugagcgagcuggaggugaagaaccugcagagacugagcggcgccauggacgagcugcacaacgagauccuggagcuggacgagaagguggacgaccugagagccgacaccaucagcagccagaucgagcuggccgugcugcugagcaacgagggcaucaucaacagcgaggacgagcaccugcuggcccuggagagaaagcugaagaagaugcugggccccagcgccguggagaucggcaacggcugcuucgagaccaagcacaagugcaaccagaccugccuggacagaaucgccgccggcaccuucgacgccggcgaguucagccugcccaccuucgacagccugaacaucaccgccgccagccugaacgacgacggccuggacaaccacaccauccugcuguacuacagcaccgccgccagcagccuggccgugacccugaugaucgccaucuucgugguguacauggugagcagagacaacgugagcugcagcaucugccuguga

SEQ ID NO: 187274 - RNA, 1758 nt, Artificial Sequence; identical to SEQ ID NO: 186574
  derived and/or modified CDS sequence (opt4) from hemagglutinin__InfluenzaB__AGX18313

SEQ ID NO: 187275 - RNA, 1758 nt, Artificial Sequence
  derived and/or modified CDS sequence (opt4) from hemagglutinin__InfluenzaB__AGX18324
augaaggccaucaucgugcugcugaugguggugaccagcaacgccgacagaaucugcaccggcaucaccagcagcaacagcccccacguggugaagaccgccacccagggcgaggugaacgugaccggcgugaucccccugaccaccacccccaccaagagccacuucgccaaccugaagggcaccaagaccagaggcaagcugugccccaagugccugaacugcaccgaccuggacguggcccugggcagacccaagugcaccggcaacauccccagcgccgaggugagcauccugcacgaggugagacccgugaccagcggcugcuuccccaucaugcacgacagaaccaagaucagacagcugcccaaccugcugagaggcuacgagcacaucagacugagcacccacaacgugaucaacgccgagaaggcccccggcggccccuacaagaucggcaccagcggcagcugccccaacgugaccaacggcaacggcuucuucgccaccauggccugggccgugcccaagaacgacaacaacaagaccgccaccaacagccugaccaucgaggugcccuacaucugcaccgagggcgaggaccagaucaccaucuggggcuuccacagcgacaacgaggcccagauggccaagcuguacggcgacagcaagccccagaaguucaccagcagcgccaacggcgugaccacccacuacgugagccagaucggcggcuuccccaaccagaccgaggacggcggccugccccagagcggcagaaucgugguggacuacauggugcagaagagcggcaagaccggcaccaucaccuaccagagaggcauccugcugccccagaagguguggugcgccagcggcagaagcaaggugaucaagggcagccugccccugaucggcgaggccgacugccugcacgagaaguacggcggccugaacaagagcaagcccuacuacaccggcgagcacgccaaggccaucggcaacugccccaucugggugaagaccccccugaagcuggccaacggcaccaaguacagaccccccgccaagcugcugaaggagagaggcuucuucggcgccaucgccggcuuccuggagggcggcugggagggcaugaucgccggcuggcacggcuacaccagccacggcgcccacggcguggccguggccgccgaccugaagagcacccaggaggccaucaacaagaucaccaagaaccugaacagccugagcgagcuggaggugaagaaccugcagagacugagcggcgccauggacgagcugcacaacgagauccuggagcuggacgagaagguggacgaccugagagccgacaccaucagcagccagaucgagcuggccgugcugcugagcaacgagggcaucaucaacagcgaggacgagcaccugcuggcccuggagagaaagcugaagaagaugcugggccccagcgccguggagaucggcaacggcugcuucgagaccaagcacaagugcaaccagaccugccuggacagaaucgccgccggcaccuucgacgccggcgaguucagccugcccaccuucgacagccugaacaucaccgccgccagccugaacgacgacggccuggacaaccacaccauccugcuguacuacagcaccgccgccagcagccuggccgugacccugaugaucgccaucuucgugguguacauggugagcagagacaacgugagcugcagcaucugccuguga

SEQ ID NO: 187276 - RNA, 1758 nt, Artificial Sequence; identical to SEQ ID NO: 187234
  derived and/or modified CDS sequence (opt4) from hemagglutinin__InfluenzaB__AGX18335

SEQ ID NO: 187277 - RNA, 1758 nt, Artificial Sequence
  derived and/or modified CDS sequence (opt4) from hemagglutinin__InfluenzaB__AGX18346
augaaggccaucaucgugcugcugaugguggugaccagcaacgccgacagaaucugcaccggcaucaccagcagcaacagcccccacguggugaagaccgccacccagggcgaggugaacgugaccggcgugaucccccugaccaccacccccaccaagagccacuucgccaaccugaagggcaccaagaccagaggcaagcugugccccaagugccugaacugcaccgaccuggacguggcccugggcagacccaagugcaccggcaacauccccagcgccgaggugagcauccugcacgaggugagacccgugaccagcggcugcuuccccaucaugcacgacagaaccaagaucagacagcugcccaaccugcugagaggcuacgagcacaucagacugagcacccacaacgugaucaacgccgagaaggcccccggcggccccuacaagaucggcaccagcggcagcugccccaacgugaccaacggcaacggcuucuucgccaccauggccugggccgugcccaagaacgacaacaacaagaccgccaccaacagccugaccaucgaggugcccuacaucugcaccgagggcgaggaccagaucaccaucuggggcuuccacagcgacaacgagacccagauggccaagcuguacggcgacagcaagccccagaaguucaccagcagcgccaacggcgugaccacccacuacgugagccagaucggcggcuuccccaaccagaccgaggacggcggccugccccagagcggcagaaucgugguggacuacauggugcagaagagcggcaagaccggcaccaucaccuaccagagaggcauccugcugccccagaagguguggugcgccagcggcagaagcaaggugaucaagggcagccugccccugaucggcgaggccgacugccugcacgagaaguacggcggccugaacaagagcaagcccuacuacaccggcgagcacgccaaggccaucggcaacugccccaucugggugaagaccccccugaagcuggccaacggcaccaaguacagaccccccgccaagcugcugaaggagagaggcuucuucggcgccaucgccggcuuccuggagggcggcugggagggcaugaucgccggcuggcacggcuacaccagccacggcgcccacggcguggccguggccgccgaccugaagagcacccaggaggccaucaacaagaucaccaagaaccugaacagccugagcgagcuggaggugaagaaccugcagagacugagcggcgccauggacgagcugcacaacgagauccuggagcuggacgagaagguggacgaccugagagccgacaccaucagcagccagaucgagcuggccgugcugcugagcaacgagggcaucaucaacagcgaggacgagcaccugcuggcccuggagagaaagcugaagaagaugcugggccccagcgccguggagaucggcaacggcugcuucgagaccaagcacaagugcaaccagaccugccuggacagaaucgccgccggcaccuucgacgccggcgaguucagccugcccaccuucgacagccugaacaucaccgccgccagccugaacgaggacggccuggacaaccacaccauccugcuguacuacagcaccgccgccagcagccuggccgugacccugaugaucgccaucuucgugguguacauggugagcagagacaacgugagcugcagcaucugccuguga

SEQ ID NO: 187278 - RNA, 1758 nt, Artificial Sequence
  derived and/or modified CDS sequence (opt4) from hemagglutinin__InfluenzaB__AGX18357
augaaggccaucaucgugcugcugaugguggugaccagcaacgccgacagaaucugcaccggcaucaccagcagcaacagcccccacguggugaagaccgccacccagggcgaggugaacgugaccggcgugaucccccugaccaccgcccccaccaagagccacuucgccaaccugaagggcaccaagaccagaggcaagcugugccccaagugccugaacugcaccgaccuggacguggcccugggcagacccaagugcaccggcaacauccccagcgccgaggugagcauccugcacgaggugagacccgugaccagcggcugcuuccccaucaugcacgacagaaccaagaucagacagcugcccaaccugcugagaggcuacgagcacaucagacugagcacccacaacgugaucaacgccgagaaggcccccggcggccccuacaagaucggcaccagcggcagcugccccaacgugaccaacggcaacggcuucuucgccaccauggccugggccgugcccaagaacgacaacaacaagaccgccaccaacagccugaccaucgaggugcccuacaucugcaccgagggcgaggaccagaucaccaucuggggcuuccacagcgacaaggagacccagauggccaagcuguacggcgacagcaagccccagaaguucaccagcagcgccaacggcgugaccacccacuacgugagccagaucggcggcuuccccaaccagaccgaggacggcggccugccccagagcggcagaaucgugguggacuacauggugcagaagcccggcaagaccggcaccaucaccuaccagagaggcauccugcugccccagaagguguggugcgccagcggcagaagcaaggugaucaagggcagccugccccugaucggcgaggccgacugccugcacgagaaguacggcggccugaacaagagcaagcccuacuacaccggcgagcacgccaaggccaucggcaacugccccaucugggugaagaccccccugaagcuggccaacggcaccaaguacagaccccccgccaagcugcugaaggagagaggcuucuucggcgccaucgccggcuuccuggagggcggcugggagggcaugaucgccggcuggcacggcuacaccagccacggcgcccacggcguggccguggccgccgaccugaagagcacccaggaggccaucaacaagaucaccaagaaccugaacagccugagcgagcuggaggugaagaaccugcagagacugagcagcgccauggacgagcugcacaacgagauccuggagcuggacgagaagguggacgaccugagagccgacaccaucagcagccagaucgagcuggccgugcugcugagcaacgagggcaucaucaacagcgaggacgagcaccugcuggcccuggagagaaagcugaagaagaugcugggccccagcgccguggagaucggcaacggcugcuucgagaccaagcacaagugcaaccagaccugccuggacagaaucgccgccggcaccuucgacgccggcgaguucagccugcccaccuucgacagccugaacaucaccgccgccagccugaacgacgacggccuggacaaccacaccauccugcuguacuacagcaccgccgccagcagccuggccgugacccugaugaucgccaucuucgugguguacauggugagcagagacaacgugagcugcagcaucugccuguga

SEQ ID NO: 187279 - RNA, 1758 nt, Artificial Sequence
  derived and/or modified CDS sequence (opt4) from hemagglutinin__InfluenzaB__AGX18368
augaaggccaucaucgugcugcugaugguggugaccagcaacgccgacagaaucugcaccggcaucaccagcagcaacagcccccacguggugaagaccgccacccagggcgaggugaacgugaccggcgugaucccccugaccaccgcccccaccaagagccacuucgccaaccugaagggcaccaagaccagaggcaagcugugccccaagugccugaacugcaccgaccuggacguggcccugggcagacccaagugcaccggcaacacccccagcgccgaggugagcauccugcacgaggugagacccgugaccagcggcugcuuccccaucaugcacgacagaaccaagaucagacagcugcccaaccugcugagaggcuacgagcacaucagacugagcaaccacaacgugaucaacgccgagaaggcccccggcggccccuacaagaucggcaccagcggcagcugccccaacgugaccaacggcaacggcuucuucgccaccauggccugggccgugcccaagaacgacaacaacaagaccgccaccaacagccugaccaucgaggugcccuacaucugcaccgagggcgaggaccagaucaccaucuggggcuuccacagcgacaacgagacccagauggccaagcuguacggcgacagcaagccccagaaguucaccagcagcgccaacggcgugaccacccacuacgugagccagaucggcggcuuccccaaccagaccgaggacggcggccugccccagagcggcagaaucgugguggacuacauggugcagaagcccggcaagaccggcaccaucaccuaccagagaggcauccugcugccccagaagguguggugcgccagcggcagaagcaaggugaucaagggcagccugccccugaucggcgaggccgacugccugcacgagaaguacggcggccugaacaagagcaagcccuacuacaccggcgagcacgccaaggccaucggcaacugccccaucugggugaagaccccccugaagcuggccaacggcaccaaguacagaccccccgccaagcugcugaaggagagaggcuucuucggcgccaucgccggcuuccuggagggcggcugggagggcaugaucgccggcuggcacggcuacaccagccacggcgcccacggcguggccguggccgccgaccugaagagcacccaggaggccaucaacaagaucaccaagaaccugaacagccugagcgagcuggaggugaagaaccugcagagacugagcagcgccauggacgagcugcacaacgagauccuggagcuggacgagaagguggacgaccugagagccgacaccaucagcagccagaucgagcuggccgugcugcugagcaacgagggcaucaucaacagcgaggacgagcaccugcuggcccuggagagaaagcugaagaagaugcugggccccagcgccguggagaucggcaacggcugcuucgagaccaagcacaagugcaaccagaccugccuggacagaaucgccgccggcaccuucgacgccggcgaguucagccugcccaccuucgacagccugaacaucaccgccgccagccugaacgacgacggccuggacaaccacaccauccugcuguacuacagcaccgccgccagcagccuggccgugacccugaugaucgccaucuucgugguguacauggugagcagagacaacgugagcugcagcaucugccuguga

SEQ ID NO: 187280 - RNA, 1758 nt, Artificial Sequence; identical to SEQ ID NO: 186698
  derived and/or modified CDS sequence (opt4) from hemagglutinin__InfluenzaB__AGX18379

SEQ ID NO: 187281 - RNA, 1758 nt, Artificial Sequence; identical to SEQ ID NO: 187234
  derived and/or modified CDS sequence (opt4) from hemagglutinin__InfluenzaB__AGX18390

SEQ ID NO: 187282 - RNA, 1758 nt, Artificial Sequence
  derived and/or modified CDS sequence (opt4) from hemagglutinin__InfluenzaB__AGX18401
augaaggccaucaucgugcugcugaugguggugaccagcaacgccgacagaaucugcaccggcaucaccagcagcaacagcccccacguggugaagaccgccacccagggcgaggugaacgugaccggcgugaucccccugaccaccgcccccaccaagagccacuucgccaaccugaagggcaccaagaccagaggcaagcugugccccaagugccugaacugcaccgaccuggacguggcccugggcagacccaagugcaccggcaacauccccagcgccgaggugagcauccugcacgaggugagacccgugaccagcggcugcuuccccaucaugcacgacagaaccaagaucagacagcugcccaaccugcugagaggcuacgagcacaucagacugagcacccacaacgugaucaacgccgagaaggcccccggcggccccuacaagaucggcaccagcggcagcugccccaacgugaccaacggcaacggcuucuucgccaccauggccugggccgugcccaagaacgacaacaacaagaccgccaccaacagccugaccaucgaggugcccuacaucugcaccgagggcgaggaccagaucaccaucuggggcuuccacagcgacaacgagauccagauggccaagcuguacggcgacagcaagccccagaaguucaccagcagcgccaacggcgugaccacccacuacgugagccagaucggcggcuuccccaaccagaccgaggacggcggccugccccagagcggcagaaucgugguggacuacauggugcagaagcccggcaagaccggcaccaucaccuaccagagaggcauccugcugccccagaagguguggugcgccagcggcagaagcaaggugaucaagggcagccugccccugaucggcgaggccgacugccugcacgagaaguacggcggccugaacaagagcaagcccuacuacaccggcgagcacgccaaggccaucggcaacugccccaucugggugaagaccccccugaagcuggccaacggcaccaaguacagaccccccgccaagcugcugaaggagagaggcuucuucggcgccaucgccggcuuccuggagggcggcugggagggcaugaucgccggcuggcacggcuacaccagccacggcgcccacggcguggccguggccgccgaccugaagagcacccaggaggccaucaacaagaucaccaagaaccugaacagccugagcgagcuggaggugaagaaccugcagagacugagcagcgccauggacgagcugcacaacgagauccuggagcuggacgagaagguggacgaccugagagccgacaccaucagcagccagaucgagcuggccgugcugcugagcaacgagggcaucaucaacagcgaggacgagcaccugcuggcccuggagagaaagcugaagaagaugcugggccccagcgccguggagaucggcaacggcugcuucgagaccaagcacaagugcaaccagaccugccuggacagaaucgccgccggcaccuucgacgccggcgaguucagccugcccaccuucgacagccugaacaucaccgccgccagccugaacgacgacggccuggacaaccacaccauccugcuguacuacagcaccgccgccagcagccuggccgugacccugaugaucgccaucuucgugguguacauggugagcagagacaacgugagcugcagcaucugccuguga

SEQ ID NO: 187283 - RNA, 1758 nt, Artificial Sequence
  derived and/or modified CDS sequence (opt4) from hemagglutinin__InfluenzaB__AGX18412
augaaggccaucaucgugcugcugaugguggugaccagcaacgccgacagaaucugcaccggcaucaccagcagcaacagcccccacguggugaagaccgccacccagggcgaggugaacgugaccggcgugaucccccugaccaccacccccaccaagagccacuucgccaaccugaagggcaccaagaccagaggcaagcugugccccaagugccugaacugcaccgaccuggacguggcccugggcagacccaagugcaccggcaacauccccagcgccgaggugagcauccugcacgaggugagacccgugaccagcggcugcuuccccaucaugcacgacagaaccaagaucagacagcugcccaaccugcugagaggcuacgagcacaucagacugagcaaccacaacgugaucaacgccgagaaggcccccggcggccccuacaagaucggcaccagcggcagcugccccaacgugaccaacggcaacggcuucuucgccaccauggccugggccgugcccaagaacgacaacaacaagaccgccaccaacagccugaccaucgaggugcccuacaucugcaccgagggcgaggaccagaucaccaucuggggcuuccacagcgacaacgaggcccagauggccaagcuguacggcgacagcaagccccagaaguucaccagcagcgccaacggcgugaccacccacuacgugagccagaucggcggcuuccccaaccagaccgaggacggcggccugccccagagcggcagaaucgugguggacuacauggugcagaagagcggcaagaccggcaccaucaccuaccagagaggcauccugcugccccagaagguguggugcgccagcggcagaagcaaggugaucaagggcagccugccccugaucggcgaggccgacugccugcacgagaaguacggcggccugaacaagagcaagcccuacuacaccggcgagcacgccaaggccaucggcaacugccccaucugggugaagaccccccugaagcuggccaacggcaccaaguacagaccccccgccaagcugcugaaggagagaggcuucuucggcgccaucgccggcuuccuggagggcggcugggagggcaugaucgccggcuggcacggcuacaccagccacggcgcccacggcguggccguggccgccgaccugaagagcacccaggaggccaucaacaagaucaccaagaaccugaacagccugagcgagcuggaggugaagaaccugcagagacugagcggcgccauggacgagcugcacaacgagauccuggagcuggacgagaagguggacgaccugagagccgacaccaucagcagccagaucgagcuggccgugcugcugagcaacgagggcaucaucaacagcgaggacgagcaccugcuggcccuggagagaaagcugaagaagaugcugggccccagcgccguggagaucggcaacggcugcuucgagaccaagcacaagugcaaccagaccugccuggacagaaucgccgccggcaccuucgacgccggcgaguucagccugcccaccuucgacagccugaacaucaccgccgccagccugaacgacgacggccuggacaaccacaccauccugcuguacuacagcaccgccgccagcagccuggccgugacccugaugaucgccaucuucgugguguacauggugagcagagacaacgugagcugcagcaucugccuguga

SEQ ID NO: 187284 - RNA, 1758 nt, Artificial Sequence; identical to SEQ ID NO: 187041
  derived and/or modified CDS sequence (opt4) from hemagglutinin__InfluenzaB__AGX18423

SEQ ID NO: 187285 - RNA, 1755 nt, Artificial Sequence
  derived and/or modified CDS sequence (opt4) from hemagglutinin__InfluenzaB__AGX18424
augaaggccaucaucgugcugcugaugguggugaccagcaacgccgacagaaucugcaccggcaucaccagcagcaacagcccccacguggugaagaccgccacccagggcgaggugaacgugaccggcgugaucccccugaccaccacccccaucaagagccacuucgccaaccugaagggcaccagaaccagaggcaagcugugccccgacugccugaacugcaccgaccuggacguggcccugggcagacccaugugcgugggcaccacccccagcgccaaggccagcauccugcacgaggugagacccgugaccagcggcugcuuccccaucaugcacgacagaaccaagaucagacagcugcccaaccugcugagaggcuacgagaacaucagacugagcacccagaacgugaucgacgccgagaaggcccugggcggccccuacagacugggcaccagcggcagcugccccaacgccaccagcaagagcggcuucuucgccaccauggccugggccgugcccaaggacaacaacaagaacgccaccaacccccugaccguggaggugcccuacaucugcaccgagggcgaggaccagaucaccguguggggcuuccacagcgacgacaagacccagaugaagaaccuguacggcgacagcaacccccagaaguucaccagcagcgccaacggcgugaccacccacuacgugagccagaucggcggcuuccccgaccagaccgaggacggcggccugccccagagcggcagaaucgugguggacuacauggugcagaagcccggcaagaccggcaccaucguguaccagagaggcgugcugcugccccagaagguguggugcgccagcggcagaagcaaggugaucaagggcagccugccccugaucggcgaggccgacugccugcacgagaaguacggcggccugaacaagagcaagcccuacuacaccggcgagcacgccaaggccaucggcaacugccccaucugggugaagaccccccugaagcuggccaacggcaccaaguacagaccccccgccaagcugcugaaggagagaggcuucuucggcgccaucgccggcuuccuggagggcggcugggagggcaugaucgccggcuggcacggcuacaccagccacggcgcccacggcguggccguggccgccgaccugaagagcacccaggaggccaucaacaagaucaccaagaaccugaacagccugagcgagcuggaggugaagaaccugcagagacugagcggcgccauggacgagcugcacaacgagauccuggagcuggacgagaagguggacgaccugagagccgacaccaucagcagccagaucgagcuggccgugcugcugagcaacgagggcaucaucaacagcgaggacgagcaccugcuggcccuggagagaaagcugaagaagaugcugggccccagcgccguggacaucggcaacggcugcuucgagaccaagcacaagugcaaccagaccugccuggacagaaucgccgccggcaccuucaacgccggcgaguucagccugcccaccuucgacagccugaacaucaccgccgccagccugaacgacgacggccuggacaaccacaccauccugcuguacuacagcaccgccgccagcagccuggccgugacccugaugcuggccaucuucaucguguacauggugagcagagacaacgugagcugcagcaucugccuguga

SEQ ID NO: 187286 - RNA, 1758 nt, Artificial Sequence
  derived and/or modified CDS sequence (opt4) from hemagglutinin__InfluenzaB__AGX18435
augaaggccaucaucgugcugcugaugguggugaccagcaacgccgacagaaucugcaccggcaucaccagcagcaacagcccccacguggugaagaccgccacccagggcgaggugaacgugaccggcgugaucccccugaccaccacccccaccaagagccacuucgccaaccugaagggcaccaagaccagaggcaagcugugccccaagugccugaacugcaccgaccuggacguggcccugggcagacccaagugcaccggcaacauccccagcgccgaggugagcauccugcacgaggugagacccgugaccagcggcugcuuccccaucaugcacgacagaaccaagaucagacagcugcccaaccugcugagaggcuacgagcacaucagacugagcacccacaacgugaucaacgccgagaaggcccccggcggccccuacaagaucggcaccagcggcagcugccccaacgugaccaacggcaacggcuucuucgccaccauggccugggccgugcccaagaacgacaacaacaagaccgccaccaacagccugaccaucgaggugcccuacaucugcaccgagggcgaggaccagaucaccaucuggggcuuccacagcgacaacgagauccagauggccaagcuguacggcgacagcaagccccagaaguucaccagcagcgccaacggcgugaccacccacuacgugagccagaucggcggcuuccccaaccagaccgaggacggcggccugccccagagcggcagaaucgugguggacuacauggugcagaagagcggcaagaccggcaccaucaccuaccagagaggcauccugcugccccagaagguguggugcgccagcggcagaagcaaggugaucaagggcagccugccccugaucggcgaggccgacugccugcacgagaaguacggcggccugaacaagagcaagcccuacuacaccggcgagcacgccaaggccaucggcaacugccccaucugggugaagaccccccugaagcuggccaacggcaccaaguacagaccccccgccaagcugcugaaggagagaggcuucuucggcgccaucgccggcuuccuggagggcggcugggagggcaugaucgccggcuggcacggcuacaccagccacggcgcccacggcguggccguggccgccgaccugaagagcacccaggaggccaucaacaagaucaccaagaaccugaacagccugagcgagcuggaggugaagaaccugcagagacugagcggcgccauggacgagcugcacaacgagauccuggagcuggacgagaagguggacgaccugagagccgacaccaucagcagccagaucgagcuggccgugcugcugagcaacgagggcaucaucaacagcgaggacgagcaccugcuggcccuggagagaaagcugaagaagaugcugggccccagcgccguggagaucggcaacggcugcuucgagaccaagcacaagugcaaccagaccugccuggacagaaucgccgccggcaccuucgacgccggcgaguucagccugcccaccuucgacagccugaacaucaccgccgccagccugaacgacgacggccuggacaaccacaccauccugcuguacuacagcaccgccgccagcagccuggccgugacccugaugaucgccaucuucgugguguacauggugagcagagacaacgugagcugcagcaucugccuguga

SEQ ID NO: 187287 - RNA, 1758 nt, Artificial Sequence; identical to SEQ ID NO: 186698
  derived and/or modified CDS sequence (opt4) from hemagglutinin__InfluenzaB__AGX18446

SEQ ID NO: 187288 - RNA, 1758 nt, Artificial Sequence; identical to SEQ ID NO: 187234
  derived and/or modified CDS sequence (opt4) from hemagglutinin__InfluenzaB__AGX18457

SEQ ID NO: 187289 - RNA, 1758 nt, Artificial Sequence; identical to SEQ ID NO: 187041
  derived and/or modified CDS sequence (opt4) from hemagglutinin__InfluenzaB__AGX18468

SEQ ID NO: 187290 - RNA, 1758 nt, Artificial Sequence; identical to SEQ ID NO: 187234
  derived and/or modified CDS sequence (opt4) from hemagglutinin__InfluenzaB__AGX18479

SEQ ID NO: 187291 - RNA, 1758 nt, Artificial Sequence; identical to SEQ ID NO: 186574
  derived and/or modified CDS sequence (opt4) from hemagglutinin__InfluenzaB__AGX18490

SEQ ID NO: 187292 - RNA, 1758 nt, Artificial Sequence
  derived and/or modified CDS sequence (opt4) from hemagglutinin__InfluenzaB__AGX18512
augaaggccaucaucgugcugcugaugguggugaccagcaacgccgacagaaucugcaccggcaucaccagcagcaacagcccccacguggugaagaccgccacccagggcgaggugaacgugaccggcgugaucccccugaccaccacccccaccaagagccacuucgccaaccugaagggcaccgagaccagaggcagacugugccccaagugccugaacugcaccgaccuggacguggcccugggcagacccaagugcaccggcaacauccccagcgccagagugagcauccugcacgaggugagacccgugaccagcggcugcuuccccaucaugcacgacagaaccaagaucagacagcugcccaaccugcugagaggcuacgagcacaucagacugagcacccacaacgugaucaacgccgagaacgcccccggcggccccuacaagaucggcaccagcggcagcugccccaacgugaccaacggcaacggcuucuucgccaccauggccugggccgugcccaagaacgacaacaacaagaccgccaccaacagccugaccaucgaggugcccuacaucugcaccgagggcgaggaccagaucaccguguggggcuuccacagcgacaacgagacccagauggccaagcuguacggcgacagcaagccccagaaguucaccagcagcgccaacggcgugaccacccacuacgugagccagaucggcggcuuccccaaccagaccgaggacggcggccugccccagagcggcagaaucgugguggacuacauggugcagaagagcggcaagaccggcaccaucaccuaccagagaggcauccugcugccccagaagguguggugcgccagcggcagaagcaaggugaucaagggcagccugccccugaucggcgaggccgacugccugcacgagaaguacggcggccugaacaagagcaagcccuacuacaccggcgagcacgccaaggccaucggcaacugccccaucugggugaagaccccccugaagcuggccaacggcaccaaguacagaccccccgccaagcugcugaaggagagaggcuucuucggcgccaucgccggcuuccuggagggcggcugggagggcaugaucgccggcuggcacggcuacaccagccacggcgcccacggcguggccguggccgccgaccugaagagcacccaggaggccaucaacaagaucaccaagaaccugaacagccugagcgagcuggaggugaagaaccugcagagacugagcggcgccauggacgagcugcacaacgagauccuggagcuggacgagaagguggacgaccugagagccgacaccaucagcagccagaucgagcuggccgugcugcugagcaacgagggcaucaucaacagcgaggacgagcaccugcuggcccuggagagaaagcugaagaagaugcugggccccagcgccguggagaucggcaacggcugcuucgagaccaagcacaagugcaaccagaccugccuggacagaaucgccgccggcaccuucgacgccggcgaguucagccugcccaccuucgacagccugaacaucaccgccgccagccugaacgacgacggccuggacaaccacaccauccugcuguacuacagcaccgccgccagcagccuggccgugacccugaugaucgccaucuucgugguguacauggugagcagagacaacgugagcugcagcaucugccuguga

SEQ ID NO: 187293 - RNA, 1758 nt, Artificial Sequence; identical to SEQ ID NO: 186574
  derived and/or modified CDS sequence (opt4) from hemagglutinin__InfluenzaB__AGX18523

SEQ ID NO: 187294 - RNA, 1758 nt, Artificial Sequence; identical to SEQ ID NO: 186574
  derived and/or modified CDS sequence (opt4) from hemagglutinin__InfluenzaB__AGX18534

SEQ ID NO: 187295 - RNA, 1758 nt, Artificial Sequence; identical to SEQ ID NO: 186635
  derived and/or modified CDS sequence (opt4) from hemagglutinin__InfluenzaB__AGX18545

SEQ ID NO: 187296 - RNA, 1758 nt, Artificial Sequence; identical to SEQ ID NO: 186574
  derived and/or modified CDS sequence (opt4) from hemagglutinin__InfluenzaB__AGX18556

SEQ ID NO: 187297 - RNA, 1758 nt, Artificial Sequence; identical to SEQ ID NO: 186574
  derived and/or modified CDS sequence (opt4) from hemagglutinin__InfluenzaB__AGX18567

SEQ ID NO: 187298 - RNA, 1758 nt, Artificial Sequence
  derived and/or modified CDS sequence (opt4) from hemagglutinin__InfluenzaB__AGX18578
augaaggccaucaucgugcugcugaugguggugaccagcaacgccgacagaaucugcaccggcaucaccagcagcaacagcccccacguggugaagaccgccacccagggcgaggugaacgugaccggcgugaucccccugaccaccacccccaccaagagccacuucgccaaccugaagggcaccgagaccagaggcaagcugugccccaagugccugaacugcaccgaccuggacguggcccugggcagacccaagugcaccggcaacauccccagcgccagagugagcauccugcacgaggugagacccgugaccagcggcugcuuccccaucaugcacgacagaaccaagaucagacagcugcccaaccugcugagaggcuacgagcacaucagacugagcacccacaacgugaucaacgccgagaacgcccccggcggccccuacaagaucggcaccagcggcagcugccccaacgugaccaacggcaacggcuucuucgccaccauggccugggccgugcccaagaacgacaagaacaagaccgccaccaacagccugaccaucgaggugcccuacaucugcaccgagggcgaggaccagaucaccguguggggcuuccacagcgacaacgagacccagauggccaagcuguacggcgacagcaagccccagaaguucaccagcagcgccaacggcgugaccacccacuacgugagccagaucggcggcuuccccaaccagaccgaggacggcggccugccccagagcggcagaaucgugguggacuacauggugcagaagagcggcaagaccggcaccaucaccuaccagagaggcauccugcugccccagaagguguggugcgccagcggcagaagcaaggugaucaagggcagccugccccugaucggcgaggccgacugccugcacgagaaguacggcggccugaacaagagcaagcccuacuacaccggcgagcacgccaaggccaucggcaacugccccaucugggugaagaccccccugaagcuggccaacggcaccaaguacagaccccccgccaagcugcugaaggagagaggcuucuucggcgccaucgccggcuuccuggagggcggcugggagggcaugaucgccggcuggcacggcuacaccagccacggcgcccacggcguggccguggccgccgaccugaagagcacccaggaggccaucaacaagaucaccaagaaccugaacagccugagcgagcuggaggugaagaaccugcagagacugagcggcgccauggacgagcugcacaaggagauccuggagcuggacgagaagguggacgaccugagagccgacaccaucagcagccagaucgagcuggccgugcugcugagcaacgagggcaucaucaacagcgaggacgagcaccugcuggcccuggagagaaagcugaagaagaugcugggccccagcgccguggagaucggcaacggcugcuucgagaccaagcacaagugcaaccagaccugccuggacagaaucgccgccggcaccuucgacgccggcgaguucagccugcccaccuucgacagccugaacaucaccgccgccagccugaacgacgacggccuggacaaccacaccauccugcuguacuacagcaccgccgccagcagccuggccgugacccugaugaucgccaucuucgugguguacauggugagcagagacaacgugagcugcagcaucugccuguga

SEQ ID NO: 187299 - RNA, 1758 nt, Artificial Sequence
  derived and/or modified CDS sequence (opt4) from hemagglutinin__InfluenzaB__AGX18589
augaaggccaucaucgugcugcugaugguggugaccagcaacgccgacagaaucugcaccggcaucaccagcagcaacagcccccacguggugaagaccgccacccagggcgaggugaacgugaccggcgugaucccccugaccaccacccccaccaagagccacuucgccaaccugaagggcaccgagaccagaggcaagcugugccccaagugccugaacugcaccgaccuggacguggcccugggcagacccaagugcaccggcaacauccccagcgccagagugagcauccugcacgaggugagacccgugaccagcggcugcuuccccaucaugcacgacagaaccaagaucagacagcugcccaaccugcugagaggcuacgagcacaucagacugagcacccacaacgugaucaacgccgagaacgcccccggcggccccuacaagaucggcaccagcggcagcugccccaacgugaccaacggcaacggcuucuucgccaccauggccugggccgugcccaagaacgacaacaacaagaccgccaccaacagccugaccaucgaggugcccuacaucugcaccgagggcgaggaccagaucaccguguggggcuuccacagcgacaccgagacccagauggccaagcuguacggcgacagcaagccccagaaguucaccagcagcgccaacggcgugaccacccacuacgugagccagaucggcgacuuccccaaccagaccgaggacggcggccugccccagagcggcagaaucgugguggacuacauggugcagaagagcggcaagaccggcaccaucaccuaccagagaggcauccugcugccccagaagguguggugcgccagcggcagaagcaaggugaucaagggcagccugccccugaucggcgaggccgacugccugcacgagaaguacggcggccugaacaagagcaagcccuacuacaccggcgagcacgccaaggccaucggcaacugccccaucugggugaagaccccccugaagcuggccaacggcaccaaguacagaccccccgccaagcugcugaaggagagaggcuucuucggcgccaucgccggcuuccuggagggcggcugggagggcaugaucgccggcuggcacggcuacaccagccacggcgcccacggcguggccguggccgccgaccugaagagcacccaggaggccaucaacaagaucaccaagaaccugaacagccugagcgagcuggaggugaagaaccugcagagacugagcggcgccauggacgagcugcacaacgagauccuggagcuggacgagaagguggacgaccugagagccgacaccaucagcagccagaucgagcuggccgugcugcugagcaacgagggcaucaucaacagcgaggacgagcaccugcuggcccuggagagaaagcugaagaagaugcugggccccagcgccguggagaucggcaacggcugcuucgagaccaagcacaagugcaaccagaccugccuggacagaaucgccgccggcaccuucgacgccggcgaguucagccugcccaccuucgacagccugaacaucaccgccgccagccugaacgacgacggccuggacaaccacaccauccugcuguacuacagcaccgccgccagcagccuggccgugacccugaugaucgccaucuucgugguguacauggugagcagagacaacgugagcugcagcaucugccuguga

SEQ ID NO: 187300 - RNA, 1758 nt, Artificial Sequence; identical to SEQ ID NO: 186574
  derived and/or modified CDS sequence (opt4) from hemagglutinin__InfluenzaB__AGX18600

SEQ ID NO: 187301 - RNA, 1758 nt, Artificial Sequence; identical to SEQ ID NO: 186574
  derived and/or modified CDS sequence (opt4) from hemagglutinin__InfluenzaB__AGX18611

SEQ ID NO: 187302 - RNA, 1758 nt, Artificial Sequence; identical to SEQ ID NO: 186574
  derived and/or modified CDS sequence (opt4) from hemagglutinin__InfluenzaB__AGX18622

SEQ ID NO: 187303 - RNA, 1758 nt, Artificial Sequence; identical to SEQ ID NO: 186574
  derived and/or modified CDS sequence (opt4) from hemagglutinin__InfluenzaB__AGX18633

SEQ ID NO: 187304 - RNA, 1758 nt, Artificial Sequence; identical to SEQ ID NO: 186574
  derived and/or modified CDS sequence (opt4) from hemagglutinin__InfluenzaB__AGX18644

SEQ ID NO: 187305 - RNA, 1758 nt, Artificial Sequence; identical to SEQ ID NO: 186574
  derived and/or modified CDS sequence (opt4) from hemagglutinin__InfluenzaB__AGX18655

SEQ ID NO: 187306 - RNA, 1758 nt, Artificial Sequence; identical to SEQ ID NO: 186574
  derived and/or modified CDS sequence (opt4) from hemagglutinin__InfluenzaB__AGX18666

SEQ ID NO: 187307 - RNA, 1758 nt, Artificial Sequence; identical to SEQ ID NO: 186574
  derived and/or modified CDS sequence (opt4) from hemagglutinin__InfluenzaB__AGX18677

SEQ ID NO: 187308 - RNA, 1758 nt, Artificial Sequence; identical to SEQ ID NO: 186574
  derived and/or modified CDS sequence (opt4) from hemagglutinin__InfluenzaB__AGX18688

SEQ ID NO: 187309 - RNA, 1758 nt, Artificial Sequence; identical to SEQ ID NO: 186574
  derived and/or modified CDS sequence (opt4) from hemagglutinin__InfluenzaB__AGX18699

SEQ ID NO: 187310 - RNA, 1758 nt, Artificial Sequence; identical to SEQ ID NO: 186574
  derived and/or modified CDS sequence (opt4) from hemagglutinin__InfluenzaB__AGX18710

SEQ ID NO: 187311 - RNA, 1758 nt, Artificial Sequence; identical to SEQ ID NO: 186574
  derived and/or modified CDS sequence (opt4) from hemagglutinin__InfluenzaB__AGX18721

SEQ ID NO: 187312 - RNA, 1758 nt, Artificial Sequence; identical to SEQ ID NO: 186574
  derived and/or modified CDS sequence (opt4) from hemagglutinin__InfluenzaB__AGX18732

SEQ ID NO: 187313 - RNA, 1758 nt, Artificial Sequence
  derived and/or modified CDS sequence (opt4) from hemagglutinin__InfluenzaB__AGX18743
augaaggccaucaucgugcugcugaugguggugaccagcaacgccgacagaaucugcaccggcaucaccagcagcaacagcccccacguggugaagaccgccacccagggcgaggugaacgugaccggcgugaucccccugaccaccacccccaccaagagccacuucgccaaccugaagggcaccgagaccagaggcaagcugugccccaagugccugaacugcaccgaccuggacguggcccugggcagacccaagugcaccggcaacauccccagcgccagagugagcauccugcacgaggugagacccgugaccagcggcugcuuccccaucaugcacgacagaaccaagaucagacagcugcccaaccugcugagaggcuacgagcacaucagacugagcaaccacaacgugaucaacgccgagaacgcccccggcggccccuacaagaucggcaccagcggcagcugccccaacgugaccaacggcaacggcuucuucgccaccauggccugggccgugcccaagaacgacaacaacaagaccgccaccaacagccugaccaucgaggugcccuacaucugcaccgagggcgaggaccagaucaccguguggggcuuccacagcgacaacgagacccagauggccaagcuguacggcgacagcaagccccagaaguucaccagcagcgccaacggcgugaccacccacuacgugagccagaucggcggcuuccccaaccagaccgaggacggcggccugccccagagcggcagaaucgugguggacuacauggugcagaagagcggcaagaccggcaccaucaccuaccagagaggcauccugcugccccagaagguguggugcgccagcggcagaagcaaggugaucaagggcagccugccccugaucggcgaggccgacugccugcacgagaaguacggcggccugaacaagagcaagcccuacuacaccggcgagcacgccaaggccaucggcaacugccccaucugggugaagaccccccugaagcuggccaacggcaccaaguacagaccccccgccaagcugcugaaggagagaggcuucuucggcgccaucgccggcuuccuggagggcggcugggagggcaugaucgccggcuggcacggcuacaccagccacggcgcccacggcguggccguggccgccgaccugaagagcacccaggaggccaucaacaagaucaccaagaaccugaacagccugagcgagcuggaggugaagaaccugcagagacugagcggcgccauggacgagcugcacaacgagauccuggagcuggacgagaagguggacgaccugagagccgacaccaucagcagccagaucgagcuggccgugcugcugagcaacgagggcaucaucaacagcgaggacgagcaccugcuggcccuggagagaaagcugaagaagaugcugggccccagcgccguggagaucggcaacggcugcuucgagaccaagcacaagugcaaccagaccugccuggacagaaucgccgccggcaccuucgacgccggcgaguucagccugcccaccuucgacagccugaacaucaccgccgccagccugaacgacgacggccuggacaaccacaccauccugcuguacuacagcaccgccgccagcagccuggccgugacccugaugaucgccaucuucgugguguacauggugagcagagacaacgugagcugcagcaucugccuguga

SEQ ID NO: 187314 - RNA, 1758 nt, Artificial Sequence; identical to SEQ ID NO: 186574
  derived and/or modified CDS sequence (opt4) from hemagglutinin__InfluenzaB__AGX18754

SEQ ID NO: 187315 - RNA, 1758 nt, Artificial Sequence; identical to SEQ ID NO: 186574
  derived and/or modified CDS sequence (opt4) from hemagglutinin__InfluenzaB__AGX18765

SEQ ID NO: 187316 - RNA, 1758 nt, Artificial Sequence; identical to SEQ ID NO: 186625
  derived and/or modified CDS sequence (opt4) from hemagglutinin__InfluenzaB__AGX18776

SEQ ID NO: 187317 - RNA, 1758 nt, Artificial Sequence; identical to SEQ ID NO: 186574
  derived and/or modified CDS sequence (opt4) from hemagglutinin__InfluenzaB__AGX18787

SEQ ID NO: 187318 - RNA, 1758 nt, Artificial Sequence; identical to SEQ ID NO: 186574
  derived and/or modified CDS sequence (opt4) from hemagglutinin__InfluenzaB__AGX18798

SEQ ID NO: 187319 - RNA, 1758 nt, Artificial Sequence
  derived and/or modified CDS sequence (opt4) from hemagglutinin__InfluenzaB__AGX18809
augaaggccaucaucgugcugcugaugguggugaccagcaacgccgacagaaucugcaccggcaucaccagcagcaacagcccccacguggugaagaccgccacccagggcgaggugaacgugaccggcgugaucccccugaccaccacccccaccaagagccacuucgccaaccugaagggcaccgagaccagaggcaagcugugccccaagugccugaacugcaccgaccuggacguggcccugggcagacccaagugcaccggcaacauccccagcgccagagugagcauccugcacgaggugagacccgugaccagcggcugcuuccccaucaugcacgacagaaccaagaucagacagcugcccaaccugcugagaggcuacgagcacaucagacugagcacccacaacgugaucaacgccgagaacgcccccggcggccccuacaagaucggcaccagcggcagcugccccaacgugaccaacggcaacggcuucuucgccaccauggccugggccgugcccaagaacgacaacaacaagaccgccaccaacagccugaccaucgaggugcccuacaucugcaccgagggcgaggaccagaucaccguguggggcuuccacagcgacagcgagacccagauggccaagcuguacggcgacagcaagccccagaaguucaccagcagcgccaacggcgugaccacccacuacgugagccagaucggcggcuuccccaaccagaccgaggacggcggccugccccagagcggcagaaucgugguggacuacaugaugcagaagagcggcaagaccggcaccaucaccuaccagagaggcauccugcugccccagaagguguggugcgccagcggcagaagcaaggugaucaagggcagccugccccugaucggcgaggccgacugccugcacgagaaguacggcggccugaacaagagcaagcccuacuacaccggcgagcacgccaaggccaucggcaacugccccaucugggugaagaccccccugaagcuggccaacggcaccaaguacagaccccccgccaagcugcugaaggagagaggcuucuucggcgccaucgccggcuuccuggagggcggcugggagggcaugaucgccggcuggcacggcuacaccagccacggcgcccacggcguggccguggccgccgaccugaagagcacccaggaggccaucaacaagaucaccaagaaccugaacagccugagcgagcuggaggugaagaaccugcagagacugagcggcgccauggacgagcugcacaacgagauccuggagcuggacgagaagguggacgaccugagagccgacaccaucagcagccagaucgagcuggccgugcugcugagcaacgagggcaucaucaacagcgaggacgagcaccugcuggcccuggagagaaagcugaagaagaugcugggccccagcgccguggagaucggcaacggcugcuucgagaccaagcacaagugcaaccagaccugccuggacagaaucgccgccggcaccuucgacgccggcgaguucagccugcccaccuucgacagccugaacaucaccgccgccagccugaacgacgacggccuggacaaccacaccauccugcuguacuacagcaccgccgccagcagccuggccgugacccugaugaucgccaucuucgugguguacauggugagcagagacaacgugagcugcagcaucugccuguga

SEQ ID NO: 187320 - RNA, 1758 nt, Artificial Sequence; identical to SEQ ID NO: 187237
  derived and/or modified CDS sequence (opt4) from hemagglutinin__InfluenzaB__AGX18820

SEQ ID NO: 187321 - RNA, 1758 nt, Artificial Sequence; identical to SEQ ID NO: 186574
  derived and/or modified CDS sequence (opt4) from hemagglutinin__InfluenzaB__AGX18831

SEQ ID NO: 187322 - RNA, 1758 nt, Artificial Sequence; identical to SEQ ID NO: 186574
  derived and/or modified CDS sequence (opt4) from hemagglutinin__InfluenzaB__AGX18842

SEQ ID NO: 187323 - RNA, 1758 nt, Artificial Sequence; identical to SEQ ID NO: 186642
  derived and/or modified CDS sequence (opt4) from hemagglutinin__InfluenzaB__AGX18853

SEQ ID NO: 187324 - RNA, 1758 nt, Artificial Sequence
  derived and/or modified CDS sequence (opt4) from hemagglutinin__InfluenzaB__AGX18864
augaaggccaucaucgugcugcugaugguggugaccagcaacgccgacagaaucugcaccggcaucaccagcagcaacagcccccacguggugaagaccgccacccagggcgaggugaacgugaccggcgugaucccccugaccaccacccccaccaagagcuacuucgccaaccugaagggcaccgagaccagaggcaagcugugccccaagugccugaacugcaccgaccuggacguggcccugggcagacccaagugcaccggcaacauccccagcgccagagugagcauccugcacgaggugagacccgugaccagcggcugcuuccccaucaugcacgacagaaccaagaucagacagcugcccaaccugcugagaggcuacgagcacaucagacugagcaaccacaacgugaucaacgccgagaacgcccccggcggccccuacaagaucggcaccagcggcagcugccccaacgugaccaacggcaacggcuucuucgccaccauggccugggccgugcccaagaacgacaacaacaagaccgccaccaacagccugaccaucgaggugcccuacaucugcaccgagggcgaggaccagaucaccguguggggcuuccacagcgacaacgaggcccagauggccaagcuguacggcgacagcaagccccagaaguucaccagcagcgccaacggcgugaccacccacuacgugagccagaucggcggcuuccccaaccagaccgaggacggcggccugccccagagcggcagaaucgugguggacuacauggugcagaagagcggcaagaccggcaccaucaccuaccagagaggcauccugcugccccagaagguguggugcgccagcggcagaagcaaggugaucaagggcagccugccccugaucggcgaggccgacugccugcacgagaaguacggcggccugaacaagagcaagcccuacuacaccggcgagcacgccaaggccaucggcaacugccccaucugggugaagaccccccugaagcuggccaacggcaccaaguacagaccccccgccaagcugcugaaggagagaggcuucuucggcgccaucgccggcuuccuggagggcggcugggagggcaugaucgccggcuggcacggcuacaccagccacggcgcccacggcguggccguggccgccgaccugaagagcacccaggaggccaucaacaagaucaccaagaaccugaacagccugagcgagcuggaggugaagaaccugcagagacugagcggcgccauggacgagcugcacaacgagauccuggagcuggacgagaagguggacgaccugagagccgacaccaucagcagccagaucgagcuggccgugcugcugagcaacgagggcaucaucaacagcgaggacgagcaccugcuggcccuggagagaaagcugaagaagaugcugggccccagcgccguggagaucggcaacggcugcuucgagaccaagcacaagugcaaccagaccugccuggacagaaucgccgccggcaccuucgacgccggcgaguucagccugcccaccuucgacagccugaacaucaccgccgccagccugaacgacgacggccuggacaaccacaccauccugcuguacuacagcaccgccgccagcagccuggccgugacccugaugaucgccaucuucgugguguacauggugagcagagacaacgugagcugcagcaucugccuguga

SEQ ID NO: 187325 - RNA, 1758 nt, Artificial Sequence
  derived and/or modified CDS sequence (opt4) from hemagglutinin__InfluenzaB__AGX18875
augaaggccaucaucgugcugcugaugguggugaccagcaacgccgacagaaucugcaccggcaucaccagcagcaacagcccccacguggugaagaccgccacccagggcgaggugaacgugaccggcgugaucccccugaccaccacccccaccaagagccacuucgccaaccugaagggcaccgagaccagaggcaagcugugccccaagugccugaacugcaccgaccuggacguggcccugggcagacccaagugcaccggcaacauccccagcgccagagugagcauccugcacgaggugagacccgugaccagcggcugcuuccccaucaugcacgacagaaccaagaucagacagcugcccaaccugcugagaggcuacgagcacaucagacugagcacccacaacgugaucaacgccgagaacgcccccggcggccccuacaagaucggcaccagcggcagcugccccaacgugaccaacagaaacggcuucuucgccaccauggccugggccgugcccaagaacgacaacaacaagaccgccaccaacagccugaccaucgaggugcccuacaucugcaccgagggcgaggaccagaucaccguguggggcuuccacagcgacaacgagauccagauggccaagcuguacggcgacagcaagccccagaaguucaccagcagcgccaacggcgugaccacccacuacgugagccagaucggcggcuuccccaaccagaccgaggacggcggccugccccagagcggcagaaucgugguggacuacauggugcagaagagcggcaagaccggcaccaucaccuaccagagaggcauccugcugccccagaagguguggugcgccagcggcagaagcaaggugaucaagggcagccugccccugaucggcgaggccgacugccugcacgagaaguacggcggccugaacaagagcaagcccuacuacaccggcgagcacgccaaggccaucggcaacugccccaucugggugaagaccccccugaagcuggccaacggcaccaaguacagaccccccgccaagcugcugaaggagagaggcuucuucggcgccaucgccggcuuccuggagggcggcugggagggcaugaucgccggcuggcacggcuacaccagccacggcgcccacggcguggccguggccgccgaccugaagagcacccaggaggccaucaacaagaucaccaagaaccugaacagccugagcgagcuggaggugaagaaccugcagagacugagcggcgccaucgacgagcugcacaacgagauccuggagcuggacgagaagguggacgaccugagagccgacaccaucagcagccagaucgagcuggccgugcugcugagcaacgagggcaucaucaacagcgaggacgagcaccugcuggcccuggagagaaagcugaagaagaugcugggccccagcgccguggagaucggcaacggcugcuucgagaccaagcacaagugcaaccagaccugccuggacagaaucgccgccggcaccuucgacgccggcgaguucagccugcccaccuucgacagccugaacaucaccgccgccagccugaacgacgacggccuggacaaccacaccauccugcuguacuacagcaccgccgccagcagccuggccgugacccugaugaucgccaucuucgugguguacauggugagcagagacaacgugagcugcagcaucugccuguga

SEQ ID NO: 187326 - RNA, 1758 nt, Artificial Sequence
  derived and/or modified CDS sequence (opt4) from hemagglutinin__InfluenzaB__AGX18886
augaaggccaucaucgugcugcugaugguggugaccagcaacgccgacagaaucugcaccggcaucaccagcagcaacagcccccacguggugaagaccgccacccagggcgaggugaacgugaccggcgugaucccccugaccaccacccccaccaagagccacuucgccaaccugaagggcaccgagaccagaggcaagcugugccccaagugccugaacugcaccgaccuggacguggcccugggcagacccaagugcaccggcaacauccccagcgccagagugagcauccugcacgaggugagacccgugaccagcggcugcuuccccaucaugcacgacagaaccaagaucagacagcugcccaaccugcugagaggcuacgagcacaucagacugagcacccacaacgugaucaacgccgagaacgcccccggcggccccuacaagaucggcaccagcggcagcugccccaacgugaccaacggcaacggcuucuucgccaccauggccugggccgugcccaagaacgacaacaacaagaccgccaccaacagccugaccaucgaggugcccuacaucugcaccgagggcgaggaccagaucaccguguggggcuuccacagcgacaacgagauccagauggccaagcuguacggcgacagcaagccccagaaguucaccagcagcgccaacggcgugaccacccacuacgugagccagaucggcggcuuccccaaccagaccgaggacggcggccugccccagagcggcagaaucgugguggacuacauggugcagaagagcggcaagaccggcaccaucaccuaccagagaggcauccugcugccccagaagguguggugcgccagcggcagaagcaaggugaucaagggcagccugccccugaucggcgaggccgacugccugcacgagaaguacggcggccugaacaagagcaagcccuacuacaccggcgagcacgccaaggccaucggcaacugccccaucugggugaagaccccccugaagcuggccaacggcaccaaguacagaccccccgccaagcugcugaaggagagaggcuucuucggcgccaucgccggcuuccuggagggcggcugggagggcaugaucgccggcuggcacggcuacaccagccacggcgcccacggcguggccguggccgccgaccugaagagcacccaggaggccaucaacaagaucaccaagaaccugaacagccugagcgagcuggaggugaagaaccugcagagacugagcggcgccauggacgagcugcacaacgagauccuggagcuggacgagaagguggacgaccugagagccgacaccaucagcagccagaucgagcuggccgugcugcugagcaacgagggcaucaucaacagcgaggacgagcaccugcuggcccuggagagaaagcugaagaagaugcugggccccagcgccguggagaucggcaacggcugcuucgagaccaagcacaagugcaaccagaccugccuggacagaaucgccgccggcaccuucgacgccggcgaguucagccugcccaccuucgacagccugaacaucaccgccgccagccugaacgacaacggccuggacaaccacaccauccugcuguacuacagcaccgccgccagcagccuggccgugacccugaucaucgccaucuucgugguguacauggugagcagagacaacgugagcugcagcaucugccuguga

SEQ ID NO: 187327 - RNA, 1758 nt, Artificial Sequence; identical to SEQ ID NO: 187047
  derived and/or modified CDS sequence (opt4) from hemagglutinin__InfluenzaB__AGX18897

SEQ ID NO: 187328 - RNA, 1758 nt, Artificial Sequence; identical to SEQ ID NO: 186574
  derived and/or modified CDS sequence (opt4) from hemagglutinin__InfluenzaB__AGX18908

SEQ ID NO: 187329 - RNA, 1758 nt, Artificial Sequence; identical to SEQ ID NO: 186574
  derived and/or modified CDS sequence (opt4) from hemagglutinin__InfluenzaB__AGX18919

SEQ ID NO: 187330 - RNA, 1758 nt, Artificial Sequence
  derived and/or modified CDS sequence (opt4) from hemagglutinin__InfluenzaB__AGX18930
augaaggccaucaucgugcugcugaugguggugaccagcaacgccgacagaaucugcaccggcaucaccagcagcaacagcccccacguggugaagaccgccacccagggcgaggugaacgugaccggcgugaucccccugaccaccacccccaccaagagccacuucgccaaccugaagggcaccgagaccagaggcaagcugugccccaagugccugaacugcaccgaccuggacguggcccugggcagacccaagugcaccggcaacauccccagcgccagagugagcauccugcacgaggugagacccgugaccagcggcugcuuccccaucaugcacgacagaaccaagaucagacagcugcccaaccugcugagaggcuacgagcacaucagacugagcacccacaacgugaucaacgccgagaacgcccccggcggccccuacaagaucggcaccagcggcagcugccccaacgugaccaacggcaacggcuucuucgccaccauggccugggccgugcccaagaacgacaacaacaagaccgccaccaacagccugaccaucgaggugcccuacaucugcaccgagggcgaggaccagaucaccguguggggcuuccacagcgacaacgagacccagauggccaagcuguacggcgacagcaagccccagaaguucaccagcagcgccaacggcgugaccacccacuacgugagccagaucggcggcuuccccaaccagaccgaggacggcggccugccccagagcggcagaaucgugguggacuacauggugcagaagagcggcaagaccggcaccaucaccuaccagagaggcauccugcugccccagaagguguggugcgccagcggcagaagcaaggugaucaagggcagccugccccugaucggcgaggccgacugccugcacgagaaguacggcggccugaacaagagcaagcccuacuacaccggcgagcacgccaaggccaucggcaacugccccaucugggugaagaccccccugaagcuggccaacggcaccaaguacagaccccccgccaagcugcugaaggagagaggcuucuucggcgccaucgccggcuuccuggagggcggcugggagggcaugaucgccggcuggcacggcuacaccagccacggcgcccacggcguggccguggccgccgaccugaagagcacccaggaggccaucaacaagaucaccaagaaccugaacagccugagcgagcuggaggugaagaaccugcagagacugagcggcgccauggacgagcugcacaacgagauccuggagcuggacgagaagguggacgaccugagagccgacaccaucagcagccagaucgagcuggccgugcugcugagcaacgagggcaucaucaacagcgaggacgagcaccugcuggcccuggagagaaagcugaagaagaugcugggccccagcgccguggagaucggcaacggcugcuucgagaccaagcacaagugcaaccagaccugcaucgacagaaucgccgccggcaccuucgacgccggcgaguucagccugcccaccuucgacagccugaacaucaccgccgccagccugaacgacgacggccuggacaaccacaccauccugcuguacuacagcaccgccgccagcagccuggccgugacccugaugaucgccaucuucgugguguacauggugagcagagacaacgugagcugcagcaucugccuguga

SEQ ID NO: 187331 - RNA, 1758 nt, Artificial Sequence; identical to SEQ ID NO: 186574
  derived and/or modified CDS sequence (opt4) from hemagglutinin__InfluenzaB__AGX18941

SEQ ID NO: 187332 - RNA, 1758 nt, Artificial Sequence; identical to SEQ ID NO: 186574
  derived and/or modified CDS sequence (opt4) from hemagglutinin__InfluenzaB__AGX18952

SEQ ID NO: 187333 - RNA, 1758 nt, Artificial Sequence; identical to SEQ ID NO: 186574
  derived and/or modified CDS sequence (opt4) from hemagglutinin__InfluenzaB__AGX18963

SEQ ID NO: 187334 - RNA, 1758 nt, Artificial Sequence
  derived and/or modified CDS sequence (opt4) from hemagglutinin__InfluenzaB__AGX18974
augaaggccaucaucgugcugcugaugguggugaccagcaacgccgacagaaucugcaccggcaucaccagcagcaacagcccccacguggugaagaccgccacccagggcgaggugaacgugaccggcgugaucccccugaccaccacccccaccaagagccacuucgccaaccugaagggcaccgagaccagaggcaagcugugccccaagugccugaacugcaccgaccuggacguggcccugggcagacccaagugcaccggcaacauccccagcgccagagugagcauccugcacgaggugagacccgugaccagcggcugcuuccccaucaugcacgacagaaccaagaucagacagcugcccaaccugcugagaggcuacgagcacaucagacugagcacccacaacgugaucaacgccgagaacgcccccggcggccccuacaagaucggcaccagcggcagcugccccaacgugaccaacggcaacggcuucuucgccaccauggccugggccgugcccaagaacgacaacaacaagaccgccaccaacagccugaccaucgaggugcccuacaucugcaccgagggcgaggaccagaucaccguguggggcuuccacagcgacaacgagacccagauggccaagcuguacggcgacagcaagccccagaaguucaccagcagcgccaacggcgugaccacccacuacgugagccagaucggcggcuuccccaaccagaccgaggacggcggccugccccagagcggcagaaucgugguggacuacauggugcagaagagcggcaagaccggcaccaucaccuaccagagaggcauccugcugccccagaagguguggugcgccagcggcagaagcaaggugaucaagggcagccugccccugaucggcgaggccgacugccugcacgagaaguacggcggccugaacaagagcaagcccuacuacaccggcgagcacgccaaggccaucggcaacugccccaucugggugaagaccccccugaagcuggccaacggcaccaaguacagaccccccgccaagcugcugaaggagagaggcuucuucggcgccaucgccggcuuccuggagggcggcugggagggcaugaucgccggcuggcacggcuacaccagccacggcgcccacggcguggccguggccgccgaccugaagagcacccaggaggccaucaacaagaucaccaagaaccugaacagccugagcgagcuggaggugaagaaccugcagagacugagcggcgccauggacgagcugcacaacgagauccuggagcuggacgagaagguggacgaccugagagccgacaccaucagcagccagaucgagcuggccgugcugcugagcaacgagggcaucaucaacagcgaggacgagcaccugcuggcccuggagaagaagcugaagaagaugcugggccccagcgccguggagaucggcaacggcugcuucgagaccaagcacaagugcaaccagaccugccuggacagaaucgccgccggcaccuucgacgccggcgaguucagccugcccaccuucgacagccugaacaucaccgccgccagccugaacgacgacggccuggacaaccacaccauccugcuguacuacagcaccgccgccagcagccuggccgugacccugaugaucgccaucuucgugguguacauggugagcagagacaacgugagcugcagcaucugccuguga

SEQ ID NO: 187335 - RNA, 1758 nt, Artificial Sequence; identical to SEQ ID NO: 186574
  derived and/or modified CDS sequence (opt4) from hemagglutinin__InfluenzaB__AGX18985

SEQ ID NO: 187336 - RNA, 1758 nt, Artificial Sequence
  derived and/or modified CDS sequence (opt4) from hemagglutinin__InfluenzaB__AGX18996
augaaggccaucaucgugcugcugaugguggugaccagcaacgccgacagaaucugcaccggcaucaccagcagcaacagcccccacguggugaagaccgccacccagggcgaggugaacgugaccggcgugaucccccugaccaccacccccaccaagagccacuucgccaaccugaagggcaccgagaccagaggcaagcugugccccaagugccugaacugcaccgaccuggacguggcccugggcagacccaagugcaccggcaacacccccagcgccagagugagcauccugcacgaggugagacccgugaccagcggcugcuuccccaucaugcacgacagaaccaagaucagacagcugcccaaccugcugagaggcuacgagcacaucagacugagcacccacaacgugaucaacgccgagaacgcccccggcggccccuacaagaucggcaccagcggcagcugccccaacgugaccaacggcaacggcuucuucgccaccauggccugggccgugcccaagaacgacaacaacaagaccgccaccaacagccugaccaucgaggugcccuacaucugcaccgagggcgaggaccagaucaccguguggggcuuccacagcgacaacggcacccagauggccaagcuguacggcgacagcaagccccagaaguucaccagcagcgccaacggcgugaccacccacuacgugagccagaucggcggcuuccccaaccagaccgaggacggcggccugccccagagcggcagaaucgugguggacuacauggugcagaagagcggcaagaccggcaccaucaccuaccagagaggcauccugcugccccagaagguguggugcgccagcggcagaagcaaggugaucaagggcagccugccccugaucggcgaggccgacugccugcacgagaaguacggcggccugaacaagagcaagcccuacuacaccggcgagcacgccaaggccaucggcaacugccccaucugggugaagaccccccugaagcuggccaacggcaccaaguacagaccccccgccaagcugcugaaggagagaggcuucuucggcgccaucgccggcuuccuggagggcggcugggagggcaugaucgccggcuggcacggcuacaccagccacggcgcccacggcguggccguggccgccgaccugaagagcacccaggaggccaucaacaagaucaccaagaaccugaacagccugagcgagcuggaggugaagaaccugcagagacugagcggcgccauggacgagcugcacaacgagauccuggagcuggacgagaagguggacgaccugagagccgacaccaucagcagccagaucgagcuggccgugcugcugagcaacgagggcaucaucaacagcgaggacgagcaccugcuggcccuggagagaaagcugaagaagaugcugggccccagcgccguggagaucggcaacggcugcuucgagaccaagcacaagugcaaccagaccugccuggacagaaucgccgccggcaccuucgacgccggcgaguucagccugcccaccuucgacagccugaacaucaccgccgccagccugaacgacgacggccuggacaaccacaccauccugcuguacuacagcaccgccgccagcagccuggccgugacccugaugaucgccaucuucgugguguacauggugagcagagacaacgugagcugcagcaucugccuguga

SEQ ID NO: 187337 - RNA, 1758 nt, Artificial Sequence; identical to SEQ ID NO: 186574
  derived and/or modified CDS sequence (opt4) from hemagglutinin__InfluenzaB__AGX19007

SEQ ID NO: 187338 - RNA, 1758 nt, Artificial Sequence
  derived and/or modified CDS sequence (opt4) from hemagglutinin__InfluenzaB__AGX19018
augaaggccaucaucgugcugcugaugguggugaccagcaacgccgacagaaucugcaccggcaucaccagcagcaacagcccccacguggugaagaccgccacccagggcgaggugaacgugaccggcgugaucccccugaccaccacccccaccaagagccacuucgccaaccugaagggcaccgagaccagaggcaagcugugccccaagugccugaacugcaccgaccuggacguggcccugggcagacccaagugcaccggcaacauccccagcgccagagugagcauccugcacgaggugagacccgugaccagcggcugcuuccccaucaugcacgacagaaccaagaucagacagcugcccaacuuccugagaggcuacgagcacaucagacugagcacccacaacgugaucaacgccgagaacgcccccggcggccccuacaagaucggcaccagcggcagcugccccaacgugaccaacggcaacggcuucuucgccaccauggccugggccgugcccaagaacgacaacaacaagaccgccaccaacagccugaccaucgaggugcccuacaucugcaccgagggcgaggaccagaucaccguguggggcuuccacagcgacagcgagacccagauggccaagcuguacggcgacagcaagccccagaaguucaccagcagcgccaacggcgugaccacccacuacgugagccagaucggcggcuuccccaaccagaccgaggacggcggccugccccagagcggcagaaucgugguggacuacauggugcagaagagcggcaagaccggcaccaucaccuaccagagaggcauccugcugccccagaagguguggugcgccagcggcagaagcaaggugaucaagggcagccugccccugaucggcgaggccgacugccugcacgagaaguacggcggccugaacaagagcaagcccuacuacaccggcgagcacgccaaggccaucggcaacugccccaucugggugaagaccccccugaagcuggccaacggcaccaaguacagaccccccgccaagcugcugaaggagagaggcuucuucggcgccaucgccggcuuccuggagggcggcugggagggcaugaucgccggcuggcacggcuacaccagccacggcgcccacggcguggccguggccgccgaccugaagagcacccaggaggccaucaacaagaucaccaagaaccugaacagccugagcgagcuggaggugaagaaccugcagagacugagcggcgccauggacgagcugcacaacgagauccuggagcuggacgagaagguggacgaccugagagccgacaccaucagcagccagaucgagcuggccgugcugcugagcaacgagggcaucaucaacagcgaggacgagcaccugcuggcccuggagagaaagcugaagaagaugcugggccccagcgccguggagaucggcaacggcugcuucgagaccaagcacaagugcaaccagaccugccuggacagaaucgccgccggcaccuucgacgccggcgaguucagccugcccaccuucgacagccugaacaucaccgccgccagccugaacgacgacggccuggacaaccacaccauccugcuguacuacagcaccgccgccagcagccuggccgugacccugaugaucgccaucuucgugguguacauggugagcagagacaacgugagcugcagcaucugccuguga

SEQ ID NO: 187339 - RNA, 1758 nt, Artificial Sequence; identical to SEQ ID NO: 187237
  derived and/or modified CDS sequence (opt4) from hemagglutinin__InfluenzaB__AGX19029

SEQ ID NO: 187340 - RNA, 1758 nt, Artificial Sequence; identical to SEQ ID NO: 186574
  derived and/or modified CDS sequence (opt4) from hemagglutinin__InfluenzaB__AGX19040

SEQ ID NO: 187341 - RNA, 1758 nt, Artificial Sequence
  derived and/or modified CDS sequence (opt4) from hemagglutinin__InfluenzaB__AGX19051
augaaggccaucaucgugcugcugaugguggugaccagcaacgccgacagaaucugcaccggcaucaccagcagcaacagcccccacguggugaagaccgccacccagggcgaggugaacgugaccggcgugaucccccugaccaccacccccaccaagagccacuucgccaaccugaagggcaccgagaccagaggcaagcugugccccaagugccugaacugcaccgaccuggacguggcccugggcagacccaagugcaccggcaacauccccagcgccagagugagcauccugcacgaggugagacccgugaccagcggcugcuuccccaucaugcacgacagaaccaagaucagacagcugcccaaccugcugagaggcuacgagcacaucagacugagcacccacaacgugaucaacaccgagaacgcccccggcggccccuacaagaucggcaccagcggcagcugccccaacgugaccaacggcaacggcuucuucgccaccauggccugggccgugcccaagaacgacaacaacaagaccgccaccaacagccugaccaucgaggugcccuacaucugcaccgagggcgaggaccagaucaccguguggggcuuccacagcgacagcgagacccagauggccaagcuguacggcgacagcaagccccagaaguucaccagcagcgccaacggcgugaccacccacuacgugagccagaucggcggcuuccccaaccagaccgaggacggcggccugccccagagcggcagaaucgugguggacuacauggugcagaagagcggcaagaccggcaccaucaccuaccagagaggcauccugcugccccagaagguguggugcgccagcggcagaagcaaggugaucaagggcagccugccccugaucggcgaggccgacugccugcacgagaaguacggcggccugaacaagagcaagcccuacuacaccggcgagcacgccaaggccaucggcaacugccccaucugggugaagaccccccugaagcuggccaacggcaccaaguacagaccccccgccaagcugcugaaggagagaggcuucuucggcgccaucgccggcuuccuggagggcggcugggagggcaugaucgccggcuggcacggcuacaccagccacggcgcccacggcguggccguggccgccgaccugaagagcacccaggaggccaucaacaagaucaccaagaaccugaacagccugagcgagcuggaggugaagaaccugcagagacugagcggcgccauggacgagcugcacaacgagauccuggagcuggacgagaagguggacgaccugagagccgacaccaucagcagccagaucgagcuggccgugcugcugagcaacgagggcaucaucaacagcgaggacgagcaccugcuggcccuggagagaaagcugaagaagaugcugggccccagcgccguggagaucggcaacggcugcuucgagaccaagcacaagugcaaccagaccugccuggacagaaucgccgccggcaccuucgacgccggcgaguucagccugcccaccuucgacagccugaacaucaccgccgccagccugaacgacgacggccuggacaaccacaccauccugcuguacuacagcaccgccgccagcagccuggccgugacccugaugaucgccaucuucgugguguacauggugagcagagacaacgugagcugcagcaucugccuguga

SEQ ID NO: 187342 - RNA, 1758 nt, Artificial Sequence
  derived and/or modified CDS sequence (opt4) from hemagglutinin__InfluenzaB__AGX19062
augaaggccaucaucgugcugcugaugguggugaccagcaacgccgacagaaucugcaccggcaucaccagcagcaacagcccccacguggugaagaccgccacccagggcgaggugaacgugaccggcgugaucccccugaccaccacccccaccaagagccacuucgccaaccugaagggcaccgagaccagaggcaagcugugccccaagugccugaacugcaccgaccuggacguggcccugggcagacccaagugcaccggcaacauccccagcgccagagugagcauccugcacgaggugagacccgugaccagcggcugcuuccccaucaugcacgacagaaccaagaucagacagcugcccaaccugcugagaggcuacgagcacaucagacugagcacccacaacgugaucaacgccgagaacgcccccggcggccccuacaagaucggcaccagcggcagcugccccaacgugaccaacggcaacggcuucuucgccaccauggccugggccgugcccaagaacgacaacaacaagaccgccaccaacagccugaccaucgaggugcccuacaucugcaccgagggcgaggaccagaucaccguguggggcuuccacagcgacaacgagacccagauggccaagcuguacggcgacagcaagccccagaaguucaccagcagcgccaacggcgugaccacccacuacgugagccagaucggcggcuuccccaaccagaccgaggacggcggccugccccagagcggcagaaucgugguggacuacauggugcagaagagcggcaagaccggcaccaucaccuaccagagaggcauccugcugccccagaagguguggugcgccagcggcagaagcaaggugaucaagggcagccugccccugaucggcgaggccgacugccugcacgagaaguacggcggccugaacaagagcaagcccuacuacaccggcgagcacgccaaggccaucggcaacugccccaucugggugaagaccccccugaagcuggccaacggcaccaaguacagaccccccgccaagcugcugaaggagagaggcuucuucggcgccaucgccggcuuccuggagggcggcugggagggcaugaucgccggcuggcacggcuacaccagccacggcgcccacggcguggccguggccgccgaccugaagagcacccaggaggccaucaacaagaucaccaagaacuucaacagccugagcgagcuggaggugaagaaccugcagagacugagcggcgccauggacgagcugcacaacgagauccuggagcuggacgagaagguggacgaccugagagccgacaccaucagcagccagaucgagcuggccgugcugcugagcaacgagggcaucaucaacagcgaggacgagcaccugcuggcccuggagagaaagcugaagaagaugcugggccccagcgccguggagaucggcaacggcugcuucgagaccaagcacaagugcaaccagaccugccuggacagaaucgccgccggcaccuucgacgccggcgaguucagccugcccaccuucgacagccugaacaucaccgccgccagccugaacgacgacggccuggacaaccacaccauccugcuguacuacagcaccgccgccagcagccuggccgugacccugaugaucgccaucuucgugguguacauggugagcagagacaacgugagcugcagcaucugccuguga

SEQ ID NO: 187343 - RNA, 1758 nt, Artificial Sequence; identical to SEQ ID NO: 186574
  derived and/or modified CDS sequence (opt4) from hemagglutinin__InfluenzaB__AGX19073

SEQ ID NO: 187344 - RNA, 1758 nt, Artificial Sequence
  derived and/or modified CDS sequence (opt4) from hemagglutinin__InfluenzaB__AGX19084
augaaggccaucaucgugcugcugaugguggugaccagcaacgccgacagaaucugcaccggcaucaccagcagcaacagcccccacguggugaagaccgccacccagggcgaggugaacgugaccggcgugaucccccugaccaccacccccaccaagagccacuucgccaaccugaagggcaccgagaccagaggcaagcugugccccaagugccugaacugcaccgaccuggacguggcccugggcagacccaagugcaccggcaacauccccagcgccagagugagcauccugcacgaggugagacccgugaccagcggcugcuuccccaucaugcacgacagaaccaagaucagacagcugcccaaccugcugagaggcuacgagcacaucaagcugagcacccacaacgugaucaacgccgagaacgcccccggcggccccuacaagaucggcaccagcggcagcugccccaacgugaccaacggcaacggcuucuucgccaccauggccugggccgugcccaagaacgacaacaacaagaccgccaccaacagccugaccaucgaggugcccuacaucugcaccgagggcgaggaccagaucaccguguggggcuuccacagcgacaacgagaaccagauggccaagcuguacggcgacagcaagccccagaaguucaccagcagcgccaacggcgugaccacccacuacgugagccagaucggcggcuuccccaaccagaccgaggacggcggccugccccagagcggcagaaucgugguggacuacauggugcagaagagcggcaagaccggcaccaucaccuaccagagaggcauccugcugccccagaagguguggugcgccagcggcagaagcaaggugaucaagggcagccugccccugaucggcgaggccgacugccugcacgagaaguacggcggccugaacaagagcaagcccuacuacaccggcgagcacgccaaggccaucggcaacugccccaucugggugaagaccccccugaagcuggccaacggcaccaaguacagaccccccgccaagcugcugaaggagagaggcuucuucggcgccaucgccggcuuccuggagggcggcugggagggcaugaucgccggcuggcacggcuacaccagccacggcgcccacggcguggccguggccgccgaccugaagagcacccaggaggccaucaacaagaucaccaagaaccugaacagccugagcgagcuggaggugaagaaccugcagagacugagcggcgccauggacgagcugcacaacgagauccuggagcuggacgagaagguggacgaccugagagccgacaccaucagcagccagaucgagcuggccgugcugcugagcaacgagggcaucaucaacagcgaggacgagcaccugcuggcccuggagagaaagcugaagaagaugcugggccccagcgccguggagaucggcaacggcugcuucgagaccaagcacaagugcaaccagaccugccuggacagaaucgccgccggcaccuucgacgccggcgaguucagccugcccaccuucgacagccugaacaucaccgccgccagccugaacgacgacggccuggacaaccacaccauccugcuguacuacagcaccgccgccagcagccuggccgugacccugaugaucgccaucuucgugguguacauggugagcagagacaacgugagcugcagcaucugccuguga

SEQ ID NO: 187345 - RNA, 1758 nt, Artificial Sequence; identical to SEQ ID NO: 186574
  derived and/or modified CDS sequence (opt4) from hemagglutinin__InfluenzaB__AGX19095

SEQ ID NO: 187346 - RNA, 1758 nt, Artificial Sequence; identical to SEQ ID NO: 187237
  derived and/or modified CDS sequence (opt4) from hemagglutinin__InfluenzaB__AGX19106

SEQ ID NO: 187347 - RNA, 1758 nt, Artificial Sequence; identical to SEQ ID NO: 186574
  derived and/or modified CDS sequence (opt4) from hemagglutinin__InfluenzaB__AGX19117

SEQ ID NO: 187348 - RNA, 1758 nt, Artificial Sequence
  derived and/or modified CDS sequence (opt4) from hemagglutinin__InfluenzaB__AGX19128
augaaggccaucaucgugcugcugaugguggugaccagcaacgccgacagaaucugcaccggcaucaccagcagcaacagcccccacguggugaagaccgccacccagggcgaggugaacgugaccggcgugaucccccugaccaccacccccaccaagagccacuucgccaaccugaagggcaccgagaccagaggcaagcugugccccaagugccugaacugcaccgaccuggacguggcccugggcagacccaagugcaccggcaacacccccagcgccagagugagcauccugcacgaggugagacccgugaccagcggcugcuuccccaucaugcacgacagaaccaagaucagacagcugcccaaccugcugagaggcuacgagcacaucagacugagcacccacaacgugaucaacgccgagaacgcccccggcggccccuacaagaucggcaccagcggcagcugccccaacgugaccaacggcaacggcuucuucgccaccauggccugggccgugcccaagaacgacaacaacaagaccgccaccaacagccugaccaucgaggugcccuacaucugcaccgagggcgaggaccagaucaccguguggggcuuccacagcgacagcgagacccagauggccaagcuguacggcgacagcaagccccagaaguucaccagcagcgccaacggcgugaccacccacuacgugagccagaucggcggcuuccccaaccagaccgaggacggcggccugccccagagcggcagaaucgugguggacuacauggugcagaagagcggcaagaccggcaccaucaccuaccagagaggcauccugcugccccagaagguguggugcgccagcggcagaagcaaggugaucaagggcagccugccccugaucggcgaggccgacugccugcacgagaaguacggcggccugaacaagagcaagcccuacuacaccggcgagcacgccaaggccaucggcaacugccccaucugggugaagaccccccugaagcuggccaacggcaccaaguacagaccccccgccaagcugcugaaggagagaggcuucuucggcgccaucgccggcuuccuggagggcggcugggagggcaugaucgccggcuggcacggcuacaccagccacggcgcccacggcguggccguggccgccgaccugaagagcacccaggaggccaucaacaagaucaccaagaaccugaacagccugagcgagcuggaggugaagaaccugcagagacugagcggcgccauggacgagcugcacaacgagauccuggagcuggacgagaagguggacgaccugagagccgacaccaucagcagccagaucgagcuggccgugcugcugagcaacgagggcaucaucaacagcgaggacgagcaccugcuggcccuggagagaaagcugaagaagaugcugggccccagcgccguggagaucggcaacggcugcuucgagaccaagcacaagugcaaccagaccugccuggacagaaucgccgccggcaccuucgacgccggcgaguucagccugcccaccuucgacagccugaacaucaccgccgccagccugaacgacgacggccuggacaaccacaccauccugcuguacuacagcaccgccgccagcagccuggccgugacccugaugaucgccaucuucgugguguacauggugagcagagacaacgugagcugcagcaucugccuguga

SEQ ID NO: 187349 - RNA, 1758 nt, Artificial Sequence; identical to SEQ ID NO: 186574
  derived and/or modified CDS sequence (opt4) from hemagglutinin__InfluenzaB__AGX19139

SEQ ID NO: 187350 - RNA, 1758 nt, Artificial Sequence; identical to SEQ ID NO: 187047
  derived and/or modified CDS sequence (opt4) from hemagglutinin__InfluenzaB__AGX19150

SEQ ID NO: 187351 - RNA, 1758 nt, Artificial Sequence; identical to SEQ ID NO: 186574
  derived and/or modified CDS sequence (opt4) from hemagglutinin__InfluenzaB__AGX19161

SEQ ID NO: 187352 - RNA, 1758 nt, Artificial Sequence; identical to SEQ ID NO: 187047
  derived and/or modified CDS sequence (opt4) from hemagglutinin__InfluenzaB__AGX19172

SEQ ID NO: 187353 - RNA, 1758 nt, Artificial Sequence
  derived and/or modified CDS sequence (opt4) from hemagglutinin__InfluenzaB__AGX19183
augaaggccaucaucgugcugcugaugguggugaccagcaacgccgacagaaucugcaccggcaucaccagcagcaacagcccccacguggugaagaccgccacccagggcgaggugaacgugaccggcgugaucccccugaccaccacccccaccaagagccacuucgccaaccugaagggcaccgagaccagaggcaagcugugccccaagugccugaacugcaccgaccuggacguggcccugggcagacccaagugcaccggcaacauccccagcgccagagugagcauccugcacgaggugagacccgugaccagcggcugcuuccccaucaugcacgacagaaccaagaucagacagcugcccaaccugcugagaggcuacgagcacaucagacugagcacccacaacgugaucaacgccgagaacgcccccggcggccccuacaagaucggcaccagcggcagcugccccaacgugaccaacggcaacggcuucuucgccaccauggccugggccgugcccaagaacgacaacaacaagaccgccaccaacagccugaccaucgaggugcccuacaucugcaccgagggcgaggaccagaucaccguguggggcuuccacagcgacaccgagacccagauggccaagcuguacggcgacagcaagccccagaaguucaccagcagcgccaacggcgugaccacccacuacgugagccagaucggcggcuuccccaaccagaccgaggacggcggccugccccagagcggcagaaucgugguggacuacauggugcagaagagcggcaagaccggcaccaucaccuaccagagaggcauccugcugccccagaagguguggugcgccagcggcagaagcaaggugaucaagggcagccugccccugaucggcgaggccgacugccugcacgagaaguacggcggccugaacaagagcaagcccuacuacaccggcgagcacgccaaggccaucggcaacugccccaucugggugaagaccccccugaagcuggccaacggcaccaaguacagaccccccgccaagcugcugaaggagagaggcuucuucggcgccaucgccggcuuccuggagggcggcugggagggcaugaucgccggcuggcacggcuacaccagccacggcgcccacggcguggccguggccgccgaccugaagagcacccaggaggccaucaacaagaucaccaagaaccugaacagccugagcgagcuggaggugaagaaccugcagagacugagcggcgccauggacgagcugcacaacgagauccuggagcuggacgagaagguggacgaccugagagccgacaccaucagcagccagaucgagcuggccgugcugcugagcaacgagggcaucaucaacagcgaggacgagcaccugcuggcccuggagagaaagcugaagaagaugcugggccccagcgccguggagaucggcaacggcugcuucgagaccaagcacaagugcaaccagaccugccuggacagaaucgccgccggcaccuucgacgccggcgaguucagccugcccaccuucgacagccugaacaucaccgccgccagccugaacgacgacggccuggacaaccacaccauccugcuguacuacagcaccgccgccagcagccuggccgugacccugaugaucgccaucuucgugguguacauggugagcagagacaacgugagcugcagcaucugccuguga

SEQ ID NO: 187354 - RNA, 1758 nt, Artificial Sequence; identical to SEQ ID NO: 186574
  derived and/or modified CDS sequence (opt4) from hemagglutinin__InfluenzaB__AGX19194

SEQ ID NO: 187355 - RNA, 1758 nt, Artificial Sequence
  derived and/or modified CDS sequence (opt4) from hemagglutinin__InfluenzaB__AGX19205
augaaggccaucaucgugcugcugaugguggugaccagcaacgccgacagagugugcaccggcaucaccagcagcaacagcccccacguggugaagaccgccacccagggcgaggugaacgugaccggcgugaucccccugaccaccacccccaccaagagccacuucgccaaccugaagggcaccgagaccagaggcaagcugugccccaagugccugaacugcaccgaccuggacguggcccugggcagacccaagugcaccggcaacauccccagcgccagagugagcauccugcacgaggugagacccgugaccagcggcugcuuccccaucaugcacgacagaaccaagaucagacagcugcccaaccugcugagaggcuacgagcacaucagacugagcacccacaacgugaucaacgccgagaacgcccccggcggccccuacaagaucggcaccagcggcagcugccccaacgugaccaacggcaacggcuucuucgccaccauggccugggccgugcccaagaacgacaacaacaagaccgccaccaacagccugaccaucgaggugcccuacaucugcaccgagggcgaggaccagaucaccguguggggcuuccacagcgacaacgagacccagauggccaagcuguacggcgacagcaagccccagaaguucaccagcagcgccaacggcgugaccacccacuacgugagccagaucggcggcuuccccaaccagaccgaggacggcggccugccccagagcggcagaaucgugguggacuacauggugcagaagagcggcaagaccggcaccaucaccuaccagagaggcauccugcugccccagaagguguggugcgccagcggcagaagcaaggugaucaagggcagccugccccugaucggcgaggccgacugccugcacgagaaguacggcggccugaacaagagcaagcccuacuacaccggcgagcacgccaaggccaucggcaacugccccaucugggugaagaccccccugaagcuggccaacggcaccaaguacagaccccccgccaagcugcugaaggagagaggcuucuucggcgccaucgccggcuuccuggagggcggcugggagggcaugaucgccggcuggcacggcuacaccagccacggcgcccacggcguggccguggccgccgaccugaagagcacccaggaggccaucaacaagaucaccaagaaccugaacagccugagcgagcuggaggugaagaaccugcagagacugagcggcgccauggacgagcugcacaacgagauccuggagcuggacgagaagguggacgaccugagagccgacaccaucagcagccagaucgagcuggccgugcugcugagcaacgagggcaucaucaacagcgaggacgagcaccugcuggcccuggagagaaagcugaagaagaugcugggccccagcgccguggagaucggcaacggcugcuucgagaccaagcacaagugcaaccagaccugccuggacagaaucgccgccggcaccuucgacgccggcgaguucagccugcccaccuucgacagccugaacaucaccgccgccagccugaacgacgacggccuggacaaccacaccauccugcuguacuacagcaccgccgccagcagccuggccgugacccugaugaucgccaucuucgugguguacauggugagcagagacaacgugagcugcagcaucugccuguga

SEQ ID NO: 187356 - RNA, 1758 nt, Artificial Sequence
  derived and/or modified CDS sequence (opt4) from hemagglutinin__InfluenzaB__AGX19216
augaaggccaucaucgugcugcugaugguggugaccagcaacgccgacagaaucugcaccggcaucaccagcagcaacagcccccacguggugaagaccgccacccagggcgaggugaacgugaccggcgugaucccccugaccaccacccccaccaagagccacuucgccaaccugaagggcaccgagaccagaggcaagcugugccccaagugccugaacugcaccgaccuggacguggcccugggcagacccaagugcaccggcaacauccccagcgccagagugagcauccugcacgaggugagacccgugaccagcggcugcuuccccaucaugcacgacagaaccaagaucagacagcugcccaaccugcugagaggcuacgagcacaucagacugagcacccacaacgugaucaacgccgagaacgcccccggcggccccuacaagaucggcaccagcggcagcugccccaacgugaccaacggcaacggcuucuucgccaccauggccugggccgugcccaagaacgacaacaacaagaccgccaccaacagccugaccaucgaggugcccuacaucugcaccgagggcgaggaccagaucaccguguggggcuuccacagcgacaacgagacccagauggccaagcuguacggcgacagcaagccccagaaguucaccagcagcgccaacggcgugaccacccacuacgugagccagaucggcggcuuccccaaccagaccgaggacggcggccugccccagagcggcagaaucgugguggacuacauggugcagaagagcggcaagcccggcaccaucaccuaccagagaggcauccugcugccccagaagguguggugcgccagcggcagaagcaaggugaucaagggcagccugccccugaucggcgaggccgacugccugcacgagaaguacggcggccugaacaagagcaagcccuacuacaccggcgagcacgccaaggccaucggcaacugccccaucugggugaagaccccccugaagcuggccaacggcaccaaguacagaccccccgccaagcugcugaaggagagaggcuucuucggcgccaucgccggcuuccuggagggcggcugggagggcaugaucgccggcuggcacggcuacaccagccacggcgcccacggcguggccguggccgccgaccugaagagcacccaggaggccaucaacaagaucaccaagaaccugaacagccugagcgagcuggaggugaagaaccugcagagacugagcggcgccauggacgagcugcacaacgagauccuggagcuggacgagaagguggacgaccugagagccgacaccaucagcagccagaucgagcuggccgugcugcugagcaacgagggcaucaucaacagcgaggacgagcaccugcuggcccuggagagaaagcugaagaagaugcugggccccagcgccguggagaucggcaacggcugcuucgagaccaagcacaagugcaaccagaccugccuggacagaaucgccgccggcaccuucgacgccggcgaguucagccugcccaccuucgacagccugaacaucaccgccgccagccugaacgacgacggccuggacaaccacaccauccugcuguacuacagcaccgccgccagcagccuggccgugacccugaugaucgccaucuucgugguguacauggugagcagagacaacgugagcugcagcaucugccuguga

SEQ ID NO: 187357 - RNA, 1758 nt, Artificial Sequence
  derived and/or modified CDS sequence (opt4) from hemagglutinin__InfluenzaB__AGX19227
augaaggccaucaucgugcugcugaugguggugaccagcaacgccgacagaaucugcaccggcaucaccagcagcaacagcccccacguggugaagaccgccacccagggcgaggugaacgugaccggcgugaucccccugaccaccacccccaccaagagccacuucgccaaccugaagggcaccgagaccagaggcaagcugugcccccagugccugaacugcaccgaccuggacguggcccugggcagacccaagugcaccggcaacauccccagcgccagagugagcauccugcacgaggugagacccgugaccagcggcugcuuccccaucaugcacgacagaaccaagaucagacagcugcccaaccugcugagaggcuacgagcacaucagacugagcacccacaacgugaucaacgccgagaacgcccccggcggccccuacaagaucggcaccagcggcagcugccccaacgugaccaacggcaacggcuucuucgccaccauggccugggccgugcccaagagcgacaacaacaagaccgccaccaacagccugaccaucgaggugcccuacaucugcaccgagggcgaggaccagaucaccguguggggcuuccacagcgacaacgagacccagauggccaagcuguacggcgacagcaagccccagaaguucaccagcagcgccaacggcgugaccacccacuacgugagccagaucggcggcuuccccaaccagaccgaggacggcggccugccccagagcggcagaaucgugguggacuacauggugcagaagagcggcaagaccggcaccaucaccuaccagagaggcauccugcugccccagaagguguggugcgccagcggcagaagcaaggugaucaagggcagccugccccugaucggcgaggccgacugccugcacgagaaguacggcggccugaacaagagcaagcccuacuacaccggcgagcacgccaaggccaucggcaacugccccaucugggugaagaccccccugaagcuggccaacggcaccaaguacagaccccccgccaagcugcugaaggagagaggcuucuucggcgccaucgccggcuuccuggagggcggcugggagggcaugaucgccggcuggcacggcuacaccagccacggcgcccacggcguggccguggccgccgaccugaagagcacccaggaggccaucaacaagaucaccaagaaccugaacagccugagcgagcuggaggugaagaaccugcagagacugagcggcgccauggacgagcugcacaacgagauccuggagcuggacgagaagguggacgaccugagagccgacaccaucagcagccagaucgagcuggccgugcugcugagcaacgagggcaucaucaacagcgaggacgagcaccugcuggcccuggagagaaagcugaagaagaugcugggccccagcgccguggagaucggcaacggcugcuucgagaccaagcacaagugcaaccagaccugccuggacagaaucgccgccggcaccuucgacgccggcgaguucagccugcccaccuucgacagccugaacaucaccgccgccagccugaacgacgacggccuggacaaccacaccauccugcuguacuacagcaccgccgccagcagccuggccgugacccugaugaucgccaucuucgugguguacauggugagcagagacaacgugagcugcagcaucugccuguga

SEQ ID NO: 187358 - RNA, 1758 nt, Artificial Sequence
  derived and/or modified CDS sequence (opt4) from hemagglutinin__InfluenzaB__AGX19238
augaaggccaucaucgugcugcugaugguggugaccagcaacgccgacagaaucugcaccggcaucaccagcagcaacagcccccacguggugaagaccgccacccagggcgaggugaacgugaccggcgugaucccccugaccaccacccccaccaagagccacuucgccaaccugaagggcaccgagaccagaggcaagcugugccccaagugccugaacugcaccgaccuggacguggcccugggcagacccaagugcaccggcaacauccccagcgccagagugagcauccugcacgaggugagacccgugaccagcggcugcuuccccaucaugcacgacagaaccaagaucagacagcugcccaaccugcugagaggcuacgagcacaucagacugagcacccacaacgugaucaacgccgagaacgcccccggcggccccuacaagaucggcaccagcggcagcugccccaacgugaccaacggcaacggcuucuucgccaccauggccugggccgugcccaagaacgacaagaacaagaccgccaccaacagccugaccaucgaggugcccuacaucugcaccgagggcgaggaccagaucaccguguggggcuuccacagcgacaacgagacccagauggccaagcuguacggcgacagcaagccccagaaguucaccagcagcgccaacggcgugaccacccacuacgugagccagaucggcggcuuccccaaccagaccgaggacggcggccugccccagagcggcagaaucgugguggacuacauggugcagaagagcggcaagaccggcaccaucaccuaccagagaggcauccugcugccccagaagguguggugcgccagcggcagaagcaaggugaucaagggcagccugccccugaucggcgaggccgacugccugcacgagaaguacggcggccugaacaagagcaagcccuacuacaccggcgagcacgccaaggccaucggcaacugccccaucugggugaagaccccccugaagcuggccaacggcaccaaguacagaccccccgccaagcugcugaaggagagaggcuucuucggcgccaucgccggcuuccuggagggcggcugggagggcaugaucgccggcuggcacggcuacaccagccacggcgcccacggcguggccguggccgccgaccugaagagcacccaggaggccaucaacaagaucaccaagaaccugaacagccugagcgagcuggaggugaagaaccugcagagacugagcggcgccauggacgagcugcacaacgagauccuggagcuggacgagaagguggacgaccugagagccgacaccaucagcagccagaucgagcuggccgugcugcugagcaacgagggcaucaucaacagcgaggacgagcaccugcuggcccuggagagaaagcugaagaagaugcugggccccagcgccguggagaucggcaacggcugcuucgagaccaagcacaagugcaaccagaccugccuggacagaaucgccgccggcaccuucgacgccggcgaguucagccugcccaccuucgacagccugaacaucaccgccgccagccugaacgacgacggccuggacaaccacaccauccugcuguacuacagcaccgccgccagcagccuggccgugacccugaugaucgccaucuucgugguguacauggugagcagagacaacgugagcugcagcaucugccuguga

SEQ ID NO: 187359 - RNA, 1758 nt, Artificial Sequence; identical to SEQ ID NO: 187358
  derived and/or modified CDS sequence (opt4) from hemagglutinin__InfluenzaB__AGX19249

SEQ ID NO: 187360 - RNA, 1758 nt, Artificial Sequence; identical to SEQ ID NO: 186574
  derived and/or modified CDS sequence (opt4) from hemagglutinin__InfluenzaB__AGX19260

SEQ ID NO: 187361 - RNA, 1758 nt, Artificial Sequence; identical to SEQ ID NO: 186574
  derived and/or modified CDS sequence (opt4) from hemagglutinin__InfluenzaB__AGX19271

SEQ ID NO: 187362 - RNA, 1758 nt, Artificial Sequence
  derived and/or modified CDS sequence (opt4) from hemagglutinin__InfluenzaB__AGX19282
augaaggccaucaucgugcugcugaugguggugaccagcaacgccgacagaaucugcaccggcaucaccagcagcaacagcccccacguggugaagaccgccacccagggcgaggugaacgugaccggcgugaucccccugaccaccacccccaccaagagccacuucgccaaccugaagggcaccgagaccagaggcaagcugugccccaagugccugaacugcaccgaccuggacguggcccugggcagacccaagugcaccggcaacauccccagcgccagagugagcauccugcacgaggugagacccgugaccagcggcugcuuccccaucaugcacgacagaaccaagaucagacagcugcccaaccugcugagaggcuacgagcacaucagacugagcacccacaacgugaucaacgccgagaacgcccccggcggccccuacaagaucggcaccagcggcagcugccccaacgugaccaacggcaacggcuucuucgccaccauggccugggccgugcccaagaacgacaacaacaagaccgccaccaacagccugaccaucgaggugcccuacaucugcaccgagggcgaggaccagaucaccguguggggcuuccacagcgacaacgagacccagauggccaagcuguacggcgacagcaagccccagaaguucaccagcagcgccaacggcgugaccacccacuacgugagccagaucggcggcuuccccaaccagaccgaggacggcggccugccccagagcggcagaaucgugguggacuacauggugcagaagagcggcaagaccggcaccaucaccuaccagagaggcauccugcugccccagaagguguggugcaccagcggcagaagcaaggugaucaagggcagccugccccugaucggcgaggccgacugccugcacgagaaguacggcggccugaacaagagcaagcccuacuacaccggcgagcacgccaaggccaucggcaacugccccaucugggugaagaccccccugaagcuggccaacggcaccaaguacagaccccccgccaagcugcugaaggagagaggcuucuucggcgccaucgccggcuuccuggagggcggcugggagggcaugaucgccggcuggcacggcuacaccagccacggcgcccacggcguggccguggccgccgaccugaagagcacccaggaggccaucaacaagaucaccaagaaccugaacagccugagcgagcuggaggugaagaaccugcagagacugagcggcgccauggacgagcugcacaacgagauccuggagcuggacgagaagguggacgaccugagagccgacaccaucagcagccagaucgagcuggccgugcugcugagcaacgagggcaucaucaacagcgaggacgagcaccugcuggcccuggagagaaagcugaagaagaugcugggccccagcgccguggagaucggcaacggcugcuucgagaccaagcacaagugcaaccagaccugccuggacagaaucgccgccggcaccuucgacgccggcgaguucagccugcccaccuucgacagccugaacaucaccgccgccagccugaacgacgacggccuggacaaccacaccauccugcuguacuacagcaccgccgccagcagccuggccgugacccugaugaucgccaucuucgugguguacauggugagcagagacaacgugagcugcagcaucugccuguga

SEQ ID NO: 187363 - RNA, 1758 nt, Artificial Sequence
  derived and/or modified CDS sequence (opt4) from hemagglutinin__InfluenzaB__AGX19304
augaaggccaucaucgugcugcugaugguggugaccagcaacgccgacagaaucugcaccggcaucaccagcagcaacagcccccacguggugaagaccgccacccagggcgaggugaacgugaccggcgugaucccccugaccaccacccccaccaagagccacuucgccaaccugaagggcaccgagaccagaggcaagcugugccccaagugccugaacugcaccgaccuggacguggcccugggcagacccaagugcaccggcaacauccccagcgccagagugagcauccugcacgaggugagacccgugaccagcggcugcuuccccaucaugcacgacagaaccaagaucagacagcugcccaaccugcugagaggcuacgagcacaucagacugagcacccacaacgugaucaacgccgagaacgcccccggcggccccuacaagaucggcaccagcggcagcugccccaacgugaccaacggcaacggcuucuucgccaccauggccugggccgugcccaagaacgacaacaacaagaccgccaucaacagccugaccaucgaggugcccuacaucugcaccgagggcgaggaccagaucaccguguggggcuuccacagcgacaacgagacccagauggccaagcuguacggcgacagcaagccccagaaguucaccagcagcgccaacggcgugaccacccacuacgugagccagaucggcggcuuccccaaccagaccgaggacggcggccugccccagagcggcagaaucgugguggacuacauggugcagaagagcggcaagaccggcaccaucaccuaccagagaggcauccugcugccccagaagguguggugcgccagcggcagaagcaaggugaucaagggcagccugccccugaucggcgaggccgacugccugcacgagaaguacggcggccugaacaagagcaagcccuacuacaccggcgagcacgccaaggccaucggcaacugccccaucugggugaagaccccccugaagcuggccaacggcaccaaguacagaccccccgccaagcugcugaaggagagaggcuucuucggcgccaucgccggcuuccuggagggcggcugggagggcaugaucgccggcuggcacggcuacaccagccacggcgcccacggcguggccguggccgccgaccugaagagcacccaggaggccaucaacaagaucaccaagaaccugaacagccugagcgagcuggaggugaagaaccugcagagacugagcggcgccauggacgagcugcacaacgagauccuggagcuggacgagaagguggacgaccugagagccgacaccaucagcagccagaucgagcuggccgugcugcugagcaacgagggcaucaucaacagcgaggacgagcaccugcuggcccuggagagaaagcugaagaagaugcugggccccagcgccguggagaucggcaacggcugcuucgagaccaagcacaagugcaaccagaccugccuggacagaaucgccgccggcaccuucgacgccggcgaguucagccugcccaccuucgacagccugaacaucaccgccgccagccugaacgacgacggccuggacaaccacaccauccugcuguacuacagcaccgccgccagcagccuggccgugacccugaugaucgccaucuucgugguguacauggugagcagagacaacgugagcugcagcaucugccuguga

SEQ ID NO: 187364 - RNA, 1758 nt, Artificial Sequence; identical to SEQ ID NO: 187363
  derived and/or modified CDS sequence (opt4) from hemagglutinin__InfluenzaB__AGX19315

SEQ ID NO: 187365 - RNA, 1758 nt, Artificial Sequence; identical to SEQ ID NO: 187362
  derived and/or modified CDS sequence (opt4) from hemagglutinin__InfluenzaB__AGX19326

SEQ ID NO: 187366 - RNA, 1758 nt, Artificial Sequence; identical to SEQ ID NO: 187362
  derived and/or modified CDS sequence (opt4) from hemagglutinin__InfluenzaB__AGX19337

SEQ ID NO: 187367 - RNA, 1758 nt, Artificial Sequence
  derived and/or modified CDS sequence (opt4) from hemagglutinin__InfluenzaB__AGX19348
augaaggccaucaucgugcugcugaugguggugaccagcaacgccgacagaaucugcaccggcaucaccagcagcaacagcccccacguggugaagaccgccacccagggcgaggugaacgugaccggcgugaucccccugaccaccacccccaccaagagccacuucgccaaccugaagggcaccgagaccagaggcaagcugugccccaagugccugaacugcaccgaccuggacguggcccugggcagacccaagugcaccggcaacauccccagcgccagagugagcauccugcacgaggugagacccgugaccagcggcugcuuccccaucaugcacgacagaaccaagaucagacagcugcccaaccugcugagaggcuacgagcacaucagacugagcacccacaacgugaucaacgccgagaacgcccccggcggccccuacaagaucggcaccagcggcagcugccccaacgugaccaacggcaacggcuucuucgccaccauggccugggccgugcccaagaacgacaacaacaagaccgccaccaacagccugaccaucgaggugcccuacaucugcaccgagggcgaggaccagaucaccguguggggcuuccacagcgacaacgaggcccagauggccaagcuguacggcgacagcaagccccagaaguucaccagcagcgccaacggcgugaccacccacuacgugagccagaucggcggcuuccccaaccagaccgaggacggcggccugccccagagcggcagaaucgugguggacuacauggugcagaagagcggcaagaccggcaccaucaccuaccagagaggcauccugcugccccagaagguguggugcaccagcggcagaagcaaggugaucaagggcagccugccccugaucggcgaggccgacugccugcacgagaaguacggcggccugaacaagagcaagcccuacuacaccggcgagcacgccaaggccaucggcaacugccccaucugggugaagaccccccugaagcuggccaacggcaccaaguacagaccccccgccaagcugcugaaggagagaggcuucuucggcgccaucgccggcuuccuggagggcggcugggagggcaugaucgccggcuggcacggcuacaccagccacggcgcccacggcguggccguggccgccgaccugaagagcacccaggaggccaucaacaagaucaccaagaaccugaacagccugagcgagcuggaggugaagaaccugcagagacugagcggcgccauggacgagcugcacaacgagauccuggagcuggacgagaagguggacgaccugagagccgacaccaucagcagccagaucgagcuggccgugcugcugagcaacgagggcaucaucaacagcgaggacgagcaccugcuggcccuggagagaaagcugaagaagaugcugggccccagcgccguggagaucggcaacggcugcuucgagaccaagcacaagugcaaccagaccugccuggacagaaucgccgccggcaccuucgacgccggcgaguucagccugcccaccuucgacagccugaacaucaccgccgccagccugaacgacgacggccuggacaaccacaccauccugcuguacuacagcaccgccgccagcagccuggccgugacccugaugaucgccaucuucgugguguacauggugagcagagacaacgugagcugcagcaucugccuguga

SEQ ID NO: 187368 - RNA, 1758 nt, Artificial Sequence; identical to SEQ ID NO: 187362
  derived and/or modified CDS sequence (opt4) from hemagglutinin__InfluenzaB__AGX19359

SEQ ID NO: 187369 - RNA, 1755 nt, Artificial Sequence; identical to SEQ ID NO: 186791
  derived and/or modified CDS sequence (opt4) from hemagglutinin__InfluenzaB__AGX19370

SEQ ID NO: 187370 - RNA, 1758 nt, Artificial Sequence; identical to SEQ ID NO: 186625
  derived and/or modified CDS sequence (opt4) from hemagglutinin__InfluenzaB__AGX19381

SEQ ID NO: 187371 - RNA, 1758 nt, Artificial Sequence; identical to SEQ ID NO: 187362
  derived and/or modified CDS sequence (opt4) from hemagglutinin__InfluenzaB__AGX19392

SEQ ID NO: 187372 - RNA, 1758 nt, Artificial Sequence; identical to SEQ ID NO: 187362
  derived and/or modified CDS sequence (opt4) from hemagglutinin__InfluenzaB__AGX19403

SEQ ID NO: 187373 - RNA, 1758 nt, Artificial Sequence; identical to SEQ ID NO: 187049
  derived and/or modified CDS sequence (opt4) from hemagglutinin__InfluenzaB__AGX19414

SEQ ID NO: 187374 - RNA, 1755 nt, Artificial Sequence
  derived and/or modified CDS sequence (opt4) from hemagglutinin__InfluenzaB__AGX19425
augaagaccaucaucgugcugcugaugguggugaccagcaacgccgacagaaucugcaccggcaucaccagcagcaacagcccccacguggugaagaccgccacccagggcgaggugaacgugaccggcgugaucccccugaccaccacccccaccaagagcuacuucgccaaccugaagggcaccagaaccagaggcaagcugugccccgacugccugaacugcaccgaccuggacguggcccugggcagacccaugugcgugggcaccacccccagcgccaaggccagcauccugcacgaggugagacccgugaccagcggcugcuuccccaucaugcacgacagaaccaagaucagacagcugcccaaccugcugagaggcuacgagaacaucagacugagcacccagaacgugaucgacgccgagaaggcccccggcggccccuacagacugggcaccagcggcagcugccccaacgccaccagcaagagcggcuucuucgccaccauggccugggccgugcccaaggacaacaacaagaacgccaccaacccccugaccguggaggugcccuacaucugcaccgagggcgaggaccagaucaccguguggggcuuccacagcgacaacaagacccagaugagaaaccuguacggcgacagcaacccccagaaguucaccagcagcgccaacggcgugaccacccacuacgugagccagaucggcagcuuccccgaccagaccgaggacggcggccugccccagagcggcagaaucgugguggacuacaugaugcagaagcccggcaagaccggcaccaucguguaccagagaggcgugcugcugccccagagaguguggugcgccagcggcagaagcaaggugaucaagggcgcccugccccugaucggcgaggccgacugccugcacgagaaguacggcggccugaacaagagcaagcccuacuacaccggcgagcacgccaaggccaucggcaacugccccaucugggugaagaccccccugaagcuggccaacggcaccaaguacagaccccccgccaagcugcugaaggagagaggcuucuucggcgccaucgccggcuuccuggagggcggcugggagggcaugaucgccggcuggcacggcuacaccagccacggcgcccacggcguggccguggccgccgaccugaagagcacccaggaggccaucaacaagaucaccaagaaccugaacagccugagcgagcuggaggugaagaaccugcagagacugagcggcgccauggacgagcugcacaacgagauccuggagcuggacgagaagguggacgaccugagagccgacaccaucagcagccagaucgagcuggccgugcugcugagcaacgagggcaucaucaacagcgaggacgagcaccugcuggcccuggagagaaagcugaagaagaugcugggccccagcgccguggagaucggcaacggcugcuucgagaccaagcacaagugcaaccagaccugccuggacagaaucgccgccggcaccuucaacgccggcgaguucagccugcccaccuucgacagccugaacaucaccgccgccagccugaacgacgacggccuggacaaccacaccauccugcuguacuacagcaccgccgccagcagccuggccgugacccugaugcuggccaucuucaucguguacauggugagcagagacaacgugagcugcagcaucugccuguga

SEQ ID NO: 187375 - RNA, 1758 nt, Artificial Sequence; identical to SEQ ID NO: 186574
  derived and/or modified CDS sequence (opt4) from hemagglutinin__InfluenzaB__AGX19436

SEQ ID NO: 187376 - RNA, 1758 nt, Artificial Sequence; identical to SEQ ID NO: 187237
  derived and/or modified CDS sequence (opt4) from hemagglutinin__InfluenzaB__AGX19447

SEQ ID NO: 187377 - RNA, 1755 nt, Artificial Sequence; identical to SEQ ID NO: 187116
  derived and/or modified CDS sequence (opt4) from hemagglutinin__InfluenzaB__AGX19458

SEQ ID NO: 187378 - RNA, 1755 nt, Artificial Sequence; identical to SEQ ID NO: 187116
  derived and/or modified CDS sequence (opt4) from hemagglutinin__InfluenzaB__AGX19469

SEQ ID NO: 187379 - RNA, 1758 nt, Artificial Sequence; identical to SEQ ID NO: 187049
  derived and/or modified CDS sequence (opt4) from hemagglutinin__InfluenzaB__AGX19480

SEQ ID NO: 187380 - RNA, 1758 nt, Artificial Sequence; identical to SEQ ID NO: 186642
  derived and/or modified CDS sequence (opt4) from hemagglutinin__InfluenzaB__AGX19491

SEQ ID NO: 187381 - RNA, 1758 nt, Artificial Sequence
  derived and/or modified CDS sequence (opt4) from hemagglutinin__InfluenzaB__AGX19502
augaaggccaucaucgugcugcugaugguggugaccagcaacgccgacagaaucugcaccggcaucaccagcagcaacagcccccacguggugaagaccgccacccagggcgaggugaacgugaccggcgugaucccccugaccaccacccccaccaagagccacuucgccaaccugaagggcaccgagaccagaggcaagcugugccccaagugccugaacugcaccgaccuggacguggcccugggcagacccaagugcaccggcaagauccccagcgccagagugagcauccugcacgaggugagacccgugaccagcggcugcuuccccaucaugcacgacagaaccaagaucagacagcugcccaaccugcugagaggcuacgagcacaucagacugagcacccacaacgugaucaacgccgagaacgcccccggcggccccuacaagaucggcaccagcggcagcugccccaacaucaccaacggcaacggcuucuucgccaccauggccugggccgugcccaagaacgacaagaacaagaccgccaccaacccccugaccaucgaggugcccuacaucugcaccgagggcgaggaccagaucaccguguggggcuuccacagcgacagcgagacccagauggccaagcuguacggcgacagcaagccccagaaguucaccagcagcgccaacggcgugaccacccacuacgugagccagaucggcggcuuccccaaccagaccgaggacggcggccugccccagagcggcagaaucgugguggacuacauggugcagaagagcggcaagaccggcaccaucaccuaccagagaggcauccugcugccccagaagguguggugcgccagcggcagaagcaaggugaucaagggcagccugccccugaucggcgaggccgacugccugcacgagaaguacggcggccugaacaagagcaagcccuacuacaccggcgagcacgccaaggccaucggcaacugccccaucugggugaagaccccccugaagcuggccaacggcaccaaguacagaccccccgccaagcugcugaaggagagaggcuucuucggcgccaucgccggcuuccuggagggcggcugggagggcaugaucgccggcuggcacggcuacaccagccacggcgcccacggcguggccguggccgccgaccugaagagcacccaggaggccaucaacaagaucaccaagaaccugaacagccugagcgagcuggaggugaagaaccugcagagacugagcggcgccauggacgagcugcacaacgagauccuggagcuggacgagaagguggacgaccugagagccgacaccaucagcagccagaucgagcuggccgugcugcugagcaacgagggcaucaucaacagcgaggacgagcaccugcuggcccuggagagaaagcugaagaagaugcugggccccagcgccguggagaucggcaacggcugcuucgagaccaagcacaagugcaaccagaccugccuggacagaaucgccgccggcaccuucgacgccggcgaguucagccugcccaccuucgacagccugaacaucaccgccgccagccugaacgacgacggccuggacaaccacaccauccugcuguacuacagcaccgccgccagcagccuggccgugacccugaugaucgccaucuucgugguguacauggugagcagagacaacgugagcugcagcaucugccuguga

SEQ ID NO: 187382 - RNA, 1758 nt, Artificial Sequence
  derived and/or modified CDS sequence (opt4) from hemagglutinin__InfluenzaB__AGX19513
augaaggccaucaucgugcugcugaugguggugaccagcaacgccgacagaaucugcaccggcaucaccagcagcaacagcccccacguggugaagaccgccacccagggcgaggugaacgugaccggcgugaucccccugaccaccacccccaccaagagccacuucgccaaccugaagggcaccgagaccagaggcaagcugugccccaagugccugaacugcaccgaccuggacguggcccugggcagacccaagugcaccggcaagauccccagcgccagagugagcauccugcacgaggugagacccgugaccagcggcugcuuccccaucaugcacgacagaaccaagaucagacagcugcccaaccugcugagaggcuacgagcacaucagacugagcacccacaacgugaucaacgccgagaacgcccccggcggccccuacaagaucggcaccagcggcagcugccccaacaucaccaacggcaacggcuucuucgccaccauggccugggccgugcccaagaacgacaagaacaagaccgccaccaacccccugaccaucgaggugcccuacaucugcaccgagggcgaggaccagaucaccguguggggcuuccacagcgacaacgagacccagauggccaagcuguacggcgacagcaagccccagaaguucaccagcagcgccaacggcgugaccacccacuacaucagccagaucggcggcuuccccaaccagaccgaggacggcggccugccccagagcggcagaaucgugguggacuacauggugcagaagagcggcaagaccggcaccaucaccuaccagagaggcauccugcugccccagaagguguggugcgccagcggcagaagcaaggugaucaagggcagccugccccugaucggcgaggccgacugccugcacgagaaguacggcggccugaacaagagcaagcccuacuacaccggcgagcacgccaaggccaucggcaacugccccaucugggugaagaccccccugaagcuggccaacggcaccaaguacagaccccccgccaagcugcugaaggagagaggcuucuucggcgccaucgccggcuuccuggagggcggcugggagggcaugaucgccggcuggcacggcuacaccagccacggcgcccacggcguggccguggccgccgaccugaagagcacccaggaggccaucaacaagaucaccaagaaccugaacagccugagcgagcuggaggugaagaaccugcagagacugagcggcgccauggacgagcugcacaacgagauccuggagcuggacgagaagguggacgaccugagagccgacaccaucagcagccagaucgagcuggccgugcugcugagcaacgagggcaucaucaacagcgaggacgagcaccugcuggcccuggagagaaagcugaagaagaugcugggccccagcgccguggagaucggcaacggcugcuucgagaccaagcacaagugcaaccagaccugccuggacagaaucgccgccggcaccuucgacgccggcgaguucagccugcccaccuucgacagccugaacaucaccgccgccagccugaacgacgacggccuggacaaccacaccauccugcuguacuacagcaccgccgccagcagccuggccgugacccugaugaucgccaucuucgugguguacauggugagcagagacaacgugagcugcagcaucugccuguga

SEQ ID NO: 187383 - RNA, 1758 nt, Artificial Sequence; identical to SEQ ID NO: 187382
  derived and/or modified CDS sequence (opt4) from hemagglutinin__InfluenzaB__AGX19524

SEQ ID NO: 187384 - RNA, 1758 nt, Artificial Sequence
  derived and/or modified CDS sequence (opt4) from hemagglutinin__InfluenzaB__AGX19535
augaaggccaucaucgugcugcugaugguggugaccagcaacgccgacagaaucugcaccggcaucaccagcagcaacagcccccacguggugaagaccgccacccagggcgaggugaacgugaccggcgugaucccccugaccaccacccccaccaagagccacuucgccaaccugaagggcaccgagaccagaggcaagcugugccccaagugccugaacugcaccgaccuggacguggcccugggcagacccaagugcaccggcaacauccccagcgccagagugagcauccugcacgaggugagacccgugaccagcggcugcuuccccaucaugcacgacagaaccaagaucagacagcugcccaaccugcugagaggcuacgagcacaucagacugagcacccacaacgugaucaacgccgagaacgcccccggcggccccuacaagaucggcaccagcggcagcugccccaacgugaccaacggcaacggcuucuucgccaccauggccugggccgugcccaagaacgacaacaacaagaccgccaccaacagccugaccaucgaggugcccuacaucugcaccgagggcgaggaccagaucaccguguggggcuuccacagcgacgacgagacccagauggccaagcuguacggcgacagcaagccccagaaguucaccagcagcgccaacggcgugaccacccacuacgugagccagaucggcggcuuccccaaccagaccgaggacggcggccugccccagagcggcagaaucgugguggacuacauggugcagaagagcggcaagaccggcaccaucaccuaccagagaggcauccugcugccccagaagguguggugcgccagcggcagaagcaaggugaucaagggcagccugccccugaucggcgaggccgacugccugcacgagaaguacggcggccugaacaagagcaagcccuacuacaccggcgagcacgccaaggccaucggcaacugccccaucugggugaagaccccccugaagcuggccaacggcaccaaguacagaccccccgccaagcugcugaaggagagaggcuucuucggcgccaucgccggcuuccuggagggcggcugggagggcaugaucgccggcuggcacggcuacaccagccacggcgcccacggcguggccguggccgccgaccugaagagcacccaggaggccaucaacaagaucaccaagaaccugaacagccugagcgagcuggaggugaagaaccugcagagacugagcggcgccauggacgagcugcacaacgagauccuggagcuggacgagaagguggacgaccugagagccgacaccaucagcagccagaucgagcuggccgugcugcugagcaacgagggcaucaucaacagcgaggacgagcaccugcuggcccuggagagaaagcugaagaagaugcugggccccagcgccguggagaucggcaacggcugcuucgagaccaagcacaagugcaaccagaccugccuggacagaaucgccgccggcaccuucgacgccggcgaguucagccugcccaccuucgacagccugaacaucaccgccgccagccugaacgacgacggccuggacaaccacaccauccugcuguacuacagcaccgccgccagcagccuggccgugacccugaugaucgccaucuucgugguguacauggugagcagagacaacgugagcugcagcaucugccuguga

SEQ ID NO: 187385 - RNA, 1758 nt, Artificial Sequence
  derived and/or modified CDS sequence (opt4) from hemagglutinin__InfluenzaB__AGX19546
augaaggccaucaucgugcugcugaugguggugaccagcaacgccgacagaaucugcaccggcaucaccagcagcaacagcccccacguggugaagaccgccacccagggcgaggugaacgugaccggcgugaucccccugaccaccacccccaccaagagccacuucgccaaccugaagggcaccgagaccagaggcaagcugugccccaagugccugaacugcaccgaccuggacguggcccugggcagacccaagugcaccggcaacauccccagcgccagagugagcauccugcacgaggugagacccgugaccagcggcugcuuccccaucaugcacgacagaaccaagaucagacagcugcccaaccugcugagaggcuacgagcacaucagacugagcacccacaacgugaucaacgccgagaacgcccccggcggccccuacaagaucggcaccagcggcagcugccccaacgugaccaacggcaacggcuucuucgccaccauggccugggccgugcccaagaacgacaacaacaagaccgccaccaacagccugaccaucgaggugcccuacaucugcaccgagggcgaggaccagaucaccguguggggcuuccacagcgacaaggagacccagauggccaagcuguacggcgacagcaagccccagaaguucaccagcagcgccaacggcgugaccacccacuacgugagccagaucggcggcuuccccaaccagaccgaggacggcggccugccccagagcggcagaaucgugguggacuacauggugcagaagagcggcaagaccggcaccaucaccuaccagagaggcauccugcugccccagaagguguggugcgccagcggcagaagcaaggugaucaagggcagccugccccugaucggcgaggccgacugccugcacgagaaguacggcggccugaacaagagcaagcccuacuacaccggcgagcacgccaaggccaucggcaacugccccaucugggugaagaccccccugaagcuggccaacggcaccaaguacagaccccccgccaagcugcugaaggagagaggcuucuucggcgccaucgccggcuuccuggagggcggcugggagggcaugaucgccggcuggcacggcuacaccagccacggcgcccacggcguggccguggccgccgaccugaagagcacccaggaggccaucaacaagaucaccaagaaccugaacagccugagcgagcuggaggugaagaaccugcagagacugagcggcgccauggacgagcugcacaacgagauccuggagcuggacgagaagguggacgaccugagagccgacaccaucagcagccagaucgagcuggccgugcugcugagcaacgagggcaucaucaacagcgaggacgagcaccugcuggcccuggagagaaagcugaagaagaugcugggccccagcgccguggagaucggcaacggcugcuucgagaccaagcacaagugcaaccagaccugccuggacagaaucgccgccggcaccuucgacgccggcgaguucagccugcccaccuucgacagccugaacaucaccgccgccagccugaacgacgacggccuggacaaccacaccauccugcuguacuacagcaccgccgccagcagccuggccgugacccugaugaucgccaucuucgugguguacauggugagcagagacaacgugagcugcagcaucugccuguga

SEQ ID NO: 187386 - RNA, 1758 nt, Artificial Sequence
  derived and/or modified CDS sequence (opt4) from hemagglutinin__InfluenzaB__AGX19557
augaaggccaucaucgugcugcugaugguggugaccagcaacgccgacagaaucugcaccggcaucaccagcagcaacagcccccacguggugaagaccgccacccagggcgaggugaacgugaccggcgugaucccccugaccaccacccccaccaagagccacuucgccaaccugaagggcaccgagaccagaggcaagcugugccccaagugccugaacugcaccgaccuggacguggcccugggcagacccaagugcaccggcaacauccccagcgccagagugagcauccugcacgaggugagacccgugaccagcggcugcuuccccaucaugcacgacagaaccaagaucagacagcugcccaaccugcugagaggcuacgagcacaucagacugagcacccacaacgugaucaacgccgagaacgcccccggcggccccuacaagaucggcaccagcggcagcugccccaacgugaccaacggcaacggcuucuucgccaccauggccugggccgugcccaagaacgacaacaacaagaccgccaccaacagccugaccaucgaggugcccuacaucugcaccggcggcgaggaccagaucaccguguggggcuuccacagcgacaacgagacccagauggccaagcuguacggcgacagcaagccccagaaguucaccagcagcgccaacggcgugaccacccacuacgugagccagaucggcggcuuccccaaccagaccgaggacggcggccugccccagagcggcagaaucgugguggacuacauggugcagaagagcggcaagaccggcaccaucaccuaccagagaggcauccugcugccccagaagguguggugcgccagcggcagaagcaaggugaucaagggcagccugccccugaucggcgaggccgacugccugcacgagaaguacggcggccugaacaagagcaagcccuacuacaccggcgagcacgccaaggccaucggcaacugccccaucugggugaagaccccccugaagcuggccaacggcaccaaguacagaccccccgccaagcugcugaaggagagaggcuucuucggcgccaucgccggcuuccuggagggcggcugggagggcaugaucgccggcuggcacggcuacaccagccacggcgcccacggcguggccguggccgccgaccugaagagcacccaggaggccaucaacaagaucaccaagaaccugaacagccugagcgagcuggaggugaagaaccugcagagacugagcggcgccauggacgagcugcacaacgagauccuggagcuggacgagaagguggacgaccugagagccgacaccaucagcagccagaucgagcuggccgugcugcugagcaacgagggcaucaucaacagcgaggacgagcaccugcuggcccuggagagaaagcugaagaagaugcugggccccagcgccguggagaucggcaacggcugcuucgagaccaagcacaagugcaaccagaccugccuggacagaaucgccgccggcaccuucgacgccggcgaguucagccugcccaccuucgacagccugaacaucaccgccgccagccugaacgacgacggccuggacaaccacaccauccugcuguacuacagcaccgccgccagcagccuggccgugacccugaugaucgccaucuucgugguguacauggugagcagagacaacgugagcugcagcaucugccuguga

SEQ ID NO: 187387 - RNA, 1758 nt, Artificial Sequence; identical to SEQ ID NO: 187049
  derived and/or modified CDS sequence (opt4) from hemagglutinin__InfluenzaB__AGX19568

SEQ ID NO: 187388 - RNA, 1758 nt, Artificial Sequence; identical to SEQ ID NO: 187382
  derived and/or modified CDS sequence (opt4) from hemagglutinin__InfluenzaB__AGX19579

SEQ ID NO: 187389 - RNA, 1758 nt, Artificial Sequence; identical to SEQ ID NO: 187049
  derived and/or modified CDS sequence (opt4) from hemagglutinin__InfluenzaB__AGX19590

SEQ ID NO: 187390 - RNA, 1758 nt, Artificial Sequence; identical to SEQ ID NO: 187049
  derived and/or modified CDS sequence (opt4) from hemagglutinin__InfluenzaB__AGX19601

SEQ ID NO: 187391 - RNA, 1758 nt, Artificial Sequence; identical to SEQ ID NO: 187049
  derived and/or modified CDS sequence (opt4) from hemagglutinin__InfluenzaB__AGX19612

SEQ ID NO: 187392 - RNA, 1758 nt, Artificial Sequence
  derived and/or modified CDS sequence (opt4) from hemagglutinin__InfluenzaB__AGX19623
augaaggccaucaucgugcugcugaugguggugaccagcaacgccgacagaaucugcaccggcaucaccagcagcaacagcccccacguggugaagaccgccacccagggcgaggugaacgugaccggcgugaucccccugaccaccacccccaccaagagccacuucgccaaccugaagggcaccgagaccagaggcaagcugugccccaagugccugaacugcaccgaccuggacguggcccugggcagacccaagugcaccggcaacauccccagcgccagagugagcauccugcacgaggugagacccgugaccagcggcugcuuccccaucaugcacgacagaaccaagaucagacagcugcccaaccugcugagaggcuacgagcacaucagacugagcacccacaacgugaucaacgccgagaacgcccccggcggccccuacaagaucggcaccagcggcagcugccccaacgugaccaacggcaacggcuucuucgccaccauggccugggccgugcccaagaacgacaacaacaagaccgccaccaacagccugaccaucgaggugcccuacaucugcaccgagggcgaggaccagaucaccguguggggcuuccacagcgacaacgagacccagauggccaagcuguacggcgacagcaagccccagaaguucaccagcagcgccaacggcgugaccacccacuacgugagccagaucggcggcuuccccaaccagaccgaggacggcggccugccccagagcggcagaaucgugguggacuacauggugcagaagagcggcaagaccggcaccaucaccuaccagagaggcauccugcugccccagaagguguggugcgccagcggcagaagcaaggugaucaagggcagccugccccugaucggcgaggccgacugccugcacgagaaguacggcggccugaacaagagcaagcccuacuacaccggcgagcacgccaaggccaucggcaacugccccaucugggugaagaccccccugaagcuggccaacggcaccaaguacagaccccccgccaagcugcugaaggagagaggcuucuucggcgccaucgccggcuuccuggagggcggcugggagggcaugaucgccggcuggcacggcuacaccagccacggcgcccacggcguggccguggccgccgaccugaagagcacccaggaggccaucaacaagaucaccaagaaccugaacagccugagcgagcuggaggugaagaaccugcagagacugagcggcgccauggacgagcugcacaacgagauccuggagcuggacgagaagguggacgaccugagagccgacaccaucagcagccagaucgagcuggccgugcugcugagcaacgagggcaucaucaacagcgaggacgagcaccugcuggcccuggagagaaagcugaagaagaugcugggccccagcgccguggagaucggcaacggcugcuucgagaccaagcacaagugcaaccagaccugccuggacagaaucgccgccggcaccuucgacgccggcgaguucagccugcccaccuucgacagccugaacaucaccgccgccagccugaacgacgacggccuggacaaccacaccauccugcuguacuacagcaccgccgccagcagccuggccguggcccugaugaucgccaucuucgugguguacauggugagcagagacaacgugagcugcagcaucugccuguga

SEQ ID NO: 187393 - RNA, 1758 nt, Artificial Sequence; identical to SEQ ID NO: 187049
  derived and/or modified CDS sequence (opt4) from hemagglutinin__InfluenzaB__AGX19634

SEQ ID NO: 187394 - RNA, 1758 nt, Artificial Sequence; identical to SEQ ID NO: 186574
  derived and/or modified CDS sequence (opt4) from hemagglutinin__InfluenzaB__AGX19645

SEQ ID NO: 187395 - RNA, 1758 nt, Artificial Sequence; identical to SEQ ID NO: 186625
  derived and/or modified CDS sequence (opt4) from hemagglutinin__InfluenzaB__AGX19656

SEQ ID NO: 187396 - RNA, 1758 nt, Artificial Sequence
  derived and/or modified CDS sequence (opt4) from hemagglutinin__InfluenzaB__AGX19667
augaaggccaucaucgugcugcugaugguggugaccagcaacgccgacagaaucugcaccggcaucaccagcagcaacagcccccacguggugaagaccgccacccagggcgaggugaacgugaccggcgugaucccccugaccaccacccccaccaagagccacuucgccaaccugaagggcaccgagaccagaggcaagcugugccccaagugccugaacugcaccgaccuggacguggcccugggcagacccaagugcaccggcaagauccccagcgccagagugagcauccugcacgaggugagacccgugaccagcggcugcuuccccaucaugcacgacagaaccaagaucagacagcugcccaaccugcugagaggcuacgagcacaucagacugagcacccacaacgugaucaacgccgagaacgcccccggcggccccuacaagaucggcaccagcggcagcugccccaacaucaccaacggcaacggcuucuucgccaccauggccugggccgugcccaagaacgacaagaacaagaccgccaccaacccccugaccaucgaggugcccuacaucugcaccgagggcgaggaccagaucaccguguggggcuuccacagcgacaacgagacccagauggccaagcuguacggcgacagcaagccccagaaguucaccagcagcgccaacggcgugaccacccacuacgugagccagaucggcggcuuccccaaccagaccgaggacggcggccugccccagagcggcagaaucgugguggacuacauggugcagaagagcggcaagaccggcaccaucaccuaccagagaggcauccugcugccccagaagguguggugcgccagcggcagaagcaaggugaucaagggcagccugccccugaucggcgaggccgacugccugcacgagaaguacggcggccugaacaagagcaagcccuacuacaccggcgagcacgccaaggccaucggcaacugccccaucugggugaagaccccccugaagcuggccaacggcaccaaguacagaccccccgccaagcugcugaaggagagaggcuucuucggcgccaucgccggcuuccuggagggcggcugggagggcaugaucgccggcuggcacggcuacaccagccacggcgcccacggcguggccguggccgccgaccugaagagcacccaggaggccaucaacaagaucaccaagaaccugaacagccugagcgagcuggaggugaaggaccugcagagacugagcggcgccauggacgagcugcacaacgagauccuggagcuggacgagaagguggacgaccugagagccgacaccaucagcagccagaucgagcuggccgugcugcugagcaacgagggcaucaucaacagcgaggacgagcaccugcuggcccuggagagaaagcugaagaagaugcugggccccagcgccguggagaucggcaacggcugcuucgagaccaagcacaagugcaaccagaccugccuggacagaaucgccgccggcaccuucgacgccggcgaguucagccugcccaccuucgacagccugaacaucaccgccgccagccugaacgacgacggccuggacaaccacaccauccugcuguacuacagcaccgccgccagcagccuggccgugacccugaugaucgccaucuucgugguguacauggugagcagagacaacgugagcugcagcaucugccuguga

SEQ ID NO: 187397 - RNA, 1758 nt, Artificial Sequence; identical to SEQ ID NO: 187049
  derived and/or modified CDS sequence (opt4) from hemagglutinin__InfluenzaB__AGX19678

SEQ ID NO: 187398 - RNA, 1758 nt, Artificial Sequence; identical to SEQ ID NO: 186574
  derived and/or modified CDS sequence (opt4) from hemagglutinin__InfluenzaB__AGX19700

SEQ ID NO: 187399 - RNA, 1758 nt, Artificial Sequence
  derived and/or modified CDS sequence (opt4) from hemagglutinin__InfluenzaB__AGX19711
augaaggccaucaucgugcugcugaugguggugaccagcaacgccgacagaaucugcaccggcaucaccagcagcaacagcccccacguggugaagaccgccacccagggcgaggugaacgugaccggcgugaucccccugaccaccacccccaccaagagccacuucgccaaccugaagggcaccgagaccagaggcaagcugugccccaagugccugaacugcaccgaccuggacguggcccugggcagacccaagugcaccggcaacauccccagcgccagagugagcauccugcacgaggugagacccgugaccagcggcugcuuccccaucaugcacgacagaaccaagaucagacagcugcccaaccugcugagaggcuacgagcacaucagacugagcacccacaacgugaucaacgccgagaacgcccccggcggccccuacaagaucggcaccagcggcagcugccccaacgugaccaacggcaacggcuucuucgccaccauggccugggccgugcccaagaacgacaagaacaagaccgccaccaacagccugaccaucgaggugcccuacaucugcaaggagggcgaggaccagaucaccguguggggcuuccacagcgacaacgagacccagauggccaagcuguacggcgacagcaagccccagaaguucaccagcagcgccaacggcgugaccacccacuacgugagccagaucggcggcuuccccaaccagaccgaggacggcggccugccccagagcggcagaaucgugguggacuacauggugcagaagagcggcaagaccggcaccaucaccuaccagagaggcauccugcugccccagaagguguggugcgccagcggcagaagcaaggugaucaagggcagccugccccugaucggcgaggccgacugccugcacgagaaguacggcggccugaacaagagcaagcccuacuacaccggcgagcacgccaaggccaucggcaacugccccaucugggugaagaccccccugaagcuggccaacggcaccaaguacagaccccccgccaagcugcugaaggagagaggcuucuucggcgccaucgccggcuuccuggagggcggcugggagggcaugaucgccggcuggcacggcuacaccagccacggcgcccacggcguggccguggccgccgaccugaagagcacccaggaggccaucaacaagaucaccaagaaccugaacagccugagcgagcuggaggugaagaaccugcagagacugagcggcgccauggacgagcugcacaacgagauccuggagcuggacgagaagguggacgaccugagagccgacaccaucagcagccagaucgagcuggccgugcugcugagcaacgagggcaucaucaacagcgaggacgagcaccugcuggcccuggagagaaagcugaagaagaugcugggccccagcgccguggagaucggcaacggcugcuucgagaccaagcacaagugcaaccagaccugccuggacagaaucgccgccggcaccuucgacgccggcgaguucagccugcccaccuucgacagccugaacaucaccgccgccagccugaacgacgacggccuggacaaccacaccauccugcuguacuacagcaccgccgccagcagccuggccgugacccugaugaucgccaucuucgugguguacauggugagcagagacaacgugagcugcagcaucugccuguga

SEQ ID NO: 187400 - RNA, 1758 nt, Artificial Sequence; identical to SEQ ID NO: 187049
  derived and/or modified CDS sequence (opt4) from hemagglutinin__InfluenzaB__AGX19722

SEQ ID NO: 187401 - RNA, 1758 nt, Artificial Sequence; identical to SEQ ID NO: 187049
  derived and/or modified CDS sequence (opt4) from hemagglutinin__InfluenzaB__AGX19733

SEQ ID NO: 187402 - RNA, 1758 nt, Artificial Sequence; identical to SEQ ID NO: 187049
  derived and/or modified CDS sequence (opt4) from hemagglutinin__InfluenzaB__AGX19744

SEQ ID NO: 187403 - RNA, 1758 nt, Artificial Sequence; identical to SEQ ID NO: 186574
  derived and/or modified CDS sequence (opt4) from hemagglutinin__InfluenzaB__AGX19755

SEQ ID NO: 187404 - RNA, 1758 nt, Artificial Sequence; identical to SEQ ID NO: 187049
  derived and/or modified CDS sequence (opt4) from hemagglutinin__InfluenzaB__AGX19766

SEQ ID NO: 187405 - RNA, 1758 nt, Artificial Sequence; identical to SEQ ID NO: 187382
  derived and/or modified CDS sequence (opt4) from hemagglutinin__InfluenzaB__AGX19788

SEQ ID NO: 187406 - RNA, 1758 nt, Artificial Sequence; identical to SEQ ID NO: 187049
  derived and/or modified CDS sequence (opt4) from hemagglutinin__InfluenzaB__AGX19799

SEQ ID NO: 187407 - RNA, 1758 nt, Artificial Sequence; identical to SEQ ID NO: 187049
  derived and/or modified CDS sequence (opt4) from hemagglutinin__InfluenzaB__AGX19810

SEQ ID NO: 187408 - RNA, 1758 nt, Artificial Sequence
  derived and/or modified CDS sequence (opt4) from hemagglutinin__InfluenzaB__AGX19821
augaaggccaucaucgugcugcugaugguggugaccagcaacgccgacagaaucugcaccggcaucaccagcagcaacagcccccacguggugaagaccgccacccagggcgaggugaacgugaccggcgugaucccccugaccaccacccccaccaagagccacuucgccaaccugaagggcaccgagaccagaggcaagcugugccccaagugccugaacugcaccgaccuggacguggcccugggcagacccaagugcaccggcaacauccccagcgccagagugagcauccugcacgaggugagacccgugaccagcggcugcuuccccaucaugcacgacagaaccaagaucagacagcugcccaaccugcugagaggcuacgagcacaucagacugagcacccacaacgugaucaacgccgagaacgcccccggcggccccuacaagaucggcaccagcggcagcugccccaacgugaccaacggcaacggcuucuucgccaccauggccugggccgugcccaagaacgacaacaacaagaccgccaccaacagccugaccaucgaggugcccuacaucugcaccgagggcgaggaccagaucaccguguggggcuuccacagcgacaacgagacccagauggccaagcuguacggcgacagcaagccccagaaguucaccagcagcgccaacggcgugaccacccacuacgugagccagaucggcggcuuccccaaccagaccgaggacggcggccugccccagagcggcagaaucgugguggacuacauggugcagaagagcggcaagaccggcaccaucaccuaccagagaggcauccugcugccccagaagguguggugcgccagcggcagaagcaaggugaucaagggcagccugccccugaucggcgaggccgacugccugcacgagaaguacggcggccugaacaagagcaagcccuacuacaccggcgagcacgccaaggccaucggcaacugccccaucugggugaagaccccccugaagcuggccaacggcaccaaguacagaccccccgccaagcugcugaaggagagaggcuucuucggcgccaucgccggcuuccuggagggcggcugggagggcaugaucgccggcuggcacggcuacaccagccacggcgcccacggcguggccguggccgccgaccugaagagcacccaggaggccaucaacaagaucaccaagaaccugaacagccugagcgagcuggaggugaagaaccugcagagacugagcggcagcauggacgagcugcacaacgagauccuggagcuggacgagaagguggacgaccugagagccgacaccaucagcagccagaucgagcuggccgugcugcugagcaacgagggcaucaucaacagcgaggacgagcaccugcuggcccuggagagaaagcugaagaagaugcugggccccagcgccguggagaucggcaacggcugcuucgagaccaagcacaagugcaaccagaccugccuggacagaaucgccgccggcaccuucgacgccggcgaguucagccugcccaccuucgacagccugaacaucaccgccgccagccugaacgacgacggccuggacaaccacaccauccugcuguacuacagcaccgccgccagcagccuggccgugacccugaugaucgccaucuucgugguguacauggugagcagagacaacgugagcugcagcaucugccuguga

SEQ ID NO: 187409 - RNA, 1758 nt, Artificial Sequence; identical to SEQ ID NO: 187382
  derived and/or modified CDS sequence (opt4) from hemagglutinin__InfluenzaB__AGX19832

SEQ ID NO: 187410 - RNA, 1758 nt, Artificial Sequence; identical to SEQ ID NO: 187049
  derived and/or modified CDS sequence (opt4) from hemagglutinin__InfluenzaB__AGX19843

SEQ ID NO: 187411 - RNA, 1758 nt, Artificial Sequence; identical to SEQ ID NO: 187049
  derived and/or modified CDS sequence (opt4) from hemagglutinin__InfluenzaB__AGX19854

SEQ ID NO: 187412 - RNA, 1758 nt, Artificial Sequence; identical to SEQ ID NO: 187049
  derived and/or modified CDS sequence (opt4) from hemagglutinin__InfluenzaB__AGX19865

SEQ ID NO: 187413 - RNA, 1758 nt, Artificial Sequence; identical to SEQ ID NO: 187382
  derived and/or modified CDS sequence (opt4) from hemagglutinin__InfluenzaB__AGX19876

SEQ ID NO: 187414 - RNA, 1758 nt, Artificial Sequence; identical to SEQ ID NO: 187049
  derived and/or modified CDS sequence (opt4) from hemagglutinin__InfluenzaB__AGX19887

SEQ ID NO: 187415 - RNA, 1758 nt, Artificial Sequence
  derived and/or modified CDS sequence (opt4) from hemagglutinin__InfluenzaB__AGX19898
augaaggccaucaucgugcugcugaugguggugaccagcaacgccgacagaaucugcaccggcaucaccagcagcaacagcccccacguggugaagaccgccacccagggcgaggugaacgugaccggcgugaucccccugaccaccacccccaccaagagccacuucgccaaccugaagggcaccgagaccagaggcaagcugugccccaagugccugaacugcaccgaccuggacguggcccugggcagacccaagugcaccggcaagauccccagcgccagagugagcauccugcacgaggugagacccgugaccagcggcugcuuccccaucaugcacgacagaaccaagaucagacagcugcccaaccugcugagaggcuacgagcacaucagacugagcacccacaacgugaucaacgccgagaacgcccccggcggccccuacaagaucggcaccagcggcagcugccccaacaucaccaacgagaacggcuucuucgccaccauggccugggccgugcccaagaacgacaagaacaagaccgccaccaacccccugaccaucgaggugcccuacaucugcaccgagggcgaggaccagaucaccguguggggcuuccacagcgacaacgagacccagauggccaagcuguacggcgacagcaagccccagaaguucaccagcagcgccaacggcgugaccacccacuacgugagccagaucggcggcuuccccaaccagaccgaggacggcggccugccccagagcggcagaaucgugguggacuacauggugcagaagagcggcaagaccggcaccaucaccuaccagagaggcauccugcugccccagaagguguggugcgccagcggcagaagcaaggugaucaagggcagccugccccugaucggcgaggccgacugccugcacgagaaguacggcggccugaacaagagcaagcccuacuacaccggcgagcacgccaaggccaucggcaacugccccaucugggugaagaccccccugaagcuggccaacggcaccaaguacagaccccccgccaagcugcugaaggagagaggcuucuucggcgccaucgccggcuuccuggagggcggcugggagggcaugaucgccggcuggcacggcuacaccagccacggcgcccacggcguggccguggccgccgaccugaagagcacccaggaggccaucaacaagaucaccaagaaccugaacagccugagcgagcuggaggugaagaaccugcagagacugagcggcgccauggacgagcugcacaacgagauccuggagcuggacgagaagguggacgaccugagagccgacaccaucagcagccagaucgagcuggccgugcugcugagcaacgagggcaucaucaacagcgaggacgagcaccugcuggcccuggagagaaagcugaagaagaugcugggccccagcgccguggagaucggcaacggcugcuucgagaccaagcacaagugcaaccagaccugccuggacagaaucgccgccggcaccuucgacgccggcgaguucagccugcccaccuucgacagccugaacaucaccgccgccagccugaacgacgacggccuggacaaccacaccauccugcuguacuacagcaccgccgccagcagccuggccgugacccugaugaucgccaucuucgugguguacauggugagcagagacaacgugagcugcagcaucugccuguga

SEQ ID NO: 187416 - RNA, 1758 nt, Artificial Sequence; identical to SEQ ID NO: 186574
  derived and/or modified CDS sequence (opt4) from hemagglutinin__InfluenzaB__AGX19909

SEQ ID NO: 187417 - RNA, 1758 nt, Artificial Sequence; identical to SEQ ID NO: 187049
  derived and/or modified CDS sequence (opt4) from hemagglutinin__InfluenzaB__AGX19920

SEQ ID NO: 187418 - RNA, 1758 nt, Artificial Sequence; identical to SEQ ID NO: 187415
  derived and/or modified CDS sequence (opt4) from hemagglutinin__InfluenzaB__AGX19931

SEQ ID NO: 187419 - RNA, 1758 nt, Artificial Sequence; identical to SEQ ID NO: 187382
  derived and/or modified CDS sequence (opt4) from hemagglutinin__InfluenzaB__AGX19942

SEQ ID NO: 187420 - RNA, 1758 nt, Artificial Sequence; identical to SEQ ID NO: 187049
  derived and/or modified CDS sequence (opt4) from hemagglutinin__InfluenzaB__AGX19953

SEQ ID NO: 187421 - RNA, 1758 nt, Artificial Sequence; identical to SEQ ID NO: 186807
  derived and/or modified CDS sequence (opt4) from hemagglutinin__InfluenzaB__AGX19964

SEQ ID NO: 187422 - RNA, 1758 nt, Artificial Sequence; identical to SEQ ID NO: 186574
  derived and/or modified CDS sequence (opt4) from hemagglutinin__InfluenzaB__AGX19975

SEQ ID NO: 187423 - RNA, 1758 nt, Artificial Sequence
  derived and/or modified CDS sequence (opt4) from hemagglutinin__InfluenzaB__AGX19986
augaaggccaucaucgugcugcugaugguggugaccagcaacgccgacagaaucugcaccggcaucaccagcagcaacagcccccacguggugaagaccgccacccagggcgaggugaacgugaccggcgugaucccccugaccaccacccccaccaagagccacuucgccaaccugaagggcaccgagaccagaggcaagcugugccccaagugccugaacugcaccgaccuggacguggcccugggcagacccaagugcaccggcaagauccccagcgccagagugagcauccugcacgaggugagacccgugaccagcggcugcuuccccaucaugcacgacagaaccaagaucagacagcugcccaaccugcugagaggcuacgagcacaucagacugagcacccacaacgugaucaacgccgagaacgcccccggcggccccuacaagaucggcaccagcggcagcugccccaacaucaccaacggcaacggcuucuucgccaccauggccugggccgugcccaagaacgacaagaacaagaccgccaccaacccccugaccaucgaggugcccuacaucugcaccgagggcgaggaccagaucaccguguggggcuuccacagcgacaacgagacccagauggccaagcuguacggcgacagcaagccccagaaguucaccagcagcgccaacggcgugaccacccacuacgugagccagaucggcggcuuccccaaccagaccgaggacggcggccugccccagagcggcagaaucgugguggacuacauggugcagaagagcggcaagaccggcaccaucaccuaccagagaggcauccugcugccccagaagguguggugcgugagcggcagaagcaaggugaucaagggcagccugccccugaucggcgaggccgacugccugcacgagaaguacggcggccugaacaagagcaagcccuacuacaccggcgagcacgccaaggccaucggcaacugccccaucugggugaagaccccccugaagcuggccaacggcaccaaguacagaccccccgccaagcugcugaaggagagaggcuucuucggcgccaucgccggcuuccuggagggcggcugggagggcaugaucgccggcuggcacggcuacaccagccacggcgcccacggcguggccguggccgccgaccugaagagcacccaggaggccaucaacaagaucaccaagaaccugaacagccugagcgagcuggaggugaagaaccugcagagacugagcggcgccauggacgagcugcacaacgagauccuggagcuggacgagaagguggacgaccugagagccgacaccaucagcagccagaucgagcuggccgugcugcugagcaacgagggcaucaucaacagcgaggacgagcaccugcuggcccuggagagaaagcugaagaagaugcugggccccagcgccguggagaucggcaacggcugcuucgagaccaagcacaagugcaaccagaccugccuggacagaaucgccgccggcaccuucgacgccggcgaguucagccugcccaccuucgacagccugaacaucaccgccgccagccugaacgacgacggccuggacaaccacaccauccugcuguacuacagcaccgccgccagcagccuggccgugacccugaugaucgccaucuucgugguguacauggugagcagagacaacgugagcugcagcaucugccuguga

SEQ ID NO: 187424 - RNA, 1758 nt, Artificial Sequence
  derived and/or modified CDS sequence (opt4) from hemagglutinin__InfluenzaB__AGX19997
augaaggccaucaucgugcugcugaugguggugaccagcaacgccgacagaaucugcaccggcaucaccagcagcaacagcccccacguggugaagaccgccacccagggcgaggugaacgugaccggcgugaucccccugaccaccacccccaccaagagccacuucgccaaccugaagggcaccgagaccagaggcaagcugugccccaagugccugaacugcaccgaccuggacguggcccugggcagacccaagugcaccggcaagauccccagcgccagagugagcauccugcacgaggugagacccgugaccagcggcugcuuccccaucaugcacgacagaaccaagaucagacagcugcccaaccugcugagaggcuacgagcacaucagacugagcacccacaacgugaucaacgccgagaacgcccccggcggccccuacaagaucggcaccagcggcagcugccccaacaucaccaacggcaacggcuucuucgccaccauggccugggccgugcccaagaacgacaagaacaagaccgccaccaacccccugaccaucgaggugcccuacaucugcaccgagggcgaggaccagaucaccguguggggcuuccacagcgacaacgagacccagauggccaagcuguacggcgacagcaagccccagaaguucaccagcagcgccaacggcgugaccacccacuacgugagccagaucggcggcuuccccaaccagaucgaggacggcggccugccccagagcggcagaaucgugguggacuacauggugcagaagagcggcaagaccggcaccaucaccuaccagagaggcauccugcugccccagaagguguggugcgccagcggcagaagcaaggugaucaagggcagccugccccugaucggcgaggccgacugccugcacgagaaguacggcggccugaacaagagcaagcccuacuacaccggcgagcacgccaaggccaucggcaacugccccaucugggugaagaccccccugaagcuggccaacggcaccaaguacagaccccccgccaagcugcugaaggagagaggcuucuucggcgccaucgccggcuuccuggagggcggcugggagggcaugaucgccggcuggcacggcuacaccagccacggcgcccacggcguggccguggccgccgaccugaagagcacccaggaggccaucaacaagaucaccaagaaccugaacagccugagcgagcuggaggugaagaaccugcagagacugagcggcgccauggacgagcugcacaacgagauccuggagcuggacgagaagguggacgaccugagagccgacaccaucagcagccagaucgagcuggccgugcugcugagcaacgagggcaucaucaacagcgaggacgagcaccugcuggcccuggagagaaagcugaagaagaugcugggccccagcgccguggagaucggcaacggcugcuucgagaccaagcacaagugcaaccagaccugccuggacagaaucgccgccggcaccuucgacgccggcgaguucagccugcccaccuucgacagccugaacaucaccgccgccagccugaacgacgacggccuggacaaccacaccauccugcuguacuacagcaccgccgccagcagccuggccgugacccugaugaucgccaucuucgugguguacauggugagcagagacaacgugagcugcagcaucugccuguga

SEQ ID NO: 187425 - RNA, 1758 nt, Artificial Sequence; identical to SEQ ID NO: 187049
  derived and/or modified CDS sequence (opt4) from hemagglutinin__InfluenzaB__AGX20008

SEQ ID NO: 187426 - RNA, 1758 nt, Artificial Sequence; identical to SEQ ID NO: 187049
  derived and/or modified CDS sequence (opt4) from hemagglutinin__InfluenzaB__AGX20019

SEQ ID NO: 187427 - RNA, 1758 nt, Artificial Sequence; identical to SEQ ID NO: 187049
  derived and/or modified CDS sequence (opt4) from hemagglutinin__InfluenzaB__AGX20030

SEQ ID NO: 187428 - RNA, 1758 nt, Artificial Sequence
  derived and/or modified CDS sequence (opt4) from hemagglutinin__InfluenzaB__AGX20041
augaaggccaucaucgugcugcugaugguggugaccagcgacgccgacagaaucugcaccggcaucaccagcagcaacagcccccacguggugaagaccgccacccagggcgaggugaacgugaccggcgugaucccccugaccaccacccccaccaagagccacuucgccaaccugaagggcaaggagaccagaggcaagcugugccccaagugccugaacugcaccgaccuggacguggcccugggcagacccaagugcaccggcaagauccccagcgccagagugagcauccugcacgaggugagacccgugaccagcggcugcuuccccaucaugcacgacagaaccaagaucagacagcugcccaaccugcugagaggcuacgagcacaucagacugagcacccacaacgugaucaacgccgagaacgcccccggcggccccuacaagaucggcaccagcggcagcugccccaacaucaccaacggcaacggcuucuucgccaccauggccugggccgugcccaagaacgacaagaacaagaccgccaccaacccccugaccaucgaggugcccuacaucugcaccgagggcgaggaccagaucaccguguggggcuuccacagcgacaacgagacccagauggccaagcuguacggcgacagcaagccccagaaguucaccagcagcgccaacggcgugaccacccacuacgugagccagaucggcggcuuccccaaccagaccgaggacggcggccugccccagagcggcagaaucgugguggacuacauggugcagaagagcggcaagaccggcaccaucaccuaccagagaggcauccugcugccccagaagguguggugcgccagcggcagaagcaaggugaucaagggcagccugccccugaucggcgaggccgacugccugcacgagaaguacggcggccugaacaagagcaagcccuacuacaccggcgagcacgccaaggccaucggcaacugccccaucugggugaagaccccccugaagcuggccaacggcaccaaguacagaccccccgccaagcugcugaaggagagaggcuucuucggcgccaucgccggcuuccuggagggcggcugggagggcaugaucgccggcuggcacggcuacaccagccacggcgcccacggcguggccguggccgccgaccugaagagcacccaggaggccaucaacaagaucaccaagaaccugaacagccugagcgagcuggaggugaagaaccugcagagacugagcggcgccauggacgagcugcacaacgagauccuggagcuggacgagaagguggacgaccugagagccgacaccaucagcagccagaucgagcuggccgugcugcugagcaacgagggcaucaucaacagcgaggacgagcaccugcuggcccuggagagaaagcugaagaagaugcugggccccagcgccguggagaucggcaacggcugcuucgagaccaagcacaagugcaaccagaccugccuggacagaaucgccgccggcaccuucgacgccggcgaguucagccugcccaccuucgacagccugaacaucaccgccgccagccugaacgacgacggccuggacaaccacaccauccugcuguacuacagcaccgccgccagcagccuggccgugacccugaugaucgccaucuucgugguguacauggugagcagagacaacgugagcugcagcaucugccuguga

SEQ ID NO: 187429 - RNA, 1758 nt, Artificial Sequence; identical to SEQ ID NO: 187049
  derived and/or modified CDS sequence (opt4) from hemagglutinin__InfluenzaB__AGX20052

SEQ ID NO: 187430 - RNA, 1758 nt, Artificial Sequence; identical to SEQ ID NO: 187049
  derived and/or modified CDS sequence (opt4) from hemagglutinin__InfluenzaB__AGX20063

SEQ ID NO: 187431 - RNA, 1758 nt, Artificial Sequence
  derived and/or modified CDS sequence (opt4) from hemagglutinin__InfluenzaB__AGX20074
augaaggccaucaucgcccugcugaugguggugaccagcaacgccgacagaaucugcaccggcaucaccagcagcaacagcccccacguggugaagaccgccacccagggcgaggugaacgugaccggcgugaucccccugaccaccacccccaccaagagccacuucgccaaccugaagggcaccgagaccagaggcaagcugugccccaagugccugaacugcaccgaccuggacguggcccugggcagacccaagugcaccggcaagauccccagcgccagagugagcauccugcacgaggugagacccgugaccagcggcugcuuccccaucaugcacgacagaaccaagaucagacagcugcccaaccugcugagaggcuacgagcacaucagacugagcacccacaacgugaucaacgccgagaacgcccccggcggccccuacaagaucggcaccagcggcagcugccccaacaucaccaacggcaacggcuucuucgccaccauggccugggccgugcccaagaacgacaagaacaagaccgccaccaacccccugaccaucgaggugcccuacaucugcaccgagggcgaggaccagaucaccguguggggcuuccacagcgacaacgagacccagauggccaagcuguacggcgacagcaagccccagaaguucaccagcagcgccaacggcgugaccacccacuacgugagccagaucggcggcuuccccaaccagaccgaggacggcggccugccccagagcggcagaaucgugguggacuacauggugcagaagagcggcaagaccggcaccaucaccuaccagagaggcauccugcugccccagaagguguggugcgccagcggcagaagcaaggugaucaagggcagccugccccugaucggcgaggccgacugccugcacgagaaguacggcggccugaacaagagcaagcccuacuacaccggcgagcacgccaaggccaucggcaacugccccaucugggugaagaccccccugaagcuggccaacggcaccaaguacagaccccccgccaagcugcugaaggagagaggcuucuucggcgccaucgccggcuuccuggagggcggcugggagggcaugaucgccggcuggcacggcuacaccagccacggcgcccacggcguggccguggccgccgaccugaagagcacccaggaggccaucaacaagaucaccaagaaccugaacagccugagcgagcuggaggugaagaaccugcagagacugagcggcgccauggacgagcugcacaacgagauccuggagcuggacgagaagguggacgaccugagagccgacaccaucagcagccagaucgagcuggccgugcugcugagcaacgagggcaucaucaacagcgaggacgagcaccugcuggcccuggagagaaagcugaagaagaugcugggccccagcgccguggagaucggcaacggcugcuucgagaccaagcacaagugcaaccagaccugccuggacagaaucgccgccggcaccuucgacgccggcgaguucagccugcccaccuucgacagccugaacaucaccgccgccagccugaacgacgacggccuggacaaccacaccauccugcuguacuacagcaccgccgccagcagccuggccgugacccugaugaucgccaucuucgugguguacauggugagcagagacaacgugagcugcagcaucugccuguga

SEQ ID NO: 187432 - RNA, 1758 nt, Artificial Sequence
  derived and/or modified CDS sequence (opt4) from hemagglutinin__InfluenzaB__AGX20085
augaaggccaucaucgugcugcugaugguggugaccagcaacgccgacagaaucugcaccggcaucaccagcagcaacagcccccacguggugaagaccgccacccagggcgaggugaacgugaccggcgugaucccccugaccaccacccccaccaagagccacuucgccaaccugaagggcaccgagaccagaggcaagcugugccccaagugccugaacugcaccgaccuggacguggcccugggcagacccaagugcaccggcaagauccccagcgccagagugagcauccugcacgaggugagacccgugaccagcggcugcuuccccaucaugcacgacagaaccaagaucagacagcugcccaaccugcugagaggcuacgagcacaucagacugagcacccacaacgugaucaacgccgagaacgcccccggcggccccuacaagaucggcaccagcggcagcugccccaacaucaccaacggcaacggcuucuucgccaccauggccugggccgugcccaagaacgacaagaacaagaccgccaccaacccccugaccaucgaggugcccuacaucugcaccgagggcgaggaccagaucaccaucuggggcuuccacagcgacaacgagacccagauggccaagcuguacggcgacagcaagccccagaaguucaccagcagcgccaacggcgugaccacccacuacgugagccagaucggcggcuuccccaaccagaccgaggacggcggccugccccagagcggcagaaucgugguggacuacauggugcagaagagcggcaagaccggcaccaucaccuaccagagaggcauccugcugccccagaagguguggugcgccagcggcagaagcaaggugaucaagggcagccugccccugaucggcgaggccgacugccugcacgagaaguacggcggccugaacaagagcaagcccuacuacaccggcgagcacgccaaggccaucggcaacugccccaucugggugaagaccccccugaagcuggccaacggcaccaaguacagaccccccgccaagcugcugaaggagagaggcuucuucggcgccaucgccggcuuccuggagggcggcugggagggcaugaucgccggcuggcacggcuacaccagccacggcgcccacggcguggccguggccgccgaccugaagagcacccaggaggccaucaacaagaucaccaagaaccugaacagccugagcgagcuggaggugaagaaccugcagagacugagcggcgccauggacgagcugcacaacgagauccuggagcuggacgagaagguggacgaccugagagccgacaccaucagcagccagaucgagcuggccgugcugcugagcaacgagggcaucaucaacagcgaggacgagcaccugcuggcccuggagagaaagcugaagaagaugcugggccccagcgccguggagaucggcaacggcugcuucgagaccaagcacaagugcaaccagaccugccuggacagaaucgccgccggcaccuucgacgccggcgaguucagccugcccaccuucgacagccugaacaucaccgccgccagccugaacgacgacggccuggacaaccacaccauccugcuguacuacagcaccgccgccagcagccuggccgugacccugaugaucgccaucuucgugguguacauggugagcagagacaacgugagcugcagcaucugccuguga

SEQ ID NO: 187433 - RNA, 1758 nt, Artificial Sequence
  derived and/or modified CDS sequence (opt4) from hemagglutinin__InfluenzaB__AGX20096
augaaggccaucaucgugcugcugaugguggugaccagcaacgccgacagaaucugcaccggcgugaccagcagcaacagcccccacguggugaagaccgccacccagggcgaggugaacgugaccggcgugaucccccugaccaccacccccaccaagagccacuucgccaaccugaagggcaccgagaccagaggcaagcugugccccaagugccugaacugcaccgaccuggacguggcccugggcagacccaagugcaccggcaacauccccagcgccagagugagcauccugcacgaggugagacccgugaccagcggcugcuuccccaucaugcacgacagaaccaagaucagacagcugcccaaccugcugagaggcuacgagcacaucagacugagcacccacaacgugaucaacgccgagaacgcccccggcggccccuacaagaucggcaccagcggcagcugccccaacgugaccaacggcaacggcuucuucgccaccauggccugggccgugcccaagaacgacaacaacaagaccgccaccaacagccugaccaucgaggugcccuacaucugcaccgagggcgaggaccagaucaccguguggggcuuccacagcgacaacgagacccagauggccaagcuguacggcgacagcaagccccagaaguucaccagcagcgccaacggcgugaccacccacuacgugagccagaucggcggcuuccccaaccagaccgaggacggcggccugccccagagcggcagaaucgugguggacuacauggugcagaagagcggcaagaccggcaccaucaccuaccagagaggcauccugcugccccagaagguguggugcgccagcggcagaagcaaggugaucaagggcagccugccccugaucggcgaggccgacugccugcacgagaaguacggcggccugaacaagagcaagcccuacuacaccggcgagcacgccaaggccaucggcaacugccccaucugggugaagaccccccugaagcuggccaacggcaccaaguacagaccccccgccaagcugcugaaggagagaggcuucuucggcgccaucgccggcuuccuggagggcggcugggagggcaugaucgccggcuggcacggcuacaccagccacggcgcccacggcguggccguggccgccgaccugaagagcacccaggaggccaucaacaagaucaccaagaaccugaacagccugagcgagcuggaggugaagaaccugcagagacugagcggcgccauggacgagcugcacaacgagauccuggagcuggacgagaagguggacgaccugagagccgacaccaucagcagccagaucgagcuggccgugcugcugagcaacgagggcaucaucaacagcgaggacgagcaccugcuggcccuggagagaaagcugaagaagaugcugggccccagcgccguggagaucggcaacggcugcuucgagaccaagcacaagugcaaccagaccugccuggacagaaucgccgccggcaccuucgacgccggcgaguucagccugcccaccuucgacagccugaacaucaccgccgccagccugaacgacgacggccuggacaaccacaccauccugcuguacuacagcaccgccgccagcagccuggccgugacccugaugaucgccaucuucgugguguacauggugagcagagacaacgugagcugcagcaucugccuguga

SEQ ID NO: 187434 - RNA, 1758 nt, Artificial Sequence; identical to SEQ ID NO: 186668
  derived and/or modified CDS sequence (opt4) from hemagglutinin__InfluenzaB__AGX20107

SEQ ID NO: 187435 - RNA, 1758 nt, Artificial Sequence; identical to SEQ ID NO: 186668
  derived and/or modified CDS sequence (opt4) from hemagglutinin__InfluenzaB__AGX20118

SEQ ID NO: 187436 - RNA, 1758 nt, Artificial Sequence; identical to SEQ ID NO: 186668
  derived and/or modified CDS sequence (opt4) from hemagglutinin__InfluenzaB__AGX20129

SEQ ID NO: 187437 - RNA, 1758 nt, Artificial Sequence; identical to SEQ ID NO: 186668
  derived and/or modified CDS sequence (opt4) from hemagglutinin__InfluenzaB__AGX20140

SEQ ID NO: 187438 - RNA, 1758 nt, Artificial Sequence; identical to SEQ ID NO: 186668
  derived and/or modified CDS sequence (opt4) from hemagglutinin__InfluenzaB__AGX20151

SEQ ID NO: 187439 - RNA, 1758 nt, Artificial Sequence; identical to SEQ ID NO: 186668
  derived and/or modified CDS sequence (opt4) from hemagglutinin__InfluenzaB__AGX20162

SEQ ID NO: 187440 - RNA, 1758 nt, Artificial Sequence; identical to SEQ ID NO: 186668
  derived and/or modified CDS sequence (opt4) from hemagglutinin__InfluenzaB__AGX20173

SEQ ID NO: 187441 - RNA, 1758 nt, Artificial Sequence; identical to SEQ ID NO: 186668
  derived and/or modified CDS sequence (opt4) from hemagglutinin__InfluenzaB__AGX20184

SEQ ID NO: 187442 - RNA, 1758 nt, Artificial Sequence; identical to SEQ ID NO: 186668
  derived and/or modified CDS sequence (opt4) from hemagglutinin__InfluenzaB__AGX20195

SEQ ID NO: 187443 - RNA, 1758 nt, Artificial Sequence; identical to SEQ ID NO: 186668
  derived and/or modified CDS sequence (opt4) from hemagglutinin__InfluenzaB__AGX20206

SEQ ID NO: 187444 - RNA, 1758 nt, Artificial Sequence; identical to SEQ ID NO: 186668
  derived and/or modified CDS sequence (opt4) from hemagglutinin__InfluenzaB__AGX20217

SEQ ID NO: 187445 - RNA, 1758 nt, Artificial Sequence; identical to SEQ ID NO: 186705
  derived and/or modified CDS sequence (opt4) from hemagglutinin__InfluenzaB__AGX20228

SEQ ID NO: 187446 - RNA, 1758 nt, Artificial Sequence
  derived and/or modified CDS sequence (opt4) from hemagglutinin__InfluenzaB__AGX20239
augaaggccaucaucgugcugcugaugguggugaccagcaacgccgacagaaucugcaccggcaucaccagcagcaacagcccccacguggugaagaccgccacccagggcgaggugaacgugaccggcgugaucccccugaccaccacccccaccaagagccacuucgccaaccugaagggcaccgagaccagaggcaagcugugccccaagugccccaacugcaccgaccuggacguggcccugggcagacccaagugcaccggcaagauccccagcgccagagugagcauccugcacgaggugagacccgugaccagcggcugcuuccccaucaugcacgacagaaccaagaucagacagcugcccaaccugcugagaggcuacgagcacaucagacugagcacccacaacgugaucaacgccgagaacgcccccggcggccccuacaagaucggcaccagcggcagcugccccaacgugaccaacggcaacggcuucuucgccaccauggccugggccgugcccaagaacgacaagaacaagaccgccaccaacccccugaccaucgaggugcccuacaucugcaccgagggcgaggaccagaucaucguguggggcuuccacagcgacaacgagacccagauggccaagcuguacggcgacagcaagccccagaaguucaccagcagcgccaacggcgugaccacccacuacgugagccagaucggcggcuuccccaaccagaccgaggacggcggccugccccagagcggcagaaucgugguggacuacauggugcagaagagcggcaagaccggcaccaucaccuaccagagaggcauccugcugccccagaagguguggugcgccagcggcagaagcaaggugaucaagggcagccugccccugaucggcgaggccgacugccugcacgagaaguacggcggccugaacaagagcaagcccuacuacaccggcgagcacgccaaggccaucggcaacugccccaucugggugaagaccccccugaagcuggccaacggcaccaaguacagaccccccgccaagcugcugaaggagagaggcuucuucggcgccaucgccggcuuccuggagggcggcugggagggcaugaucgccggcuggcacggcuacaccagccacggcgcccacggcguggccguggccgccgaccugaagagcacccaggaggccaucaacaagaucaccaagaaccugaacagccugagcgagcuggaggugaagaaccugcagagacugagcggcgccauggacgagcugcacaacgagauccuggagcuggacgagaagguggacgaccugagagccgacaccaucagcagccagaucgagcuggccgugcugcugagcaacgagggcaucaucaacagcgaggacgagcaccugcuggcccuggagagaaagcugaagaagaugcugggccccagcgccguggagaucggcaacggcugcuucgagaccaagcacaagugcaaccagaccugccuggacagaaucgccgccggcaccuucgacgccggcgaguucagccugcccaccuucgacagccugaacaucaccgccgccagccugaacgacgacggccuggacaaccacaccauccugcuguacuacagcaccgccgccagcagccuggccgugacccugaugaucgccaucuucgugguguacauggugagcagagacaacgugagcugcagcaucugccuguga

SEQ ID NO: 187447 - RNA, 1758 nt, Artificial Sequence; identical to SEQ ID NO: 186668
  derived and/or modified CDS sequence (opt4) from hemagglutinin__InfluenzaB__AGX20250

SEQ ID NO: 187448 - RNA, 1758 nt, Artificial Sequence; identical to SEQ ID NO: 186668
  derived and/or modified CDS sequence (opt4) from hemagglutinin__InfluenzaB__AGX20261

SEQ ID NO: 187449 - RNA, 1758 nt, Artificial Sequence; identical to SEQ ID NO: 186668
  derived and/or modified CDS sequence (opt4) from hemagglutinin__InfluenzaB__AGX20272

SEQ ID NO: 187450 - RNA, 1758 nt, Artificial Sequence; identical to SEQ ID NO: 186668
  derived and/or modified CDS sequence (opt4) from hemagglutinin__InfluenzaB__AGX20283

SEQ ID NO: 187451 - RNA, 1758 nt, Artificial Sequence; identical to SEQ ID NO: 186668
  derived and/or modified CDS sequence (opt4) from hemagglutinin__InfluenzaB__AGX20294

SEQ ID NO: 187452 - RNA, 1758 nt, Artificial Sequence
  derived and/or modified CDS sequence (opt4) from hemagglutinin__InfluenzaB__AGX20305
augaaggccaucaucgugcugcugaugguggugaccagcaacgccgacagaaucugcaccggcaucaccagcagcaacagcccccacguggugaagaccgccacccagggcgaggugaacgugaccggcgugaucccccugaccaccacccccaccaagagccacuucgccaaccugaagggcaccgagaccagaggcaagcugugccccaagugccccaacugcaccgaccuggacguggcccugggcagacccaagugcaccggcaagauccccagcgccagagugagcauccugcacgaggugagacccgugaccagcggcugcuuccccaucaugcacgacagaaccaagaucagacagcugcccaaccugcugagaggcuacgagcacaucagacugagcacccacaacgugaucaacgccgagaacgcccccggcggccccuacaagaucggcaccagcggcagcugccccaacgugaccaacggcaacggcuucuucgccaccauggccugggccgugcccaagaacgacaagaacaagaccgccaccaaccagcugaccaucgaggugcccuacaucugcaccgagggcgaggaccagaucaccguguggggcuuccacagcgacaacgagacccagauggccaagcuguacggcgacagcaagccccagaaguucaccagcagcgccaacggcgugaccacccacuacgugagccagaucggcggcuuccccaaccagaccgaggacggcggccugccccagagcggcagaaucgugguggacuacauggugcagaagagcggcaagaccggcaccaucaccuaccagagaggcauccugcugccccagaagguguggugcgccagcggcagaagcaaggugaucaagggcagccugccccugaucggcgaggccgacugccugcacgagaaguacggcggccugaacaagagcaagcccuacuacaccggcgagcacgccaaggccaucggcaacugccccaucugggugaagaccccccugaagcuggccaacggcaccaaguacagaccccccgccaagcugcugaaggagagaggcuucuucggcgccaucgccggcuuccuggagggcggcugggagggcaugaucgccggcuggcacggcuacaccagccacggcgcccacggcguggccguggccgccgaccugaagagcacccaggaggccaucaacaagaucaccaagaaccugaacagccugagcgagcuggaggugaagaaccugcagagacugagcggcgccauggacgagcugcacaacgagauccuggagcuggacgagaagguggacgaccugagagccgacaccaucagcagccagaucgagcuggccgugcugcugagcaacgagggcaucaucaacagcgaggacgagcaccugcuggcccuggagagaaagcugaagaagaugcugggccccagcgccguggagaucggcaacggcugcuucgagaccaagcacaagugcaaccagaccugccuggacagaaucgccgccggcaccuucgacgccggcgaguucagccugcccaccuucgacagccugaacaucaccgccgccagccugaacgacgacggccuggacaaccacaccauccugcuguacuacagcaccgccgccagcagccuggccgugacccugaugaucgccaucuucgugguguacauggugagcagagacaacgugagcugcagcaucugccuguga

SEQ ID NO: 187453 - RNA, 1758 nt, Artificial Sequence; identical to SEQ ID NO: 186668
  derived and/or modified CDS sequence (opt4) from hemagglutinin__InfluenzaB__AGX20316

SEQ ID NO: 187454 - RNA, 1758 nt, Artificial Sequence; identical to SEQ ID NO: 186668
  derived and/or modified CDS sequence (opt4) from hemagglutinin__InfluenzaB__AGX20327

SEQ ID NO: 187455 - RNA, 1758 nt, Artificial Sequence
  derived and/or modified CDS sequence (opt4) from hemagglutinin__InfluenzaB__AGX20338
augaaggccaucaucgugcugcugaugguggugaccagcaacgccgacagaaucugcaccggcaucaccagcagcaacagcccccacguggugaagaccgccacccagggcgaggugaacgugaccggcgugaucccccugaccaccacccccaccaagagccacuucgccaaccugaagggcaccgagaccagaggcaagcugugccccaagugccccaacugcaccgaccuggacguggcccugggcagacccaagugcaccggcaagauccccagcgccagagugagcauccugcacgaggugagacccgugaccagcggcugcuuccccaucaugcacgacagaaccaagaucagacagcugcccaaccugcugagaggcuacgagcacaucagacugagcacccacaacgugaucaacgccgagaacgcccccggcggccccuacaagaucggcaccagcggcagcugccccaacgugaccaacggcaacggcuucuucgccaccauggccugggccgugcccaagaacgacaagaacaagaccgccaccaacccccugaccaucgaggugcccuacaucugcaccgagggcgaggaccagaucaccguguggggcuuccacagcgacaacgagacccagauggccaaccuguacggcgacagcaagccccagaaguucaccagcagcgccaacggcgugaccacccacuacgugagccagaucggcggcuuccccaaccagaccgaggacggcggccugccccagagcggcagaaucgugguggacuacauggugcagaagagcggcaagaccggcaccaucaccuaccagagaggcauccugcugccccagaagguguggugcgccagcggcagaagcaaggugaucaagggcagccugccccugaucggcgaggccgacugccugcacgagaaguacggcggccugaacaagagcaagcccuacuacaccggcgagcacgccaaggccaucggcaacugccccaucugggugaagaccccccugaagcuggccaacggcaccaaguacagaccccccgccaagcugcugaaggagagaggcuucuucggcgccaucgccggcuuccuggagggcggcugggagggcaugaucgccggcuggcacggcuacaccagccacggcgcccacggcguggccguggccgccgaccugaagagcacccaggaggccaucaacaagaucaccaagaaccugaacagccugagcgagcuggaggugaagaaccugcagagacugagcggcgccauggacgagcugcacaacgagauccuggagcuggacgagaagguggacgaccugagagccgacaccaucagcagccagaucgagcuggccgugcugcugagcaacgagggcaucaucaacagcgaggacgagcaccugcuggcccuggagagaaagcugaagaagaugcugggccccagcgccguggagaucggcaacggcugcuucgagaccaagcacaagugcaaccagaccugccuggacagaaucgccgccggcaccuucgacgccggcgaguucagccugcccaccuucgacagccugaacaucaccgccgccagccugaacgacgacggccuggacaaccacaccauccugcuguacuacagcaccgccgccagcagccuggccgugacccugaugaucgccaucuucgugguguacauggugagcagagacaacgugagcugcagcaucugccuguga

SEQ ID NO: 187456 - RNA, 1758 nt, Artificial Sequence; identical to SEQ ID NO: 186668
  derived and/or modified CDS sequence (opt4) from hemagglutinin__InfluenzaB__AGX20349

SEQ ID NO: 187457 - RNA, 1758 nt, Artificial Sequence; identical to SEQ ID NO: 186668
  derived and/or modified CDS sequence (opt4) from hemagglutinin__InfluenzaB__AGX20360

SEQ ID NO: 187458 - RNA, 1758 nt, Artificial Sequence; identical to SEQ ID NO: 186705
  derived and/or modified CDS sequence (opt4) from hemagglutinin__InfluenzaB__AGX20371

SEQ ID NO: 187459 - RNA, 1758 nt, Artificial Sequence
  derived and/or modified CDS sequence (opt4) from hemagglutinin__InfluenzaB__AGX20382
augaaggccaucaucgugcugcugaugguggugaccagcaacgccgacagaaucugcaccggcaucaccagcagcaacagcccccacguggugaagaccgccacccagggcgaggugaacgugaccggcgugaucccccugaccaccacccccaccaagagccacuucgccaaccugaagggcaccgagaccagaggcaagcugugccccaagugccccaacugcaccgaccuggacguggcccugggcagacccaagugcaccggcaagauccccagcgccagagugagcauccugcacgaggugagacccgugaccagcggcugcuuccccaucaugcacgacagaaccaagaucagacagcugcccaaccugcugagaggcuacgagcacaucagacugagcacccacaacgugaucaacgccgagaacgcccccggcggccccuacaagaucggcaccagcggcagcugccccaacgugaccaacggcaacggcuucuucgccaccauggccugggccgugcccaagaacgacaagaacaagaccgccaccaacccccugaccaucgaggugcccuacaucugcaccgagggcgaggaccagaucaccguguggggcuuccacagcgacaacgagacccagauggccaagcuguacggcgacagcaagccccagaaguucaccagcagcgccaacggcgugaccacccacuacgugagccagaucggcggcuuccccaaccagaccgaggacggcggccugccccagagcggcagaaucgugguggacuacauggugcagaagagcggcaagaccggcaccaucaccuaccagagaggcauccugcugccccagaagguguggugcgccagcggcagaagcaaggugaucaagggcagccugccccugaucggcgaggccgacugccugcacgagaaguacggcggccugaacaagagcaagcccuacuacaccggcgagcacgccaaggccaucggcaacugccccaucugggugaagaccccccugaagcuggccaacggcaccaaguacagaccccccgccaagcugcugaaggagagaggcuucuucggcgccaucgccggcuuccuggagggcggcugggagggcaugaucgccggcuggcacggcuacaccagccacggcgcccacggcguggccguggccgccgaccugaagagcacccaggaggccaucaacaagaucaccaagaaccugaacagccugagcgagcuggaggugaagaaccugcagagacugagcggcgccaugaacgagcugcacaacgagauccuggagcuggacgagaagguggacgaccugagagccgacaccaucagcagccagaucgagcuggccgugcugcugagcaacgagggcaucaucaacagcgaggacgagcaccugcuggcccuggagagaaagcugaagaagaugcugggccccagcgccguggagaucggcaacggcugcuucgagaccaagcacaagugcaaccagaccugccuggacagaaucgccgccggcaccuucgacgccggcgaguucagccugcccaccuucgacagccugaacaucaccgccgccagccugaacgacgacggccuggacaaccacaccauccugcuguacuacagcaccgccgccagcagccuggccgugacccugaugaucgccaucuucgugguguacauggugagcagagacaacgugagcugcagcaucugccuguga

SEQ ID NO: 187460 - RNA, 1758 nt, Artificial Sequence; identical to SEQ ID NO: 186668
  derived and/or modified CDS sequence (opt4) from hemagglutinin__InfluenzaB__AGX20393

SEQ ID NO: 187461 - RNA, 1758 nt, Artificial Sequence; identical to SEQ ID NO: 186705
  derived and/or modified CDS sequence (opt4) from hemagglutinin__InfluenzaB__AGX20404

SEQ ID NO: 187462 - RNA, 1758 nt, Artificial Sequence; identical to SEQ ID NO: 186668
  derived and/or modified CDS sequence (opt4) from hemagglutinin__InfluenzaB__AGX20415

SEQ ID NO: 187463 - RNA, 1758 nt, Artificial Sequence; identical to SEQ ID NO: 186668
  derived and/or modified CDS sequence (opt4) from hemagglutinin__InfluenzaB__AGX20426

SEQ ID NO: 187464 - RNA, 1758 nt, Artificial Sequence; identical to SEQ ID NO: 186668
  derived and/or modified CDS sequence (opt4) from hemagglutinin__InfluenzaB__AGX20437

SEQ ID NO: 187465 - RNA, 1758 nt, Artificial Sequence; identical to SEQ ID NO: 186668
  derived and/or modified CDS sequence (opt4) from hemagglutinin__InfluenzaB__AGX20448

SEQ ID NO: 187466 - RNA, 1758 nt, Artificial Sequence; identical to SEQ ID NO: 186668
  derived and/or modified CDS sequence (opt4) from hemagglutinin__InfluenzaB__AGX20459

SEQ ID NO: 187467 - RNA, 1758 nt, Artificial Sequence; identical to SEQ ID NO: 186668
  derived and/or modified CDS sequence (opt4) from hemagglutinin__InfluenzaB__AGX20470

SEQ ID NO: 187468 - RNA, 1758 nt, Artificial Sequence; identical to SEQ ID NO: 186668
  derived and/or modified CDS sequence (opt4) from hemagglutinin__InfluenzaB__AGX20481

SEQ ID NO: 187469 - RNA, 1758 nt, Artificial Sequence; identical to SEQ ID NO: 186668
  derived and/or modified CDS sequence (opt4) from hemagglutinin__InfluenzaB__AGX20492

SEQ ID NO: 187470 - RNA, 1758 nt, Artificial Sequence; identical to SEQ ID NO: 186668
  derived and/or modified CDS sequence (opt4) from hemagglutinin__InfluenzaB__AGX20503

SEQ ID NO: 187471 - RNA, 1758 nt, Artificial Sequence; identical to SEQ ID NO: 186668
  derived and/or modified CDS sequence (opt4) from hemagglutinin__InfluenzaB__AGX20514

SEQ ID NO: 187472 - RNA, 1758 nt, Artificial Sequence
  derived and/or modified CDS sequence (opt4) from hemagglutinin__InfluenzaB__AGX20525
augaaggccaucaucgugcugcugaugguggugaccagcaacgccgacagaaucugcaccggcaucaccagcagcaacagcccccacguggugaagaccgccacccagggcgaggugaacgugaccggcgugaucccccugaccaccacccccaccaagagccacuucagcaaccugaagggcaccgagaccagaggcaagcugugccccaagugccccaacugcaccgaccuggacguggcccugggcagacccaagugcaccggcaagauccccagcgccagagugagcauccugcacgaggugagacccgugaccagcggcugcuuccccaucaugcacgacagaaccaagaucagacagcugcccaaccugcugagaggcuacgagcacaucagacugagcacccacaacgugaucaacgccgagaacgcccccggcggccccuacaagaucggcaccagcggcagcugccccaacgugaccaacggcaacggcuucuucgccaccauggccugggccgugcccaagaacgacaagaacaagaccgccaccaacccccugaccaucgaggugcccuacaucugcaccgagggcgaggaccagaucaccguguggggcuuccacagcgacaacgagacccagauggccaagcuguacggcgacagcaagccccagaaguucaccagcagcgccaacggcgugaccacccacuacgugagccagaucggcggcuuccccaaccagaccgaggacggcggccugccccagagcggcagaaucgugguggacuacauggugcagaagagcggcaagaccggcaccaucaccuaccagagaggcauccugcugccccagaagguguggugcgccagcggcagaagcaaggugaucaagggcagccugccccugaucggcgaggccgacugccugcacgagaaguacggcggccugaacaagagcaagcccuacuacaccggcgagcacgccaaggccaucggcaacugccccaucugggugaagaccccccugaagcuggccaacggcaccaaguacagaccccccgccaagcugcugaaggagagaggcuucuucggcgccaucgccggcuuccuggagggcggcugggagggcaugaucgccggcuggcacggcuacaccagccacggcgcccacggcguggccguggccgccgaccugaagagcacccaggaggccaucaacaagaucaccaagaaccugaacagccugagcgagcuggaggugaagaaccugcagagacugagcggcgccauggacgagcugcacaacgagauccuggagcuggacgagaagguggacgaccugagagccgacaccaucagcagccagaucgagcuggccgugcugcugagcaacgagggcaucaucaacagcgaggacgagcaccugcuggcccuggagagaaagcugaagaagaugcugggccccagcgccguggagaucggcaacggcugcuucgagaccaagcacaagugcaaccagaccugccuggacagaaucgccgccggcaccuucgacgccggcgaguucagccugcccaccuucgacagccugaacaucaccgccgccagccugaacgacgacggccuggacaaccacaccauccugcuguacuacagcaccgccgccagcagccuggccgugacccugaugaucgccaucuucgugguguacauggugagcagagacaacgugagcugcagcaucugccuguga

SEQ ID NO: 187473 - RNA, 1758 nt, Artificial Sequence; identical to SEQ ID NO: 186668
  derived and/or modified CDS sequence (opt4) from hemagglutinin__InfluenzaB__AGX20536

SEQ ID NO: 187474 - RNA, 1758 nt, Artificial Sequence
  derived and/or modified CDS sequence (opt4) from hemagglutinin__InfluenzaB__AGX20547
augaaggccaucaucgugcugcugaugguggugaccagcaacgccgacagaaucugcaccggcaucaccagcagcaacagcccccacguggugaagaccgccacccagggcgaggugaacgugaccggcgugaucccccugaccaccacccccaccaagagccacuucgccaaccugaagggcaccgagaccagaggcaagcugugccccaagugccugaacugcaccgaccuggacguggcccugggcagacccaagugcaccggcaagauccccagcgccagagugagcauccugcacgaggugagacccgugaccagcggcugcuuccccaucaugcacgacagaaccaagaucagacagcugcccaaccugcugagaggcuacgagcacaucagacugagcacccacaacgugaucaacgccgagaacgcccccggcggccccuacaagaucggcaccagcggcagcugccccaacgugaccaacggcaacggcuucuucgccaccauggccugggccgugcccaagaacgacaagaacaagaccgccaccaacccccugaccaucgaggugcccuacaucugcaccgagggcgaggaccagaucaccguguggggcuuccacagcgacaacgagacccagauggccaagcuguacggcgacagcaagccccagaaguucaccagcagcgccaacggcgugaccacccaccacgugagccagaucggcggcuuccccaaccagaccgaggacggcggccugccccagagcggcagaaucgugguggacuacauggugcagaagagcggcaagaccggcaccaucaccuaccagagaggcauccugcugccccagaagguguggugcgccagcggcagaagcaaggugaucaagggcagccugccccugaucggcgaggccgacugccugcacgagaaguacggcggccugaacaagagcaagcccuacuacaccggcgagcacgccaaggccaucggcaacugccccaucugggugaagaccccccugaagcuggccaacggcaccaaguacagaccccccgccaagcugcugaaggagagaggcuucuucggcgccaucgccggcuuccuggagggcggcugggagggcaugaucgccggcuggcacggcuacaccagccacggcgcccacggcguggccguggccgccgaccugaagagcacccaggaggccaucaacaagaucaccaagaaccugaacagccugagcgagcuggagaucaagaaccugcagagacugagcggcgccauggacgagcugcacaacgagauccuggagcuggacgagaagguggacgaccugagagccgacaccaucagcagccagaucgagcuggccgugcugcugagcaacgagggcaucaucaacagcgaggacgagcaccugcuggcccuggagagaaagcugaagaagaugcugggccccagcgccguggagaucggcaacggcugcuucgagaccaagcacaagugcaaccagaccugccuggacagaaucgccgccggcaccuucgacgccggcgaguucagccugcccaccuucgacagccugaacaucaccgccgccagccugaacgacgacggccuggacaaccacaccauccugcuguacuacagcaccgccgccagcagccuggccgugacccugaugaucgccaucuucgugguguacauggugagcagagacaacgugagcugcagcaucugccuguga

SEQ ID NO: 187475 - RNA, 1758 nt, Artificial Sequence; identical to SEQ ID NO: 186722
  derived and/or modified CDS sequence (opt4) from hemagglutinin__InfluenzaB__AGX20558

SEQ ID NO: 187476 - RNA, 1758 nt, Artificial Sequence; identical to SEQ ID NO: 186668
  derived and/or modified CDS sequence (opt4) from hemagglutinin__InfluenzaB__AGX20569

SEQ ID NO: 187477 - RNA, 1758 nt, Artificial Sequence; identical to SEQ ID NO: 186705
  derived and/or modified CDS sequence (opt4) from hemagglutinin__InfluenzaB__AGX20580

SEQ ID NO: 187478 - RNA, 1758 nt, Artificial Sequence; identical to SEQ ID NO: 186668
  derived and/or modified CDS sequence (opt4) from hemagglutinin__InfluenzaB__AGX20591

SEQ ID NO: 187479 - RNA, 1758 nt, Artificial Sequence; identical to SEQ ID NO: 186668
  derived and/or modified CDS sequence (opt4) from hemagglutinin__InfluenzaB__AGX20602

SEQ ID NO: 187480 - RNA, 1758 nt, Artificial Sequence; identical to SEQ ID NO: 186668
  derived and/or modified CDS sequence (opt4) from hemagglutinin__InfluenzaB__AGX20613

SEQ ID NO: 187481 - RNA, 1758 nt, Artificial Sequence; identical to SEQ ID NO: 186668
  derived and/or modified CDS sequence (opt4) from hemagglutinin__InfluenzaB__AGX20624

SEQ ID NO: 187482 - RNA, 1758 nt, Artificial Sequence
  derived and/or modified CDS sequence (opt4) from hemagglutinin__InfluenzaB__AGX20635
augaaggccaucaucgugcugcugaugguggugaccagcaacgccgacagaaucugcaccggcaucaccagcagcaacagcccccacguggugaagaccgccacccagggcgaggugaacgugaccggcgugaucccccugaccaccacccccaccaagagccacuucgccaaccugaagggcaccgagaccagaggcaagcugugccccaagugccugaacugcaccgaccuggacguggcccugggcagacccaagugcaccggcaagauccccagcgccagagugagcauccugcacgaggugagacccgugaccagcggcugcuuccccaucaugcacgacagaaccaagaucagacagcugcccaaccugcugagaggcuacgagcacaucagacugagcacccacaacgugaucaacgccgagaacgcccccggcggccccuacaagaucggcaccagcggcagcugccccaacgugaccaacggcaacggcuucuucgccaccauggccugggccgugcccaagaacgacaagaacaagaccgccaccaacccccugaccaucgaggugcccuacaucugcaccgagggcgaggaccagaucaccguguggggcuuccacagcgacaacgagacccugauggccaagcuguacggcgacagcaagccccagaaguucaccagcagcgccaacggcgugaccacccacuacgugagccagaucggcggcuuccccaaccagaccgaggacggcggccugccccagagcggcagaaucgugguggacuacauggugcagaagagcggcaagaccggcaccaucaccuaccagagaggcauccugcugccccagaagguguggugcgccagcggcagaagcaaggugaucaagggcagccugccccugaucggcgaggccgacugccugcacgagaaguacggcggccugaacaagagcaagcccuacuacaccggcgagcacgccaaggccaucggcaacugccccaucugggugaagaccccccugaagcuggccaacggcaccaaguacagaccccccgccaagcugcugaaggagagaggcuucuucggcgccaucgccggcuuccuggagggcggcugggagggcaugaucgccggcuggcacggcuacaccagccacggcgcccacggcguggccguggccgccgaccugaagagcacccaggaggccaucaacaagaucaccaagaaccugaacagccugagcgagcuggaggugaagaaccugcagagacugagcggcgccauggacgagcugcacaacgagauccuggagcuggacgagaagguggacgaccugagagccgacaccaucagcagccagaucgagcuggccgugcugcugagcaacgagggcaucaucaacagcgaggacgagcaccugcuggcccuggagagaaagcugaagaagaugcugggccccagcgccguggagaucggcaacggcugcuucgagaccaagcacaagugcaaccagaccugccuggacagaaucgccgccggcaccuucgacgccggcgaguucagccugcccaccuucgacagccugaacaucaccgccgccagccugaacgacgacggccuggacaaccacaccauccugcuguacuacagcaccgccgccagcagccuggccgugacccugaugaucgccaucuucgugguguacauggugagcagagacaacgugagcugcagcaucugccuguga

SEQ ID NO: 187483 - RNA, 1758 nt, Artificial Sequence; identical to SEQ ID NO: 186668
  derived and/or modified CDS sequence (opt4) from hemagglutinin__InfluenzaB__AGX20646

SEQ ID NO: 187484 - RNA, 1758 nt, Artificial Sequence
  derived and/or modified CDS sequence (opt4) from hemagglutinin__InfluenzaB__AGX20668
augaaggccaucaucgugcugcugaugguggugaccagcaacgccgacagaaucugcaccggcaucaccagcagcaacagcccccacguggugaagaccgccacccagggcgaggugaacgugaccggcgugaucccccugaccaccacccccaccaagagccacuucgccaaccugaagggcaccgagaccagaggcaagcugugccccaagugccccaacugcaccgaccuggacguggcccugggcagacccaagugcaccggcaagauccccagcgccagagugagcauccugcacgaggugagacccgugaccagcggcugcuuccccaucaugcacgacagaaccaagaucagacagcugcccaaccugcugagaggcuacgagcacaucagacugagcacccacaacgugaucaacgccgagaacgcccccggcggccccuacaagaucggcaccagcggcagcugccccaacgugaccaacggcaacggcuucuucgccaccauggccugggccgugcccaagaacgacaagaccaagaccgccaccaacccccugaccaucgaggugcccuacaucugcaccgagggcgaggaccagaucaccguguggggcuuccacagcgacaacgagacccagauggccaagcuguacggcgacagcaagccccagaaguucaccagcagcgccaacggcgugaccacccacuacgugagccagaucggcggcuuccccaaccagaccgaggacggcggccugccccagagcggcagaaucgugguggacuacauggugcagaagagcggcaagaccggcaccaucaccuaccagagaggcauccugcugccccagaagguguggugcgccagcggcagaagcaaggugaucaagggcagccugccccugaucggcgaggccgacugccugcacgagaaguacggcggccugaacaagagcaagcccuacuacaccggcgagcacgccaaggccaucggcaacugccccaucugggugaagaccccccugaagcuggccaacggcaccaaguacagaccccccgccaagcugcugaaggagagaggcuucuucggcgccaucgccggcuuccuggagggcggcugggagggcaugaucgccggcuggcacggcuacaccagccacggcgcccacggcguggccguggccgccgaccugaagagcacccaggaggccaucaacaagaucaccaagaaccugaacagccugagcgagcuggaggugaagaaccugcagagacugagcggcgccauggacgagcugcacaacgagauccuggagcuggacgagaagguggacgaccugagagccgacaccaucagcagccagaucgagcuggccgugcugcugagcaacgagggcaucaucaacagcgaggacgagcaccugcuggcccuggagagaaagcugaagaagaugcugggccccagcgccguggagaucggcaacggcugcuucgagaccaagcacaagugcaaccagaccugccuggacagaaucgccgccggcaccuucgacgccggcgaguucagccugcccaccuucgacagccugaacaucaccgccgccagccugaacgacgacggccuggacaaccacaccauccugcuguacuacagcaccgccgccagcagccuggccgugacccugaugaucgccaucuucgugguguacauggugagcagagacaacgugagcugcagcaucugccuguga

SEQ ID NO: 187485 - RNA, 1758 nt, Artificial Sequence; identical to SEQ ID NO: 186743
  derived and/or modified CDS sequence (opt4) from hemagglutinin__InfluenzaB__AGX20679

SEQ ID NO: 187486 - RNA, 1758 nt, Artificial Sequence; identical to SEQ ID NO: 186705
  derived and/or modified CDS sequence (opt4) from hemagglutinin__InfluenzaB__AGX20690

SEQ ID NO: 187487 - RNA, 1758 nt, Artificial Sequence; identical to SEQ ID NO: 186705
  derived and/or modified CDS sequence (opt4) from hemagglutinin__InfluenzaB__AGX20701

SEQ ID NO: 187488 - RNA, 1758 nt, Artificial Sequence; identical to SEQ ID NO: 187049
  derived and/or modified CDS sequence (opt4) from hemagglutinin__InfluenzaB__AGX20712

SEQ ID NO: 187489 - RNA, 1758 nt, Artificial Sequence; identical to SEQ ID NO: 186668
  derived and/or modified CDS sequence (opt4) from hemagglutinin__InfluenzaB__AGX20723

SEQ ID NO: 187490 - RNA, 1758 nt, Artificial Sequence
  derived and/or modified CDS sequence (opt4) from hemagglutinin__InfluenzaB__AGX20734
augaaggccaucaucgugcugcugaugguggugaccagcaacgccgacagaaucugcaccggcaucaccagcagcaacagcccccacguggugaagaccgccacccagggcgaggugaacgugaccggcgugaucccccugaccaccacccccaccaagagccacuucgccaaccugaagggcaccgagaccagaggcaagcugugccccaagugccugaacugcaccgaccuggacguggcccugggcagacccaagugcaccggcaagauccccagcgccagagugagcauccugcacgaggugagacccgugaccagcggcugcuuccccaucaugcacgacagaaccaagaucagacagcugcccaaccugcugagaggcuacgagcacaucagacugagcaccaacaacgugaucaacgccgagaacgcccccggcggccccuacaagaucggcaccagcggcagcugccccaacgugaccaacggcaacggcuucuucgccaccauggccugggccgugcccaagaacgacaagaacaagaccgccaccaacccccugaccaucgaggugcccuacaucugcaccgagggcgaggaccagaucaccguguggggcuuccacagcgacaacgagacccagauggccaagcuguacggcgacagcaagccccagaaguucaccagcagcgccaacggcgugaccacccacuacgugagccagaucggcggcuuccccaaccagaccgaggacggcggccugccccagagcggcagaaucgugguggacuacauggugcagaagagcggcaagaccggcaccaucaccuaccagagaggcauccugcugccccagaagguguggugcgccagcggcagaagcaaggugaucaagggcagccugccccugaucggcgaggccgacugccugcacgagaaguacggcggccugaacaagagcaagcccuacuacaccggcgagcacgccaaggccaucggcaacugccccaucugggugaagaccccccugaagcuggccaacggcaccaaguacagaccccccgccaagcugcugaaggagagaggcuucuucggcgccaucgccggcuuccuggagggcggcugggagggcaugaucgccggcuggcacggcuacaccagccacggcgcccacggcguggccguggccgccgaccugaagagcacccaggaggccaucaacaagaucaccaagaaccugaacagccugagcgagcuggaggugaagaaccugcagagacugagcggcgccauggacgagcugcacaacgagauccuggagcuggacgagaagguggacgaccugagagccgacaccaucagcagccagaucgagcuggccgugcugcugagcaacgagggcaucaucaacagcgaggacgagcaccugcuggcccuggagagaaagcugaagaagaugcugggccccagcgccguggagaucggcaacggcugcuucgagaccaagcacaagugcaaccagaccugccuggacagaaucgccgccggcaccuucgacgccggcgaguucagccugcccaccuucgacagccugaacaucaccgccgccagccugaacgacgacggccuggacaaccacaccauccugcuguacuacagcaccgccgccagcagccuggccgugacccugaugaucgccaucuucgugguguacauggugagcagagacaacgugagcugcagcaucugccuguga

SEQ ID NO: 187491 - RNA, 1758 nt, Artificial Sequence
  derived and/or modified CDS sequence (opt4) from hemagglutinin__InfluenzaB__AGX20745
augaaggccaucaucgugcugcugaugguggugaccagcaacgccgacagaaucugcaccggcaucaccagcagcaacagcccccacguggugaagaccgccacccagggcgaggugaacgugaccggcgugaucccccugaccaccacccccaccaagagccacuucgccaaccugaagggcaccgagaccagaggcaagcugugccccaagugccccaacugcaccgaccuggacguggcccugggcagacccaagugcaccggcaagauccccagcgccagagugagcauccugcacgaggugagacccgugaccagcggcugcuuccccaucaugcacgacagaaccaagaucagacagcugcccaaccugcugagaggcuacgagcacaucagacugagcacccacaacgugaucaacgccgagaacgcccccggcggccccuacaagaucggcaccagcggcagcugccccaacgugaccaacggcaacggcuucuucgccaccauggccugggccgugcccaagaacgacaagaacaagaccgccaccaacccccugaccaucgaggugcccuacaucugcaccgagggcgaggaccagaucaccaucuggggcuuccacagcgacaacgagacccagauggccaagcuguacggcgacagcaagccccagaaguucaccagcagcgccaacggcgugaccacccacuacgugagccagaucggcggcuuccccaaccagaccgaggacggcggccugccccagagcggcagaaucgugguggacuacauggugcagaagagcggcaagaccggcaccaucaccuaccagagaggcauccugcugccccagaagguguggugcgccagcggcagaagcaaggugaucaagggcagccugccccugaucggcgaggccgacugccugcacgagaaguacggcggccugaacaagagcaagcccuacuacaccggcgagcacgccaaggccaucggcaacugccccaucugggugaagaccccccugaagcuggccaacggcaccaaguacagaccccccgccaagcugcugaaggagagaggcuucuucggcgccaucgccggcuuccuggagggcggcugggagggcaugaucgccggcuggcacggcuacaccagccacggcgcccacggcguggccguggccgccgaccugaagagcacccaggaggccaucaacaagaucaccaagaaccugaacagccugagcgagcuggaggugaagaaccugcagagacugagcggcgccauggacgagcugcacaacgagauccuggagcuggacgagaagguggacgaccugagagccgacaccaucagcagccagaucgagcuggccgugcugcugagcaacgagggcaucaucaacagcgaggacgagcaccugcuggcccuggagagaaagcugaagaagaugcugggccccagcgccguggagaucggcaacggcugcuucgagaccaagcacaagugcaaccagaccugccuggacagaaucgccgccggcaccuucgacgccggcgaguucagccugcccaccuucgacagccugaacaucaccgccgccagccugaacgacgacggccuggacaaccacaccauccugcuguacuacagcaccgccgccagcagccuggccgugacccugaugaucgccaucuucgugguguacauggugagcagagacaacgugagcugcagcaucugccuguga

SEQ ID NO: 187492 - RNA, 1758 nt, Artificial Sequence; identical to SEQ ID NO: 187049
  derived and/or modified CDS sequence (opt4) from hemagglutinin__InfluenzaB__AGX20756

SEQ ID NO: 187493 - RNA, 1758 nt, Artificial Sequence; identical to SEQ ID NO: 186668
  derived and/or modified CDS sequence (opt4) from hemagglutinin__InfluenzaB__AGX20767

SEQ ID NO: 187494 - RNA, 1758 nt, Artificial Sequence; identical to SEQ ID NO: 186705
  derived and/or modified CDS sequence (opt4) from hemagglutinin__InfluenzaB__AGX20778

SEQ ID NO: 187495 - RNA, 1758 nt, Artificial Sequence
  derived and/or modified CDS sequence (opt4) from hemagglutinin__InfluenzaB__AGX20789
augaaggccaucaucgugcugcugaugguggugaccagcaacgccgacagaaucugcaccggcaucaccagcagcaacagcccccacguggugaagaccgccacccagggcgaggugaacgugaccggcgugaucccccugaccaccacccccaccaagagccacuucgccaaccugaagggcaccgagaccagaggcaagcugugccccaagugccccaacugcaccgaccuggacguggcccugggcagacccaagugcaccggcaagauccccagcgccagagugagcauccugcacgaggugagacccgugaccagcggcugcuuccccaucaugcacgacagaaccaagaucagacagcugcccaaccugcugagaggcuacgagcacaucagacugagcacccacaacgugaucaacgccgagaacgcccccggcggccccuacaagaucggcaccagcggcagcugccccaacgugaccaacggcaacggcuucuucgccaccauggccugggccgugcccaagaacgacaagaacaagaccgccaccaacccccugaccaucgaggugcccuacaucugcaccgagggcgaggaccagaucaccguguggggcuuccacagcgacaacgagacccagauggccaagcuguacggcgacagcaagccccagaaguucaccagcagcgccaacggcgugaccacccacuacgugagccagaucggcggcuuccccaaccagaccgaggacggcggccugccccagagcggcagaaucgugguggacuacauggugcagaagagcggcaagaccggcaccaucaccuaccagagaggcauccugcugccccagaagguguggugcgccagcggcagaagcaaggugaucaagggcagccugccccugaucggcgaggccgacugccugcacgagaaguacggcggccugaacaagagcaagcccuacuacaccggcgagcacgccaaggccaucggcaacugccccaucugggugaagaccccccugaagcuggccaacggcaccaaguacagaccccccgccaagcugcugaaggagagaggcuucuucggcgccaucgccggcuuccuggagggcggcugggagggcaugaucgccggcuggcacggcuacaccagccacggcgcccacggcguggccguggccgccgaccugaagagcacccaggaggccaucaacaagaucaccaagaaccugaacagccugagcgagcuggaggugaagaaccugcagagacugagcggcgccauggacgagcugcacggcgagauccuggagcuggacgagaagguggacgaccugagagccgacaccaucagcagccagaucgagcuggccgugcugcugagcaacgagggcaucaucaacagcgaggacgagcaccugcuggcccuggagagaaagcugaagaagaugcugggccccagcgccguggagaucggcaacggcugcuucgagaccaagcacaagugcaaccagaccugccuggacagaaucgccgccggcaccuucgacgccggcgaguucagccugcccaccuucgacagccugaacaucaccgccgccagccugaacgacgacggccuggacaaccacaccauccugcuguacuacagcaccgccgccagcagccuggccgugacccugaugaucgccaucuucgugguguacauggugagcagagacaacgugagcugcagcaucugccuguga

SEQ ID NO: 187496 - RNA, 1758 nt, Artificial Sequence
  derived and/or modified CDS sequence (opt4) from hemagglutinin__InfluenzaB__AGX20800
augaaggccaucaucgugcugcugaugguggugaccagcaacgccgacagaaucugcaccggcaucaccagcagcaacagcccccacguggugaagaccgccacccagggcgaggugaacgugaccggcgugaucccccugaccaccacccccaccaagagccacuucgccaaccugaagggcaccgagaccagaggcaagcugugccccaagugccccaacugcaccgaccuggacguggcccugggcagacccaagugcaccggcaagauccccagcgccagagugagcauccugcacgaggugagacccgugaccagcggcugcuuccccaucaugcacgacagaaccaagaucagacagcugcccaaccugcugagaggcuacgagcacaucagacugagcacccacaacgugaucaacgccgagaacgcccccggcggccccuacaagaucggcaccagcggcagcugccccaacgugaccaacggcaacggcuucuucgccaccauggccugggccgugcccaagaacgacaagaacaagaccgccaccaacccccugaccaucgaggugcccuacaucugcaccgagggcgaggaccagaucaccguguggggcuuccacagcgacaacgagacccagauggccaagcuguacggcgacagcaagccccagaaguucaccagcagcgccaacggcgugaccacccacuacgugagccagaucggcggcuuccccaaccagaccgaggacggcggccugccccagagcggcagaaucgugguggacuacauggugcagaagagcggcaagaccggcaccaucaccuaccagagaggcauccugcugccccagaagguguggugcgccagcggcagaagcaaggugaucaagggcagccugccccugaucggcgaggccgacugccugcacgagaaguacggcggccugaacaagagcaagcccuacuacaccggcgagcacgccaaggccaucggcaacugccccaucugggugaagaccccccugaagcuggccaacggcaccaaguacagaccccccgccaagcugcugaaggagagaggcuucuucggcgccaucgccggcuuccuggagggcggcugggagggcaugaucgccggcuggcacggcuacaccagccacggcgcccacggcguggccguggccgccgaccugaagagcacccaggaggccaucaacaagaucaccaagaaccugaacagccugagcgagcuggaggugaagaaccugcagagacugagcggcgccauggacgagcugcacaacgagauccuggagcuggacgagaagguggacgaccugagagccgacaccaucagcagccagaucgagcuggccgugcugcugagcaacgagggcaucaucaacagcgaggacgagcaccugcuggcccuggagagaaagcugaagaagaugcugggccccagcgccguggagaucggcaacggcugcuucgagaccaagcacaagugcaaccagaccugccuggacagaaucgccgccggcaccuucgacgccggcgaguucagccugcccaccuucgacagccugaacaucaccgccgccagccugaacgacgacgagcuggacaaccacaccauccugcuguacuacagcaccgccgccagcagccuggccgugacccugaugaucgccaucuucgugguguacauggugagcagagacaacgugagcugcagcaucugccuguga

SEQ ID NO: 187497 - RNA, 1758 nt, Artificial Sequence; identical to SEQ ID NO: 186743
  derived and/or modified CDS sequence (opt4) from hemagglutinin__InfluenzaB__AGX20811

SEQ ID NO: 187498 - RNA, 1758 nt, Artificial Sequence; identical to SEQ ID NO: 186743
  derived and/or modified CDS sequence (opt4) from hemagglutinin__InfluenzaB__AGX20822

SEQ ID NO: 187499 - RNA, 1758 nt, Artificial Sequence; identical to SEQ ID NO: 186743
  derived and/or modified CDS sequence (opt4) from hemagglutinin__InfluenzaB__AGX20833

SEQ ID NO: 187500 - RNA, 1758 nt, Artificial Sequence
  derived and/or modified CDS sequence (opt4) from hemagglutinin__InfluenzaB__AGX20844
augaaggccaucaucgugcugcugaugguggugaccagcaacgccgacagaaucugcaccggcaucaccagcagcaacagcccccacaucgugaagaccgccacccagggcgaggugaacgugaccggcgugaucccccugaccaccacccccaccaagagccacuucgccaaccugaagggcaccgagaccagaggcaagcugugccccaagugccugaacugcaccgaccuggacguggcccugggcagacccaagugcaugggcaagauccccagcgccagagugagcauccugcacgaggugagacccgugaccagcggcugcuuccccaucaugcacgacagaaccaagaucagacagcugcccaaccugcugagaggcuacgagcacaucagacugagcacccacaacgugaucaacgccgagaacgcccccggcggccccuacaagaucggcaccagcggcagcugccccaacaucaccaacggcaacggcuucuucgccaccauggccugggccgugcccaagaacgacaagaacaagaccgccaccaacccccugaccaucgaggugcccuacaucugcaccgagggcgaggaccagaucaccguguggggcuuccacagcgacaacgagacccagauggccaagcuguacggcgacagcaagccccagaaguucaccagcagcgccaacggcgugaccacccacuacgugagccagaucggcggcuuccccaaccagaccgaggacggcggccugccccagagcggcagaaucgugguggacuacauggugcagaagagcggcaagaccggcaccaucaccuaccagagaggcauccugcugccccagaagguguggugcgccagcggcagaagcaaggugaucaagggcagccugccccugaucggcgaggccgacugccugcacgagaaguacggcggccugaacaagagcaagcccuacuacaccggcgagcacgccaaggccaucggcaacugccccaucugggugaagaccccccugaagcuggccaacggcaccaaguacagaccccccgccaagcugcugaaggagagaggcuucuucggcgccaucgccggcuuccuggagggcggcugggagggcaugaucgccggcuggcacggcuacaccagccacggcgcccacggcguggccguggccgccgaccugaagagcacccaggaggccaucaacaagaucaccaagaaccugaacagccugagcgagcuggaggugaagaaccugcagagacugagcggcgccauggacgagcugcacaacgagauccuggagcuggacgagaagguggacgaccugagagccgacaccaucagcagccagaucgagcuggccgugcugcugagcaacgagggcaucaucaacagcgaggacgagcaccugcuggcccuggagagaaagcugaagaagaugcugggccccagcgccguggagaucggcaacggcugcuucgagaccaagcacaagugcaaccagaccugccuggacagaaucgccgccggcaccuucgacgccggcgaguucagccugcccaccuucgacagccugaacaucaccgccgccagccugaacgacgacggccuggacaaccacaccauccugcuguacuacagcaccgccgccagcagccuggccgugacccugaugaucgccaucuucgugguguacauggugagcagagacaacgugagcugcagcaucugccuguga

SEQ ID NO: 187501 - RNA, 1758 nt, Artificial Sequence; identical to SEQ ID NO: 186668
  derived and/or modified CDS sequence (opt4) from hemagglutinin__InfluenzaB__AGX20855

SEQ ID NO: 187502 - RNA, 1758 nt, Artificial Sequence; identical to SEQ ID NO: 186743
  derived and/or modified CDS sequence (opt4) from hemagglutinin__InfluenzaB__AGX20866

SEQ ID NO: 187503 - RNA, 1758 nt, Artificial Sequence; identical to SEQ ID NO: 186743
  derived and/or modified CDS sequence (opt4) from hemagglutinin__InfluenzaB__AGX20877

SEQ ID NO: 187504 - RNA, 1758 nt, Artificial Sequence
  derived and/or modified CDS sequence (opt4) from hemagglutinin__InfluenzaB__AGX20888
augaaggccaucaucgugcugcugaugguggugaccagcaacgccgacagaaucugcaccggcaucaccagcagcaacagcccccacguggugaagaccgccacccagggcgaggugaacgugaccggcgugaucccccugaccaccacccccaccaagagccacuucgccaaccugaagggcaccgagaccagaggcaagcugugccccaagugccccaacugcaccgaccuggacguggcccugggcagacccaagugcaccggcaagauccccagcgccagagugagcauccugcacgaggugagacccgugaccagcggcugcuuccccaucaugcacgacagaaccaagaucagacagcugcccaaccugcugagaggcuacgagcacaucagacugagcacccacaacgugaucaacgccgagaacgcccccggcggccccuacaagaucggcaccagcggcagcugccccaacgugaccaacggcaacggcuucuucgccaccauggccugggccgugcccaagaacgacaagaacaagaccgccaccaacccccugaccaucgaggugcccuacaucugcaccgagggcgaggaccagaucaccguguggggcuuccacagcgacagcgagacccagauggccaagcuguacggcgacagcaagccccagaaguucaccagcagcgccaacggcgugaccacccacuacgugagccagaucggcggcuuccccaaccagaccgaggacggcggccugccccagagcggcagaaucgugguggacuacauggugcagaagagcggcaagaccggcaccaucaccuaccagagaggcauccugcugccccagaagguguggugcgccagcggcagaagcaaggugaucaagggcagccugccccugaucggcgaggccgacugccugcacgagaaguacggcggccugaacaagagcaagcccuacuacaccggcgagcacgccaaggccaucggcaacugccccaucugggugaagaccccccugaagcuggccaacggcaccaaguacagaccccccgccaagcugcugaaggagagaggcuucuucggcgccaucgccggcuuccuggagggcggcugggagggcaugaucgccggcuggcacggcuacaccagccacggcgcccacggcguggccguggccgccgaccugaagagcacccaggaggccaucaacaagaucaccaagaaccugaacagccugagcgagcuggaggugaagaaccugcagagacugagcggcgccauggacgagcugcacaacgagauccuggagcuggacgagaagguggacgaccugagagccgacaccaucagcagccagaucgagcuggccgugcugcugagcaacgagggcaucaucaacagcgaggacgagcaccugcuggcccuggagagaaagcugaagaagaugcugggccccagcgccguggagaucggcaacggcugcuucgagaccaagcacaagugcaaccagaccugccuggacagaaucgccgccggcaccuucgacgccggcgaguucagccugcccaccuucgacagccugaacaucaccgccgccagccugaacgacgacggccuggacaaccacaccauccugcuguacuacagcaccgccgccagcagccuggccgugacccugaugaucgccaucuucgugguguacauggugagcagagacaacgugagcugcagcaucugccuguga

SEQ ID NO: 187505 - RNA, 1758 nt, Artificial Sequence; identical to SEQ ID NO: 186743
  derived and/or modified CDS sequence (opt4) from hemagglutinin__InfluenzaB__AGX20899

SEQ ID NO: 187506 - RNA, 1758 nt, Artificial Sequence; identical to SEQ ID NO: 186743
  derived and/or modified CDS sequence (opt4) from hemagglutinin__InfluenzaB__AGX20910

SEQ ID NO: 187507 - RNA, 1758 nt, Artificial Sequence; identical to SEQ ID NO: 186668
  derived and/or modified CDS sequence (opt4) from hemagglutinin__InfluenzaB__AGX20921

SEQ ID NO: 187508 - RNA, 1758 nt, Artificial Sequence
  derived and/or modified CDS sequence (opt4) from hemagglutinin__InfluenzaB__AGX20932
augaaggccaucaucgugcugcugaugguggugaccagcaacgccgacagaaucugcaccggcaucaccagcagcaacagcccccacguggugaagaccgccacccagggcgaggugaacgugaccggcgugaucccccugaccaccacccccaccaagagccacuucgccaaccugaagggcaccgagaccagaggcaagcugugccccaagugccccaacugcaccgaccuggacguggcccugggcagacccaagugcaccggcaagauccccagcgccagagugagcauccugcacgaggugagacccgugaccagcggcugcuuccccaucaugcacgacagaaccaagaucagacagcugcccaaccugcugagaggcuacgagcacaucagacugagcacccacaacgugaucaacgccgagaacgcccccggcggccccuacaagaucggcaccagcggcagcugccccaacgugaccaacggcaacggcuucuucgccaccauggccugggccgugcccaagaacgacaagaacaagaccgccaccaacccccugaccaucgaggugcccuacaucugcaccgagggcgaggaccagaucaccguguggggcuuccacagcgacaacgagacccagauggccaagcuguacggcgaccccaagccccagaaguucaccagcagcgccaacggcgugaccacccacuacgugagccagaucggcggcuuccccaaccagaccgaggacggcggccugccccagagcggcagaaucgugguggacuacauggugcagaagagcggcaagaccggcaccaucaccuaccagagaggcauccugcugccccagaagguguggugcgccagcggcagaagcaaggugaucaagggcagccugccccugaucggcgaggccgacugccugcacgagaaguacggcggccugaacaagagcaagcccuacuacaccggcgagcacgccaaggccaucggcaacugccccaucugggugaagaccccccugaagcuggccaacggcaccaaguacagaccccccgccaagcugcugaaggagagaggcuucuucggcgccaucgccggcuuccuggagggcggcugggagggcaugaucgccggcuggcacggcuacaccagccacggcgcccacggcguggccguggccgccgaccugaagagcacccaggaggccaucaacaagaucaccaagaaccugaacagccugagcgagcuggaggugaagaaccugcagagacugagcggcgccauggacgagcugcacaacgagauccuggagcuggacgagaagguggacgaccugagagccgacaccaucagcagccagaucgagcuggccgugcugcugagcaacgagggcaucaucaacagcgaggacgagcaccugcuggcccuggagagaaagcugaagaagaugcugggccccagcgccguggagaucggcaacggcugcuucgagaccaagcacaagugcaaccagaccugccuggacagaaucgccgccggcaccuucgacgccggcgaguucagccugcccaccuucgacagccugaacaucaccgccgccagccugaacgacgacggccuggacaaccacaccauccugcuguacuacagcaccgccgccagcagccuggccgugacccugaugaucgccaucuucgugguguacauggugagcagagacaacgugagcugcagcaucugccuguga

SEQ ID NO: 187509 - RNA, 1758 nt, Artificial Sequence; identical to SEQ ID NO: 186668
  derived and/or modified CDS sequence (opt4) from hemagglutinin__InfluenzaB__AGX20943

SEQ ID NO: 187510 - RNA, 1758 nt, Artificial Sequence; identical to SEQ ID NO: 186668
  derived and/or modified CDS sequence (opt4) from hemagglutinin__InfluenzaB__AGX20954

SEQ ID NO: 187511 - RNA, 1758 nt, Artificial Sequence; identical to SEQ ID NO: 186668
  derived and/or modified CDS sequence (opt4) from hemagglutinin__InfluenzaB__AGX20965

SEQ ID NO: 187512 - RNA, 1758 nt, Artificial Sequence
  derived and/or modified CDS sequence (opt4) from hemagglutinin__InfluenzaB__AGX20976
augaaggccaucaucgugcugcugaugguggugaccagcaacgccgacagaaucugcaccggcaucaccagcagcaacagcccccacguggugaagaccgccacccagggcgaggugaacgugaccggcgugaucccccugaccaccacccccaccaagagccacuucgccaaccugaagggcaccgagaccagaggcaagcugugccccaagugccugaacugcaccgaccuggacguggcccugggcagacccaagugcaccggcaagauccccagcgccagagugagcauccugcacgaggugagacccgugaccagcggcugcuuccccaucaugcacgacagaaccaagaucagacagcugcccaaccugcugagaggcuacgagcacaucagacugagcacccacaacgugaucaacgccgagaacgcccccggcggccccuacaagaucggcaccagcggcagcugccccaacgugaccaacggcaacggcuucuucgccaccauggccugggccgugcccaagaacgacaagaacaagaccgccaccaacccccugaccaucgaggugcccuacaucugcaccgagggcgaggaccagaucaccguguggggcuuccacagcgacaacgagacccagauggccaagcuguacggcgacagcaagccccagaaguucaccagcagcgccaacggcgugaccacccacuacgugagccagaucggcggcuuccccaaccagaccgaggacggcggccugccccagagcggcagaaucgugguggacuacauggugcagaagagcggcaagaccggcaccaucaccuaccagagaggcauccugcugccccagaagguguggugcgccagcggcagaagcaaggugaucaagggcagccugccccugaucggcgaggccgacugccugcacgagaaguacggcggccugaacaagagcaagcccuacuacaccggcgagcacgccaaggccaucggcaacugccccaucugggugaagaccccccugaagcuggccaacggcaccaaguacagaccccccgccaagcugcugaaggagagaggcuucuucggcgccaucgccggcuuccuggagggcggcugggagggcaugaucgccggcuggcacggcuacaccagccacggcgcccacggcguggccguggccgccgaccugaagagcacccaggaggccaucaacaagaucaccaagaaccugaacagccugagcgagcuggaggugaagaaccugcagagacugagcggcgccauggacgagcugcacggcgagauccuggagcuggacgagaagguggacgaccugagagccgacaccaucagcagccagaucgagcuggccgugcugcugagcaacgagggcaucaucaacagcgaggacgagcaccugcuggcccuggagagaaagcugaagaagaugcugggccccagcgccguggagaucggcaacggcugcuucgagaccaagcacaagugcaaccagaccugccuggacagaaucgccgccggcaccuucgacgccggcgaguucagccugcccaccuucgacagccugaacaucaccgccgccagccugaacgacgacggccuggacaaccacaccauccugcuguacuacagcaccgccgccagcagccuggccgugacccugaugaucgccaucuucgugguguacauggugagcagagacaacgugagcugcagcaucugccuguga

SEQ ID NO: 187513 - RNA, 1758 nt, Artificial Sequence; identical to SEQ ID NO: 186668
  derived and/or modified CDS sequence (opt4) from hemagglutinin__InfluenzaB__AGX20987

SEQ ID NO: 187514 - RNA, 1758 nt, Artificial Sequence; identical to SEQ ID NO: 186743
  derived and/or modified CDS sequence (opt4) from hemagglutinin__InfluenzaB__AGX20998

SEQ ID NO: 187515 - RNA, 1758 nt, Artificial Sequence
  derived and/or modified CDS sequence (opt4) from hemagglutinin__InfluenzaB__AGX21009
augaaggccaucaucgugcugcugaugguggugaccagcaacgccgacagaaucugcaccggcaucaccagcagcaacagcccccacguggugaagaccgccacccagggcgaggugaacgugaccggcgugaucccccugaccaccacccccaccaagagccacuucgccaaccugaagggcaccgagaccagaggcaagcugugccccaagugccccaacugcaccgaccuggacguggcccugggcagacccaagugcaccggcaagauccccagcgccagagugagcauccugcacgaggugagacccgugaccagcggcugcuuccccaucaugcacgacagaaccaagaucagacagcugcccaaccugcugagaggcuacgagcacaucagacugagcacccacaacgugaucaacgccgagaacgcccccggcggccccuacaagaucggcaccagcggcagcugccccaacgugaccaacggcaacggcuucuucgccaccauggccugggccgugcccaagaacgacaagaacaagaccgccaccaacccccugaccaucgaggugcccuacaucugcaccgagggcgaggaccagaucaccguguggggcuuccacagcgacaacgagacccagauggccaagcuguacggcgacagcaagccccagaaguucaccagcagcgccaacggcgugaccacccacuacgugagccagaucggcggcuuccccaaccagaccgaggacggcggccugccccagagcggcagaaucgugguggacuacauggugcagaagagcggcaagaccggcaccaucaccuaccagagaggcauccugcugccccagaagguguggugcgccagcggcagaagcaaggugaucaagggcagccugccccugaucggcgaggccgacugccugcacgagaaguacggcggccugaacaagagcaagcccuacuacaccggcgagcacgccaaggccaucggcaacugccccaucugggugaagaccccccugaagcuggccaacggcaccaaguacagaccccccgccaagcugcugaaggagagaggcuucuucggcgccaucgccggcuuccuggagggcggcugggagggcaugaucgccggcuggcacggcuacaccagccacggcgcccacggcguggccguggccgccgaccugaagagcacccaggaggccaucaacaagaucaccaagaaccugaacagccugagcgagcuggaggugaagaaccugcagagacugagcggcgccauggacgagcugcacaacgagauccuggagcuggacgagaagguggacgaccugagagccgacaccaucagcagccagaucgagcuggccgugcugcugagcaacgagggcaucaucaacagcgaggacgagcaccugcuggcccuggagagaaagcugaagaagaugcugggccccagcgccguggagaucggcaacggcugcuucgagaccaagcacaagugcaaccagaccugccuggacagaaucgccgccggcaccuucgacgccggcgaguucagccugcccaccuucgacagccugaacaucaccgccgccagccugaacgacgacggccuggacaaccacaccauccugcuguacuacagcaccgccgccagcagccuggccgugacccugaugaucgccaucuucgugguguacaugaucagcagagacaacgugagcugcagcaucugccuguga

SEQ ID NO: 187516 - RNA, 1758 nt, Artificial Sequence
  derived and/or modified CDS sequence (opt4) from hemagglutinin__InfluenzaB__AGX21020
augaaggccaucaucgugcugcugaugguggugaccagcaacgccgacagaaucugcaccggcaucaccagcagcaacagcccccacguggugaagaccgccacccagggcgaggugaacgugaccggcgugaucccccugaccaccacccccaccaagagccacuucgccaaccugaagggcaccgagaccagaggcaagcugugccccaagugccugaacugcaccgaccuggacguggcccugggcagacccaagugcaccggcaagauccccagcgccagagugagcauccugcacgaggugagacccgugaccagcggcugcuuccccaucaugcacgacagaaccaagaucagacagcugcccaaccugcugagaggcuacgagcacaucagacugagcacccacaacgugaucaacgccgagaacgcccccggcggccccuacaagaucggcaccagcggcagcugccccaacgugaccaacggcaacggcuucuucgccaccauggccugggccgugcccaagaacgacaagaacaagaccgccaccaacccccugaccaucgaggugcccuacaucugcaccgagggcgaggaccagaucaccguguggggcuuccacagcgacaacgagacccagauggccaagcuguacggcgacagcgagccccagaaguucaccagcagcgccaacggcgugaccacccacuacgugagccagaucggcggcuuccccaaccagaccgaggacggcggccugccccagagcggcagaaucgugguggacuacauggugcagaagagcggcaagaccggcaccaucaccuaccagagaggcauccugcugccccagaagguguggugcgccagcggcagaagcaaggugaucaagggcagccugccccugaucggcgaggccgacugccugcacgagaaguacggcggccugaacaagagcaagcccuacuacaccggcgagcacgccaaggccaucggcaacugccccaucugggugaagaccccccugaagcuggccaacggcaccaaguacagaccccccgccaagcugcugaaggagagaggcuucuucggcgccaucgccggcuuccuggagggcggcugggagggcaugaucgccggcuggcacggcuacaccagccacggcgcccacggcguggccguggccgccgaccugaagagcacccaggaggccaucaacaagaucaccaagaaccugaacagccugagcgagcuggaggugaagaaccugcagagacugagcggcgccauggacgagcugcacaacgagauccuggagcuggacgagaagguggacgaccugagagccgacaccaucagcagccagaucgagcuggccgugcugcugagcaacgagggcaucaucaacagcgaggacgagcaccugcuggcccuggagagaaagcugaagaagaugcugggccccagcgccguggagaucggcaacggcugcuucgagaccaagcacaagugcaaccagaccugccuggacagaaucgccgccggcaccuucgacgccggcgaguucagccugcccaccuucgacagccugaacaucaccgccgccagccugaacgacgacggccuggacaaccacaccauccugcuguacuacagcaccgccgccagcagccuggccgugacccugaugaucgccaucuucgugguguacauggugagcagagacaacgugagcugcagcaucugccuguga

SEQ ID NO: 187517 - RNA, 1758 nt, Artificial Sequence; identical to SEQ ID NO: 186743
  derived and/or modified CDS sequence (opt4) from hemagglutinin__InfluenzaB__AGX21031

SEQ ID NO: 187518 - RNA, 1758 nt, Artificial Sequence
  derived and/or modified CDS sequence (opt4) from hemagglutinin__InfluenzaB__AGX21042
augaaggccaucaucgugcugcugaugguggugaccagcaacgccgacagaaucugcaccggcaucaccagcagcaacagcccccacguggugaagaccgccacccagggcgaggugaacgugaccggcgugaucccccugaccaccacccccaccaagagccacuucgccaaccugaagggcaccgagaccagaggcaagcugugccccaagugccugaacugcaccgaccuggacguggcccugggcagacccaagugcaccggcaagauccccagcgccagagugagcauccugcacgaggugagacccgugaccagcggcugcuuccccaucaugcacgacagaaccaagaucagacagcugcccaaccugcugagaggcuacgagcacaucagacugagcacccacaacgugaucaacaccgagaacgcccccggcggccccuacaagaucggcaccagcggcagcugccccaacgugaccaacggcaacggcuucuucgccaccauggccugggccgugcccaagaacgacaagaacaagaccgccaccaacccccugaccaucgaggugcccuacaucugcaccgagggcgaggaccagaucaccguguggggcuuccacagcgacaacgagacccagauggccaagcuguacggcgacagcaagccccagaaguucaccagcagcgccaacggcgugaccacccacuacgugagccagaucggcggcuuccccaaccagaccgaggacggcggccugccccagagcggcagaaucgugguggacuacauggugcagaagagcggcaagaccggcaccaucaccuaccagagaggcauccugcugccccagaagguguggugcgccagcggcagaagcaaggugaucaagggcagccugccccugaucggcgaggccgacugccugcacgagaaguacggcggccugaacaagagcaagcccuacuacaccggcgagcacgccaaggccaucggcaacugccccaucugggugaagaccccccugaagcuggccaacggcaccaaguacagaccccccgccaagcugcugaaggagagaggcuucuucggcgccaucgccggcuuccuggagggcggcugggagggcaugaucgccggcuggcacggcuacaccagccacggcgcccacggcguggccguggccgccgaccugaagagcacccaggaggccaucaacaagaucaccaagaaccugaacagccugagcgagcuggaggugaagaaccugcagagacugagcggcgccauggacgagcugcacaacgagauccuggagcuggacgagaagguggacgaccugagagccgacaccaucagcagccagaucgagcuggccgugcugcugagcaacgagggcaucaucaacagcgaggacgagcaccugcuggcccuggagagaaagcugaagaagaugcugggccccagcgccguggagaucggcaacggcugcuucgagaccaagcacaagugcaaccagaccugccuggacagaaucgccgccggcaccuucgacgccggcgaguucagccugcccaccuucgacagccugaacaucaccgccgccagccugaacgacgacggccuggacaaccacaccauccugcuguacuacagcaccgccgccagcagccuggccgugacccugaugaucgccaucuucgugguguacauggugagcagagacaacgugagcugcagcaucugccuguga

SEQ ID NO: 187519 - RNA, 1758 nt, Artificial Sequence; identical to SEQ ID NO: 186705
  derived and/or modified CDS sequence (opt4) from hemagglutinin__InfluenzaB__AGX21053

SEQ ID NO: 187520 - RNA, 1758 nt, Artificial Sequence; identical to SEQ ID NO: 186668
  derived and/or modified CDS sequence (opt4) from hemagglutinin__InfluenzaB__AGX21064

SEQ ID NO: 187521 - RNA, 1758 nt, Artificial Sequence; identical to SEQ ID NO: 186705
  derived and/or modified CDS sequence (opt4) from hemagglutinin__InfluenzaB__AGX21075

SEQ ID NO: 187522 - RNA, 1758 nt, Artificial Sequence; identical to SEQ ID NO: 186705
  derived and/or modified CDS sequence (opt4) from hemagglutinin__InfluenzaB__AGX21084

SEQ ID NO: 187523 - RNA, 1758 nt, Artificial Sequence; identical to SEQ ID NO: 186705
  derived and/or modified CDS sequence (opt4) from hemagglutinin__InfluenzaB__AGX21095

SEQ ID NO: 187524 - RNA, 1758 nt, Artificial Sequence
  derived and/or modified CDS sequence (opt4) from hemagglutinin__InfluenzaB__AGX21106
augaaggccaucaucgugcugcugaugguggugaccagcaacgccgacagaaucugcaccggcaucaccagcagcaacagcccccacguggugaagaccgccacccagggcgaggugaacgugaccggcgugaucccccugaccaccacccccaccaagagccacuucgccaaccugaagggcaccgagaccagaggcaagcugugccccaagugccccaacugcaccgaccuggacguggcccugggcagacccaagugcaccggcaagauccccagcgccagagugagcauccugcacgaggugagacccgugaccagcggcugcuuccccaucaugcacgacagaaccaagaucagacagcugcccaaccugcugagaggcuacgagcacaucagacugagcacccacaacgugaucaacgccgagaacgcccccggcggccccuacaagaucggcaccagcggcagcugccccaacgugaccaacggcaacggcuucuucgccaccauggccugggccgugcccaagaacgacaagaacaagaccgccaccaacccccugaccaucgaggugcccuacaucugcaccgagggcgaggaccagaucaccguguggggcuuccacagcgacaacgaggcccagauggccaagcuguacggcgacagcaagccccagaaguucaccagcagcgccaacggcgugaccacccacuacgugagccagaucggcggcuuccccaaccagaccgaggacggcggccugccccagagcggcagaaucgugguggacuacauggugcagaagagcggcaagaccggcaccaucaccuaccagagaggcauccugcugccccagaagguguggugcgccagcggcagaagcaaggugaucaagggcagccugccccugaucggcgaggccgacugccugcacgagaaguacggcggccugaacaagagcaagcccuacuacaccggcgagcacgccaaggccaucggcaacugccccaucugggugaagaccccccugaagcuggccaacggcaccaaguacagaccccccgccaagcugcugaaggagagaggcuucuucggcgccaucgccggcuuccuggagggcggcugggagggcaugaucgccggcuggcacggcuacaccagccacggcgcccacggcguggccguggccgccgaccugaagagcacccaggaggccaucaacaagaucaccaagaaccugaacagccugagcgagcuggaggugaagaaccugcagagacugagcggcgccauggacgagcugcacaacgagauccuggagcuggacgagaagguggacgaccugagagccgacaccaucagcagccagaucgagcuggccgugcugcugagcaacgagggcaucaucaacagcgaggacgagcaccugcuggcccuggagagaaagcugaagaagaugcugggccccagcgccguggagaucggcaacggcugcuucgagaccaagcacaagugcaaccagaccugccuggacagaaucgccgccggcaccuucgacgccggcgaguucagccugcccaccuucgacagccugaacaucaccgccgccagccugaacgacgacggccuggacaaccacaccauccugcuguacuacagcaccgccgccagcagccuggccgugacccugaugaucgccaucuucgugguguacauggugagcagagacaacgugagcugcagcaucugccuguga

SEQ ID NO: 187525 - RNA, 1758 nt, Artificial Sequence; identical to SEQ ID NO: 186668
  derived and/or modified CDS sequence (opt4) from hemagglutinin__InfluenzaB__AGX21117

SEQ ID NO: 187526 - RNA, 1758 nt, Artificial Sequence; identical to SEQ ID NO: 187518
  derived and/or modified CDS sequence (opt4) from hemagglutinin__InfluenzaB__AGX21128

SEQ ID NO: 187527 - RNA, 1758 nt, Artificial Sequence
  derived and/or modified CDS sequence (opt4) from hemagglutinin__InfluenzaB__AGX21139
augaaggccaucaucgugcugcugaugguggugaccagcaacgccgacagaaucugcaccggcaucaccagcagcaacagcccccacguggugaagaccgccacccagggcgaggugaacgugaccggcgugaucccccugaccaccacccccaccaagagccacuucgccaaccugaagggcaccgagaccagaggcaagcugugccccaagugccccaacugcaccgaccuggacguggcccugggcagacccaagugcaccggcaagauccccagcgccagagugagcauccugcacgaggugagacccgugaccagcggcugcuuccccaucaugcacgacagaaccaagaucagacagcugcccaaccugcugagaggcuacgagcacaucagacugagcacccacaacgugaucaacgccgagaacgcccccggcggccccuacaagaucggcaccagcggcagcugccccaacgugaccaacggcaacggcuucuucgccaccauggccugggccgugcccaagaacgacaagaacaagaccgccaccaacccccugaccaucgaggugcccuacaucugcaccgagggcgaggaccagaucaccguguggggcuuccacagcgacaacgagacccagauggccaagcuguacggcgacagcaagccccagaaguucaccagcagcgccaacggcgugaccacccacuacgugagccagaucggcgacuuccccaaccagaccgaggacggcggccugccccagagcggcagaaucgugguggacuacauggugcagaagagcggcaagaccggcaccaucaccuaccagagaggcauccugcugccccagaagguguggugcgccagcggcagaagcaaggugaucaagggcagccugccccugaucggcgaggccgacugccugcacgagaaguacggcggccugaacaagagcaagcccuacuacaccggcgagcacgccaaggccaucggcaacugccccaucugggugaagaccccccugaagcuggccaacggcaccaaguacagaccccccgccaagcugcugaaggagagaggcuucuucggcgccaucgccggcuuccuggagggcggcugggagggcaugaucgccggcuggcacggcuacaccagccacggcgcccacggcguggccguggccgccgaccugaagagcacccaggaggccaucaacaagaucaccaagaaccugaacagccugagcgagcuggaggugaagaaccugcagagacugagcggcgccauggacgagcugcacaacgagauccuggagcuggacgagaagguggacgaccugagagccgacaccaucagcagccagaucgagcuggccgugcugcugagcaacgagggcaucaucaacagcgaggacgagcaccugcuggcccuggagagaaagcugaagaagaugcugggccccagcgccguggagaucggcaacggcugcuucgagaccaagcacaagugcaaccagaccugccuggacagaaucgccgccggcaccuucgacgccggcgaguucagccugcccaccuucgacagccugaacaucaccgccgccagccugaacgacgacggccuggacaaccacaccauccugcuguacuacagcaccgccgccagcagccuggccgugacccugaugaucgccaucuucgugguguacauggugagcagagacaacgugagcugcagcaucugccuguga

SEQ ID NO: 187528 - RNA, 1758 nt, Artificial Sequence; identical to SEQ ID NO: 186743
  derived and/or modified CDS sequence (opt4) from hemagglutinin__InfluenzaB__AGX21150

SEQ ID NO: 187529 - RNA, 1758 nt, Artificial Sequence; identical to SEQ ID NO: 186668
  derived and/or modified CDS sequence (opt4) from hemagglutinin__InfluenzaB__AGX21161

SEQ ID NO: 187530 - RNA, 1758 nt, Artificial Sequence; identical to SEQ ID NO: 186743
  derived and/or modified CDS sequence (opt4) from hemagglutinin__InfluenzaB__AGX21172

SEQ ID NO: 187531 - RNA, 1758 nt, Artificial Sequence; identical to SEQ ID NO: 186705
  derived and/or modified CDS sequence (opt4) from hemagglutinin__InfluenzaB__AGX21183

SEQ ID NO: 187532 - RNA, 1758 nt, Artificial Sequence; identical to SEQ ID NO: 186743
  derived and/or modified CDS sequence (opt4) from hemagglutinin__InfluenzaB__AGX21194

SEQ ID NO: 187533 - RNA, 1758 nt, Artificial Sequence
  derived and/or modified CDS sequence (opt4) from hemagglutinin__InfluenzaB__AGX21205
augaaggccaucaucgugcugcugaugguggugaccagcaacgccgacagaaucugcaccggcaucaccagcagcaacagcccccacaucgugaagaccgccacccagggcgaggugaacgugaccggcgugaucccccugaccaccacccccaccaagagccacuucgccaaccugaagggcaccgagaccagaggcaagcugugccccaagugccugaacugcaccgaccuggacguggcccugggcagacccaagugcaccggcaagauccccagcgccagagugagcauccugcacgaggugagacccgugaccagcggcugcuuccccaucaugcacgacagaaccaagaucagacagcugcccaaccugcugagaggcuacgagcacaucagacugagcacccacaacgugaucaacgccaagaacgcccccggcggccccuacaagaucggcaccagcggcagcugccccaacaucaccaacggcaacggcuucuucgccaccauggccugggccgugcccaagaacgacaagaacaagaccgccaccaacccccugaccaucgaggugcccuacaucugcaccgagggcgaggaccagaucaccguguggggcuuccacagcgacaacgagacccagauggccaagcuguacggcgacagcaagccccagaaguucaccagcagcgccaacggcgugaccacccacuacgugagccagaucggcggcuuccccaaccagaccgaggacggcggccugccccagagcggcagaaucgugguggacuacauggugcagaagagcggcaagaccggcaccaucaccuaccagagaggcauccugcugccccagaagguguggugcgccagcggcagaagcaaggugaucaagggcagccugccccugaucggcgaggccgacugccugcacgagaaguacggcggccugaacaagagcaagcccuacuacaccggcgagcacgccaaggccaucggcaacugccccaucugggugaagaccccccugaagcuggccaacggcaccaaguacagaccccccgccaagcugcugaaggagagaggcuucuucggcgccaucgccggcuuccuggagggcggcugggagggcaugaucgccggcuggcacggcuacaccagccacggcgcccacggcguggccguggccgccgaccugaagagcacccaggaggccaucaacaagaucaccaagaaccugaacagccugagcgagcuggaggugaagaaccugcagagacugagcggcgccauggacgagcugcacaacgagauccuggagcuggacgagaagguggacgaccugagagccgacaccaucagcagccagaucgagcuggccgugcugcugagcaacgagggcaucaucaacagcgaggacgagcaccugcuggcccuggagagaaagcugaagaagaugcugggccccagcgccguggagaucggcaacggcugcuucgagaccaagcacaagugcaaccagaccugccuggacagaaucgccgccggcaccuucgacgccggcgaguucagccugcccaccuucgacagccugaacaucaccgccgccagccugaacgacgacggccuggacaaccacaccauccugcuguacuacagcaccgccgccagcagccuggccgugacccugaugaucgccaucuucgugguguacauggugagcagagacaacgugagcugcagcaucugccuguga

SEQ ID NO: 187534 - RNA, 1758 nt, Artificial Sequence; identical to SEQ ID NO: 186705
  derived and/or modified CDS sequence (opt4) from hemagglutinin__InfluenzaB__AGX21216

SEQ ID NO: 187535 - RNA, 1758 nt, Artificial Sequence; identical to SEQ ID NO: 186668
  derived and/or modified CDS sequence (opt4) from hemagglutinin__InfluenzaB__AGX21227

SEQ ID NO: 187536 - RNA, 1758 nt, Artificial Sequence
  derived and/or modified CDS sequence (opt4) from hemagglutinin__InfluenzaB__AGX21238
augaaggccaucaucgugcugcugaugguggugaccagcaacgccgacagaaucugcaccggcaucaccagcagcaacagcccccacguggugaagaccgccacccagggcgaggugaacgugaccggcgugaucccccugaccaccacccccaccaagagccacuucgccaaccugaagggcaccgagaccagaggcaagcugugccccaagugccugaacugcaccgaccuggacguggcccugggcagacccaagugcaccggcaagauccccagcgccagagugagcauccugcacgaggugagacccgugaccagcggcugcuuccccaucaugcacgacagaaccaagaucagacagcugcccaaccugcugagaggcuacgagcacaucagacugagcacccacaacgugaucaacgccgagaacgcccccggcggccccuacaagaucggcaccagcggcagcugccccaacgugaccaacggcaacggcuucuucgccaccauggccugggccgugcccaagaacgacaagaacaagaccgccaccaacccccugaccaucgaggugcccuacaucugcaccgagggcgaggaccagaucaccguguggggcuuccacagcgacaacgagacccagauggccaagcuguacggcgacagcaagccccagaaguucaccagcagcgccaacggcgugaccacccacuacgugagccagaucggcggcuuccccaaccagaccgaggacggcggccugccccagagcggcagaaucgugguggacuacauggugcagaagagcggcaagaccggcaccaucaccuaccagagaggcauccugcugccccagaagguguggugcgccaacggcagaagcaaggugaucaagggcagccugccccugaucggcgaggccgacugccugcacgagaaguacggcggccugaacaagagcaagcccuacuacaccggcgagcacgccaaggccaucggcaacugccccaucugggugaagaccccccugaagcuggccaacggcaccaaguacagaccccccgccaagcugcugaaggagagaggcuucuucggcgccaucgccggcuuccuggagggcggcugggagggcaugaucgccggcuggcacggcuacaccagccacggcgcccacggcguggccguggccgccgaccugaagagcacccaggaggccaucaacaagaucaccaagaaccugaacagccugagcgagcuggaggugaagaaccugcagagacugagcggcgccauggacgagcugcacaacgagauccuggagcuggacgagaagguggacgaccugagagccgacaccaucagcagccagaucgagcuggccgugcugcugagcaacgagggcaucaucaacagcgaggacgagcaccugcuggcccuggagagaaagcugaagaagaugcugggccccagcgccguggagaucggcaacggcugcuucgagaccaagcacaagugcaaccagaccugccuggacagaaucgccgccggcaccuucgacgccggcgaguucagccugcccaccuucgacagccugaacaucaccgccgccagccugaacgacgacggccuggacaaccacaccauccugcuguacuacagcaccgccgccagcagccuggccgugacccugaugaucgccaucuucgugguguacaugaucagcagagacaacgugagcugcagcaucugccuguga

SEQ ID NO: 187537 - RNA, 1758 nt, Artificial Sequence; identical to SEQ ID NO: 186743
  derived and/or modified CDS sequence (opt4) from hemagglutinin__InfluenzaB__AGX21249

SEQ ID NO: 187538 - RNA, 1758 nt, Artificial Sequence
  derived and/or modified CDS sequence (opt4) from hemagglutinin__InfluenzaB__AGX21260
augaaggccaucaucgugcugcugaugguggugaccagcaacgccgacagaaucugcaccggcaucaccagcagcaacagcccccacguggugaagaccgccacccagggcgaggugaacgugaccggcgugaucccccugaccaccacccccaccaagagccacuucgccaaccugaagggcaccgagaccagaggcaagcugugccccaagugccugaacugcaccgaccuggacguggcccugggcagacccaagugcaccggcaagauccccagcgccagagugagcauccugcacgaggugagacccgugaccagcggcugcuuccccaucaugcacgacagaaccaagaucagacagcugcccaaccugcugagaggcuacgagcacaucagacugagcacccacaacgugaucaacgccgagaacgcccccggcggccccuacaagaucggcaccagcggcagcugccccaacgugaccaacggcaacggcuucuucgccaccauggccugggccgugcccaagaacgacaagaacaagaccgccaccaacccccugaccaucgaggugcccuacaucugcaccgagggcgaggaccagaucaccguguggggcuuccacagcgacaacgagacccagauggccaagcuguacggcgacagcaagccccagaaguucaccagcagcgccaacggcgugaccacccacuacgugagccagaucggcggcuuccccaaccagaccgaggacggcggccugccccagagcggcagaaucgugguggacuacauggugcagaagagcggcaagaccggcaccaucaccuaccagagaggcauccugcugccccagagaguguggugcgccagcggcagaagcaaggugaucaagggcagccugccccugaucggcgaggccgacugccugcacgagaaguacggcggccugaacaagagcaagcccuacuacaccggcgagcacgccaaggccaucggcaacugccccaucugggugaagaccccccugaagcuggccaacggcaccaaguacagaccccccgccaagcugcugaaggagagaggcuucuucggcgccaucgccggcuuccuggagggcggcugggagggcaugaucgccggcuggcacggcuacaccagccacggcgcccacggcguggccguggccgccgaccugaagagcacccaggaggccaucaacaagaucaccaagaaccugaacagccugagcgagcuggaggugaagaaccugcagagacugagcggcgccauggacgagcugcacaacgagauccuggagcuggacgagaagguggacgaccugagagccgacaccaucagcagccagaucgagcuggccgugcugcugagcaacgagggcaucaucaacagcgaggacgagcaccugcuggcccuggagagaaagcugaagaagaugcugggccccagcgccguggagaucggcaacggcugcuucgagaccaagcacaagugcaaccagaccugccuggacagaaucgccgccggcaccuucgacgccggcgaguucagccugcccaccuucgacagccugaacaucaccgccgccagccugaacgacgacggccuggacaaccacaccauccugcuguacuacagcaccgccgccagcagccuggccgugacccugaugaucgccaucuucgugguguacauggugagcagagacaacgugagcugcagcaucugccuguga

SEQ ID NO: 187539 - RNA, 1758 nt, Artificial Sequence; identical to SEQ ID NO: 186668
  derived and/or modified CDS sequence (opt4) from hemagglutinin__InfluenzaB__AGX21271

SEQ ID NO: 187540 - RNA, 1758 nt, Artificial Sequence
  derived and/or modified CDS sequence (opt4) from hemagglutinin__InfluenzaB__AGX21282
augaaggccaucaucgugcugcugaugguggugaccagcaacgccgacagaaucugcaccggcaucaccagcagcaacagcccccacaucgugaagaccgccacccagggcgaggugaacgugaccggcgugaucccccugaccaccagccccaccaagagccacuucgccaaccugaagggcaccgagaccagaggcaagcugugccccaagugccugaacugcaccgaccuggacguggcccugggcagacccaagugcaccggcaagauccccagcgccagagugagcauccugcacgaggugagacccgugaccagcggcugcuuccccaucaugcacgacagaaccaagaucagacagcugcccaaccugcugagaggcuacgagcacaucagacugagcacccacaacgugaucaacgccaagaacgcccccggcggccccuacaagaucggcaccagcggcagcugccccaacaucaccaacggcaacggcuucuucgccaccauggccugggccgugcccaagaacgacaagaacaagaccgccaccaacccccugaccaucgaggugcccuacaucugcaccgagggcgaggaccagaucaccguguggggcuuccacagcgacaacgagacccagauggccaagcuguacggcgacagcaagccccagaaguucaccagcagcgccaacggcgugaccacccacuacgugagccagaucggcggcuuccccaaccagaccgaggacggcggccugccccagagcggcagaaucgugguggacuacauggugcagaagagcggcaagaccggcaccaucaccuaccagagaggcauccugcugccccagaagguguggugcgccagcggcagaagcaaggugaucaagggcagccugccccugaucggcgaggccgacugccugcacgagaaguacggcggccugaacaagagcaagcccuacuacaccggcgagcacgccaaggccaucggcaacugccccaucugggugaagaccccccugaagcuggccaacggcaccaaguacagaccccccgccaagcugcugaaggagagaggcuucuucggcgccaucgccggcuuccuggagggcggcugggagggcaugaucgccggcuggcacggcuacaccagccacggcgcccacggcguggccguggccgccgaccugaagagcacccaggaggccaucaacaagaucaccaagaaccugaacagccugagcgagcuggaggugaagaaccugcagagacugagcggcgccauggacgagcugcacaacgagauccuggagcuggacgagaagguggacgaccugagagccgacaccaucagcagccagaucgagcuggccgugcugcugagcaacgagggcaucaucaacagcgaggacgagcaccugcuggcccuggagagaaagcugaagaagaugcugggccccagcgccguggagaucggcaacggcugcuucgagaccaagcacaagugcaaccagaccugccuggacagaaucgccgccggcaccuucgacgccggcgaguucagccugcccaccuucgacagccugaacaucaccgccgccagccugaacgacgacggccuggacaaccacaccauccugcuguacuacagcaccgccgccagcagccuggccgugacccugaugaucgccaucuucgugguguacauggugagcagagacaacgugagcugcagcaucugccuguga

SEQ ID NO: 187541 - RNA, 1758 nt, Artificial Sequence; identical to SEQ ID NO: 186705
  derived and/or modified CDS sequence (opt4) from hemagglutinin__InfluenzaB__AGX21293

SEQ ID NO: 187542 - RNA, 1758 nt, Artificial Sequence; identical to SEQ ID NO: 186743
  derived and/or modified CDS sequence (opt4) from hemagglutinin__InfluenzaB__AGX21304

SEQ ID NO: 187543 - RNA, 1758 nt, Artificial Sequence; identical to SEQ ID NO: 186705
  derived and/or modified CDS sequence (opt4) from hemagglutinin__InfluenzaB__AGX21315

SEQ ID NO: 187544 - RNA, 1758 nt, Artificial Sequence; identical to SEQ ID NO: 186668
  derived and/or modified CDS sequence (opt4) from hemagglutinin__InfluenzaB__AGX21326

SEQ ID NO: 187545 - RNA, 1758 nt, Artificial Sequence
  derived and/or modified CDS sequence (opt4) from hemagglutinin__InfluenzaB__AGX21337
augaaggccaucaucgugcugcugaugguggugaccagcaacgccgacagaaucugcaccggcaucaccagcagcaacagcccccacguggugaagaccgccacccagggcgaggugaacgugaccggcgugaucccccugaccaccacccccaccaagagccacuucgccaaccugaagggcaccgagaccagaggcaagcugugccccaagugccccaacugcaccgaccuggacguggcccugggcagacccaagugcaccggcaagauccccagcgccagagugagcauccugcacgaggugagacccgugaccagcggcugcuuccccaucaugcacgacagaaccaagaucagacagcugcccaaccugcugagaggcuacgagcacaucagacugagcacccacaacgugaucaacgccgagaacgcccccggcggccccuacaagaucggcaccagcggcagcugccccaacgugaccaacggcaacggcuucuucgccaccauggccugggccgugcccaagaacgacaagaacaagaccgccaccaacccccugaccaucgaggugcccuacaucugcaccgagggcgaggaccagaucaccguguggggcuuccacagcgacaaggagacccagauggccaagcuguacggcgacagcaagccccagaaguucaccagcagcgccaacggcgugaccacccacuacgugagccagaucggcggcuuccccaaccagaccgaggacggcggccugccccagagcggcagaaucgugguggacuacauggugcagaagagcggcaagaccggcaccaucaccuaccagagaggcauccugcugccccagaagguguggugcgccagcggcagaagcaaggugaucaagggcagccugccccugaucggcgaggccgacugccugcacgagaaguacggcggccugaacaagagcaagcccuacuacaccggcgagcacgccaaggccaucggcaacugccccaucugggugaagaccccccugaagcuggccaacggcaccaaguacagaccccccgccaagcugcugaaggagagaggcuucuucggcgccaucgccggcuuccuggagggcggcugggagggcaugaucgccggcuggcacggcuacaccagccacggcgcccacggcguggccguggccgccgaccugaagagcacccaggaggccaucaacaagaucaccaagaaccugaacagccugagcgagcuggaggugaagaaccugcagagacugagcggcgccauggacgagcugcacaacgagauccuggagcuggacgagaagguggacgaccugagagccgacaccaucagcagccagaucgagcuggccgugcugcugagcaacgagggcaucaucaacagcgaggacgagcaccugcuggcccuggagagaaagcugaagaagaugcugggccccagcgccguggagaucggcaacggcugcuucgagaccaagcacaagugcaaccagaccugccuggacagaaucgccgccggcaccuucgacgccggcgaguucagccugcccaccuucgacagccugaacaucaccgccgccagccugaacgacgacggccuggacaaccacaccauccugcuguacuacagcaccgccgccagcagccuggccgugacccugaugaucgccaucuucgugguguacauggugagcagagacaacgugagcugcagcaucugccuguga

SEQ ID NO: 187546 - RNA, 1758 nt, Artificial Sequence; identical to SEQ ID NO: 186705
  derived and/or modified CDS sequence (opt4) from hemagglutinin__InfluenzaB__AGX21348

SEQ ID NO: 187547 - RNA, 1758 nt, Artificial Sequence; identical to SEQ ID NO: 186705
  derived and/or modified CDS sequence (opt4) from hemagglutinin__InfluenzaB__AGX21359

SEQ ID NO: 187548 - RNA, 1758 nt, Artificial Sequence
  derived and/or modified CDS sequence (opt4) from hemagglutinin__InfluenzaB__AGX21370
augaaggccaucaucgugcugcugaugguggugaccagcaacgccgacagaaucugcaccggcaucaccagcagcaacagcccccacguggugaagaccgccacccagggcgaggugaacgugaccggcgugaucccccugaccaccacccccaccaagagccacuucgccaaccugaagggcaccgagaccagaggcaagcugugccccaagugccccaacugcaccgaccuggacguggcccugggcagacccaagugcaugggcaagauccccagcgccagagugagcauccugcacgaggugagacccgugaccagcggcugcuuccccaucaugcacgacagaaccaagaucagacagcugcccaaccugcugagaggcuacgagcacaucagacugagcacccacaacgugaucaacgccgagaacgcccccggcggccccuacaagaucggcaccagcggcagcugccccaacgugaccaacggcaacggcuucuucgccaccauggccugggccgugcccaagaacgacaagaacaagaccgccaccaacccccugaccaucgaggugcccuacaucugcaccgagggcgaggaccagaucaccguguggggcuuccacagcgacaacgagacccagauggccaagcuguacggcgacagcaagccccagaaguucaccagcagcgccaacggcgugaccacccacuacgugagccagaucggcggcuuccccaaccagaccgaggacggcggccugccccagagcggcagaaucgugguggacuacauggugcagaagagcggcaagaccggcaccaucaccuaccagagaggcauccugcugccccagaagguguggugcgccagcggcagaagcaaggugaucaagggcagccugccccugaucggcgaggccgacugccugcacgagaaguacggcggccugaacaagagcaagcccuacuacaccggcgagcacgccaaggccaucggcaacugccccaucugggugaagaccccccugaagcuggccaacggcaccaaguacagaccccccgccaagcugcugaaggagagaggcuucuucggcgccaucgccggcuuccuggagggcggcugggagggcaugaucgccggcuggcacggcuacaccagccacggcgcccacggcguggccguggccgccgaccugaagagcacccaggaggccaucaacaagaucaccaagaaccugaacagccugagcgagcuggaggugaagaaccugcagagacugagcggcgccauggacgagcugcacaacgagauccuggagcuggacgagaagguggacgaccugagagccgacaccaucagcagccagaucgagcuggccgugcugcugagcaacgagggcaucaucaacagcgaggacgagcaccugcuggcccuggagagaaagcugaagaagaugcugggccccagcgccguggagaucggcaacggcugcuucgagaccaagcacaagugcaaccagaccugccuggacagaaucgccgccggcaccuucgacgccggcgaguucagccugcccaccuucgacagccugaacaucaccgccgccagccugaacgacgacggccuggacaaccacaccauccugcuguacuacagcaccgccgccagcagccuggccgugacccugaugaucgccaucuucgugguguacauggugagcagagacaacgugagcugcagcaucugccuguga

SEQ ID NO: 187549 - RNA, 1758 nt, Artificial Sequence
  derived and/or modified CDS sequence (opt4) from hemagglutinin__InfluenzaB__AGX21381
augaaggccaucaucgugcugcugaugguggugaccagcaacgccgacagaaucugcaccggcaucaccagcagcaacagcccccacaucgugaagaccgccacccagggcgaggugaacgugaccggcgugaucccccugaccaccacccccaccaagagccacuucgccaaccugaagggcaccgagaccagaggcaagcugugccccaagugccugaacugcaccgaccuggacguggcccugggcagacccaagugcaccggcaagauccccagcgccagagugagcauccugcacgaggugagacccgugaccagcggcugcuuccccaucaugcacgacagaaccaagaucagacagcugcccaaccugcugagaggcuacgagcacaucagacugagcacccacaacgugaucaacgccgagaacgcccccggcggccccuacaagaucggcaccagcggcagcugccccaacaucaccaacggcaacggcuucuucgccaccauggccugggccgugcccaagaacgacaagaacaagaccgccaccaacccccugaccaucgaggugcccuacaucugcaccgagggcgaggaccagaucaccguguggggcuuccacagcgacaacgagacccagauggccaagcuguacggcgacagcaagccccagaaguucaccagcagcgccaacggcgugaccacccacuacaucagccagaucggcggcuuccccaaccagaccgaggacggcggccugccccagagcggcagaaucgugguggacuacauggugcagaagagcggcaagaccggcaccaucaccuaccagagaggcauccugcugccccagaagguguggugcgccagcggcagaagcaaggugaucaagggcagccugccccugaucggcgaggccgacugccugcacgagaaguacggcggccugaacaagagcaagcccuacuacaccggcgagcacgccaaggccaucggcaacugccccaucugggugaagaccccccugaagcuggccaacggcaccaaguacagaccccccgccaagcugcugaaggagagaggcuucuucggcgccaucgccggcuuccuggagggcggcugggagggcaugaucgccggcuggcacggcuacaccagccacggcgcccacggcguggccguggccgccgaccugaagagcacccaggaggccaucaacaagaucaccaagaaccugaacagccugagcgagcuggaggugaagaaccugcagagacugagcggcgccauggacgagcugcacaacgagauccuggagcuggacgagaagguggacgaccugagagccgacaccaucagcagccagaucgagcuggccgugcugcugagcaacgagggcaucaucaacagcgaggacgagcaccugcuggcccuggagagaaagcugaagaagaugcugggccccagcgccguggagaucggcaacggcugcuucgagaccaagcacaagugcaaccagaccugccuggacagaaucgccgccggcaccuucgacgccggcgaguucagccugcccaccuucgacagccugaacaucaccgccgccagccugaacgacgacggccuggacaaccacaccauccugcuguacuacagcaccgccgccagcagccuggccgugacccugaugaucgccaucuucgugguguacauggugagcagagacaacgugagcugcagcaucugccuguga

SEQ ID NO: 187550 - RNA, 1758 nt, Artificial Sequence
  derived and/or modified CDS sequence (opt4) from hemagglutinin__InfluenzaB__AGX21392
augaaggccaucaucgugcugcugaugguggugaccagcaacgccgacagaaucugcaccggcaucaccagcagcaacagcccccacaucgugaagaccgccacccagggcgaggugaacgugaccggcgugaucccccugaccaccacccccaccaagagccacuucgccaaccugaagggcaccgagaccagaggcaagcugugccccaagugccugaacugcaccgaccuggacguggcccugggcagacccaagugcaccggcaagauccccagcgccagagugagcauccugcacgaggugagacccgugaccagcggcugcuuccccaucaugcacgacagaaccaagaucagacagcugcccaaccugcugagaggcuacgagcacaucagacugagcacccacaacgugaucaacgccgagaacgcccccggcggccccuacaagaucggcaccagcggcagcugccccaacaucaccaacggcaacggcuucuucgccaccauggccugggccgugcccaagaacgacaagaacaagaccgccaccaacccccugaccaucgaggugcccuacaucugcaccgagggcgaggaccagaucaccguguggggcuuccacagcgacaacgaggcccagauggccaagcuguacggcgacagcaagccccagaaguucaccagcagcgccaacggcgugaccacccacuacgugagccagaucggcggcuuccccaaccagaccgaggacggcggccugccccagagcggcagaaucgugguggacuacauggugcagaagagcggcaagaccggcaccaucaccuaccagagaggcauccugcugccccagaagguguggugcgccagcggcagaagcaaggugaucaagggcagccugccccugaucggcgaggccgacugccugcacgagaaguacggcggccugaacaagagcaagcccuacuacaccggcgagcacgccaaggccaucggcaacugccccaucugggugaagaccccccugaagcuggccaacggcaccaaguacagaccccccgccaagcugcugaaggagagaggcuucuucggcgccaucgccggcuuccuggagggcggcugggagggcaugaucgccggcuggcacggcuacaccagccacggcgcccacggcguggccguggccgccgaccugaagagcacccaggaggccaucaacaagaucaccaagaaccugaacagccugagcgagcuggaggugaagaaccugcagagacugagcggcgccauggacgagcugcacaacgagauccuggagcuggacgagaagguggacgaccugagagccgacaccaucagcagccagaucgagcuggccgugcugcugagcaacgagggcaucaucaacagcgaggacgagcaccugcuggcccuggagagaaagcugaagaagaugcugggccccagcgccguggagaucggcaacggcugcuucgagaccaagcacaagugcaaccagaccugccuggacagaaucgccgccggcaccuucgacgccggcgaguucagccugcccaccuucgacagccugaacaucaccgccgccagccugaacgacgacggccuggacaaccacaccauccugcuguacuacagcaccgccgccagcagccuggccgugacccugaugaucgccaucuucgugguguacauggugagcagagacaacgugagcugcagcaucugccuguga

SEQ ID NO: 187551 - RNA, 1758 nt, Artificial Sequence
  derived and/or modified CDS sequence (opt4) from hemagglutinin__InfluenzaB__AGX21403
augaaggccaucaucgugcugcugaugguggugaccagcaacgccgacagaaucugcaccggcaucaccagcagcaacagcccccacguggugaagaccgccacccagggcgaggugaacgugaccggcgugaucccccugaccaccacccccaccaagagccacuucgccaaccugaagggcaccgagaccagaggcaagcugugccccaagugccccaacugcaccgaccuggacguggcccugggcagacccaagugcaccggcaagauccccagcgccagagugagcauccugcacgaggugagacccgugaccagcggcugcuuccccaucaugcacgacagaaccaagaucagacagcugcccaaccugcugagaggcuacgagcacaucagacugagcacccacaacgugaucaacgccgagaacgcccccggcggccccuacaagaucggcaccagcggcagcugccccaacgugaccaacggcaacggcuucuucgccaccauggccugggccgugcccaagaacgacaagaacaagaccgccaccaacccccugaccaucgaggugcccuacaucugcaccgagggcgaggaccagaucaccguguggggcuuccacagcgacaacgagacccagauggccaagcuguacggcgacagcaagccccagaaguucaccagcagcgccaacggcgugaccacccacuacgugagccagaucggcggcuuccccaaccagaccgaggacggcggccugccccagagcggcagaaucgugguggacuacauggugcagaagagcggcaagaccggcaccaucaccuaccagagaggcauccugcugccccagaagguguggugcgccagcggcagaagcaaggugaucaagggcagccugccccugaucggcgaggccgacugccugcacgagaaguacggcggccugaacaagagcaagcccuacuacaccggcgagcacgccaaggccaucggcaacugccccaucugggugaagaccccccugaagcuggccaacggcaccaaguacagaccccccgccaagcugcugaaggagagaggcuucuucggcgccaucgccggcuuccuggagggcggcugggagggcaugaucgccggcuggcacggcuacaccagccacggcgcccacggcguggccguggccgccgaccugaagagcacccaggaggccaucaacaagaucaccaagaaccugaacagccugagcgagcuggaggugaagaaccugcagagacugagcggcgccauggacgagcugcacaacgagauccuggagcuggacgagaagguggacgaccugagagccgacaccaucagcagccagaucgagcuggccgugcugcugagcaacgagggcaucaucaacagcgaggacgagcaccugcuggcccuggagagaaagcugaagaagaugcugggccccagcgccguggagaucggcaacggcugcuucgagaccaagcacaagugcaaccagaccugccugaacagaaucgccgccggcaccuucgacgccggcgaguucagccugcccaccuucgacagccugaacaucaccgccgccagccugaacgacgacggccuggacaaccacaccauccugcuguacuacagcaccgccgccagcagccuggccgugacccugaugaucgccaucuucgugguguacauggugagcagagacaacgugagcugcagcaucugccuguga

SEQ ID NO: 187552 - RNA, 1758 nt, Artificial Sequence
  derived and/or modified CDS sequence (opt4) from hemagglutinin__InfluenzaB__AGX21414
augaaggccaucaucgugcugcugaugguggugaccagcaacgccgacagaaucugcaccggcaucaccagcagcaacagcccccacguggugaagaccgccacccagggcgaggugaacgugaccggcgugaucccccugaccaccacccccaccaagagccacuucgccaaccugaagggcaccgagaccagaggcaagcugugccccaagugccccaacugcaccgaccuggacguggcccugggcagacccaagugcaccggcaagauccccagcgccagagugagcauccugcacgaggugagacccgugaccagcggcugcuuccccaucaugcacgacagaaccaagaucagacagcugcccaaccugcugagaggcuacgagcacaucagacugagcacccacaacgugaucaacgccgagaacgcccccggcggccccuacaagaucggcaccagcggcagcugccccaacgugaccaacggcaacggcuucuucgccaccauggccugggccgugcccaagaacgacaagaacaagaccgccaccgacccccugaccaucgaggugcccuacaucugcaccgagggcgaggaccagaucaccguguggggcuuccacagcgacaacgagacccagauggccaagcuguacggcgacagcaagccccagaaguucaccagcagcagcaacggcgugaccacccacuacgugagccagaucggcggcuuccccaaccagaccgaggacggcggccugccccagagcggcagaaucgugguggacuacauggugcagaagagcggcaagaccggcaccaucaccuaccagagaggcauccugcugccccagaagguguggugcgccagcggcagaagcaaggugaucaagggcagccugccccugaucggcgaggccgacugccugcacgagaaguacggcggccugaacaagagcaagcccuacuacaccggcgagcacgccaaggccaucggcaacugccccaucugggugaagaccccccugaagcuggccaacggcaccaaguacagaccccccgccaagcugcugaaggagagaggcuucuucggcgccaucgccggcuuccuggagggcggcugggagggcaugaucgccggcuggcacggcuacaccagccacggcgcccacggcguggccguggccgccgaccugaagagcacccaggaggccaucaacaagaucaccaagaaccugaacagccugagcgagcuggaggugaagaaccugcagagacugagcggcgccauggacgagcugcacaacgagauccuggagcuggacgagaagguggacgaccugagagccgacaccaucagcagccagaucgagcuggccgugcugcugagcaacgagggcaucaucaacagcgaggacgagcaccugcuggcccuggagagaaagcugaagaagaugcugggccccagcgccguggagaucggcaacggcugcuucgagaccaagcacaagugcaaccagaccugccuggacagaaucgccgccggcaccuucgacgccggcgaguucagccugcccaccuucgacagccugaacaucaccgccgccagccugaacgacgacggccuggacaaccacaccauccugcuguacuacagcaccgccgccagcagccuggccgugacccugaugaucgccaucuucgugguguacauggugagcagagacaacgugagcugcagcaucugccuguga

SEQ ID NO: 187553 - RNA, 1758 nt, Artificial Sequence; identical to SEQ ID NO: 186668
  derived and/or modified CDS sequence (opt4) from hemagglutinin__InfluenzaB__AGX21425

SEQ ID NO: 187554 - RNA, 1758 nt, Artificial Sequence
  derived and/or modified CDS sequence (opt4) from hemagglutinin__InfluenzaB__AGX21436
augaaggccaucaucgugcugcugaugguggugaccagcaacgccgacagaaucugcaccggcaucaccagcagcaacagcccccacaucgugaagaccgccacccagggcgaggugaacgugaccggcgugaucccccugaccaccacccccaccaagagccacuucgccaaccugaagggcaccgagaccagaggcaagcugugccccaagugccugaacugcaccgaccuggacguggcccugggcagacccaagugcaccggcaagauccccagcgccagagugagcauccugcacgaggugagacccgugaccagcggcugcuuccccaucaugcacgacagaaccaagaucagacagcugcccaaccugcugagaggcuacgagcacaucagacugagcacccacaacgugaucaacgccgagaacgcccccggcggccccuacaagaucggcaccagcggcagcugccccaacaucaccaacggcaacggcuucuucgccaccauggccugggccgugcccaagaacgacaagaacaagaccgccaccaacccccugaccaucgaggugcccuacaucugcaccgagggcgaggaccagaucaccguguggggcuuccacagcgacaacgagacccagauggccaagcuguacggcgacagcaagccccagaaguucaccagcagcgccaacggcgugaccacccacuacgugagccagaucggcggcuuccccaaccagaccgaggacggcggccugccccagagcggcagaaucgugguggacuacauggugcagaagagcggcaagaccggcaccaucaccuaccagagaggcauccugcugccccagaagguguggugcgccagcggcagaagcaaggugaucaagggcagccugccccugaucggcgaggccgacugccugcacgagaaguacggcggccugaacaagagcaagcccuacuacaccggcgagcacgccaaggccaucggcaacugccccaucugggugaagaccccccugaagcuggccaacggcaccaaguacagaccccccgccaagcugcugaaggagagaggcuucuucggcgccaucgccggcuuccuggagggcggcugggagggcaugaucgccggcuggcacggcuacaccagccacggcgcccacggcguggccguggccgccgaccugaagagcacccaggaggccaucaacaagaucaccaagaaccugaacagccugagcgagcuggaggugaagaaccugcagagacugagcggcgccauggacgagcugcacaacgagauccuggagcuggacgagaagguggacgaccugagagccgacaccaucagcagccagaucgagcuggccgugcugcugagcaacgagggcaucaucaacagcgaggacgagcaccugcuggcccuggagagaaagcugaagaagaugcugggccccagcgccguggagaucggcaacggcugcuucgagaccaagcacaagugcaaccagaccugccuggacagaaucgccgccggcaccuucgacgccggcgaguucagccugcccaccuucgacagccugaacaucaccgccgccagccugaacgacgacggccuggacaaccacaccauccugcuguacuacagcaccguggccagcagccuggccgugacccugaugaucgccaucuucgugguguacauggugagcagagacaacgugagcugcagcaucugccuguga

SEQ ID NO: 187555 - RNA, 1758 nt, Artificial Sequence; identical to SEQ ID NO: 186743
  derived and/or modified CDS sequence (opt4) from hemagglutinin__InfluenzaB__AGX21447

SEQ ID NO: 187556 - RNA, 1758 nt, Artificial Sequence; identical to SEQ ID NO: 186668
  derived and/or modified CDS sequence (opt4) from hemagglutinin__InfluenzaB__AGX21458

SEQ ID NO: 187557 - RNA, 1758 nt, Artificial Sequence; identical to SEQ ID NO: 186668
  derived and/or modified CDS sequence (opt4) from hemagglutinin__InfluenzaB__AGX21469

SEQ ID NO: 187558 - RNA, 1758 nt, Artificial Sequence
  derived and/or modified CDS sequence (opt4) from hemagglutinin__InfluenzaB__AGX21480
augaaggccaucaucgugcugcugaugguggugaccagcaacgccgacagaaucugcaccggcaucaccagcagcaacagcccccacguggugaagaccgccacccagggcgaggugaacgugaccggcgugaucccccugaccaccacccccaccaagagccacuucgccaaccugaagggcaccgagaccagaggcaagcugugccccaagugccugaacugcaccgaccuggacguggcccugggcagacccaagugcaccggcaagauccccagcgccagagugagcauccugcacgaggugagacccgugaccagcggcugcuuccccaucaugcacgacagaaccaagaucagacagcugcccaaccugcugagaggcuacgagcacaucagacugagcacccacaacgugaucaacgccgagaacgcccccggcggccccuacaagaucggcaccagcggcagcugccccaacgugaccaacggcaacggcuucuucgccaccauggccugggccgugcccaagaacgacaagaacaagaccgccaccaacccccugaccaucgaggugcccuacaucugcaccgagggcgaggaccagaucaccguguggggcuuccacagcgacaacgagacccagauggccaagcuguacggcgacagcaagccccagaaguucaccagcagcgccaacggcgugaccacccacuacgugagccagaucggcggcuuccccaaccagaccgaggacggcggccugccccagagcggcagaaucgugguggacuacauggugcagaagagcggcaagaccggcaccaucaccuaccagagaggcauccugcugccccagaagguguggugcgccagcggcagaagcaaggugaucaagggcagccugccccugaucggcgaggccgacugccugcacgagaaguacggcggccugaacaagagcaagcccuacuacaccggcgagcacgccaaggccaucggcaacugccccaucugggugaagaccccccugaagcuggccaacggcaccaaguacagaccccccgccaagcugcugaaggagagaggcuucuucggcgccaucgccggcuuccuggagggcggcugggagggcaugaucgccggcuggcacggcuacaccagccacggcgcccacggcguggccguggccgccgaccugaagagcacccaggaggccaucaacaagaucaccaagaaccugaacagccugagcgagcuggaggugaagaaccugcagagacugagcggcgccauggacgagcugcacaacgagauccuggagcuggacgagaagguggacgaccugagagccgacaccaucagcagccagaucgagcuggccgugcugcugagcaacgagggcaucaucaacagcgaggacgagcaccugcuggcccuggagagaaagcugaagaagaugcugggccccagcgccguggagaucggcaacggcugcuucgagaccaagcacaagugcaaccagaccugccuggacagaaucgccgccggcaccuucgacgccggcgaguucagccugcccaccuucgacagccugaacaucaccgccgccagccugaacgaggacggccuggacaaccacaccauccugcuguacuacagcaccgccgccagcagccuggccgugacccugaugaucgccaucuucgugguguacauggugagcagagacaacgugagcugcagcaucugccuguga

SEQ ID NO: 187559 - RNA, 1758 nt, Artificial Sequence; identical to SEQ ID NO: 186743
  derived and/or modified CDS sequence (opt4) from hemagglutinin__InfluenzaB__AGX21491

SEQ ID NO: 187560 - RNA, 1758 nt, Artificial Sequence; identical to SEQ ID NO: 186743
  derived and/or modified CDS sequence (opt4) from hemagglutinin__InfluenzaB__AGX21502

SEQ ID NO: 187561 - RNA, 1758 nt, Artificial Sequence; identical to SEQ ID NO: 186668
  derived and/or modified CDS sequence (opt4) from hemagglutinin__InfluenzaB__AGX21513

SEQ ID NO: 187562 - RNA, 1758 nt, Artificial Sequence; identical to SEQ ID NO: 186705
  derived and/or modified CDS sequence (opt4) from hemagglutinin__InfluenzaB__AGX21524

SEQ ID NO: 187563 - RNA, 1758 nt, Artificial Sequence
  derived and/or modified CDS sequence (opt4) from hemagglutinin__InfluenzaB__AGX21535
augaaggccaucaucgugcugcugaugguggugaccagcaacgccgacagaaucugcaccggcaucaccagcagcaacagcccccacaucgugaagaccgccacccagggcgaggugaacgugaccggcgugaucccccugaccaccacccccaccaagagccacuucgccaaccugaagggcaccgagaccagaggcaagcugugccccaagugccugaacugcaccgaccuggacguggcccugggcagacccaagugcaccggcaagauccccagcgccagagugagcauccugcacgaggugagacccgugaccagcggcugcuuccccaucaugcacgacagaaccaagaucagacagcugcccaaccugcugagaggcuacgagcacaucagacugagcacccacaacgugaucaacgccgagaacgcccccggcggccccuacaagaucggcaccagcggcagcugccccaacaucaccaacggcaacggcuucuucgccaccauggccugggccgugcccaagaacgacaagaacaagaccgccaccaacccccugaccaucgaggugcccuacaucugcaccgagggcgaggaccagaucaccguguggggcuuccacagcgacagcgagacccagauggccaagcuguacggcgacagcaagccccagaaguucaccagcagcgccaacggcgugaccacccacuacgugagccagaucggcggcuuccccaaccagaccgaggacggcggccugccccagagcggcagaaucgugguggacuacauggugcagaagagcggcaagaccggcaccaucaccuaccagagaggcauccugcugccccagaagguguggugcgccagcggcagaagcaaggugaucaagggcagccugccccugaucggcgaggccgacugccugcacgagaaguacggcggccugaacaagagcaagcccuacuacaccggcgagcacgccaaggccaucggcaacugccccaucugggugaagaccccccugaagcuggccaacggcaccaaguacagaccccccgccaagcugcugaaggagagaggcuucuucggcgccaucgccggcuuccuggagggcggcugggagggcaugaucgccggcuggcacggcuacaccagccacggcgcccacggcguggccguggccgccgaccugaagagcacccaggaggccaucaacaagaucaccaagaaccugaacagccugagcgagcuggaggugaagaaccugcagagacugagcggcgccauggacgagcugcacaacgagauccuggagcuggacgagaagguggacgaccugagagccgacaccaucagcagccagaucgagcuggccgugcugcugagcaacgagggcaucaucaacagcgaggacgagcaccugcuggcccuggagagaaagcugaagaagaugcugggccccagcgccguggagaucggcaacggcugcuucgagaccaagcacaagugcaaccagaccugccuggacagaaucgccgccggcaccuucgacgccggcgaguucagccugcccaccuucgacagccugaacaucaccgccgccagccugaacgacgacggccuggacaaccacaccauccugcuguacuacagcaccgccgccagcagccuggccgugacccugaugaucgccaucuucgugguguacauggugagcagagacaacgugagcugcagcaucugccuguga

SEQ ID NO: 187564 - RNA, 1758 nt, Artificial Sequence; identical to SEQ ID NO: 186705
  derived and/or modified CDS sequence (opt4) from hemagglutinin__InfluenzaB__AGX21546

SEQ ID NO: 187565 - RNA, 1758 nt, Artificial Sequence
  derived and/or modified CDS sequence (opt4) from hemagglutinin__InfluenzaB__AGX21557
augaaggccaucaucgugcugcugaugguggugaccagcaacgccgacagaaucugcaccggcaucaccagcagcaacagcccccacguggugaagaccgccacccagggcgaggugaacgugaccggcgugaucacccugaccaccacccccaccaagagccacuucgccaaccugaagggcaccgagaccagaggcaagcugugccccaagugccugaacugcaccgaccuggacguggcccugggcagacccaagugcaccggcaagauccccagcgccagagugagcauccugcacgaggugagacccgugaccagcggcugcuuccccaucaugcacgacagaaccaagaucagacagcugcccaaccugcugagaggcuacgagcacaucagacugagcacccacaacgugaucaacgccgagaacgcccccggcggccccuacaagaucggcaccagcggcagcugccccaacgugaccaacggcaacggcuucuucgccaccauggccugggccgugcccaagaacgacaagaacaagaccgccaccaacccccugaccaucgaggugcccuacaucugcaccgagggcgaggaccagaucaccguguggggcuuccacagcgacaacgagacccagauggccaagcuguacggcgacagcaagccccagaaguucaccagcagcgccaacggcgugaccacccacuacgugagccagaucggcggcuuccccaaccagaccgaggacggcggccugccccagagcggcagaaucgugguggacuacauggugcagaagagcggcaagaccggcaccaucaccuaccagagaggcauccugcugccccagaagguguggugcgccagcggcagaagcaaggugaucaagggcagccugccccugaucggcgaggccgacugccugcacgagaaguacggcggccugaacaagagcaagcccuacuacaccggcgagcacgccaaggccaucggcaacugccccaucugggugaagaccccccugaagcuggccaacggcaccaaguacagaccccccgccaagcugcugaaggagagaggcuucuucggcgccaucgccggcuuccuggagggcggcugggagggcaugaucgccggcuggcacggcuacaccagccacggcgcccacggcguggccguggccgccgaccugaagagcacccaggaggccaucaacaagaucaccaagaaccugaacagccugagcgagcuggaggugaagaaccugcagagacugagcggcgccauggacgagcugcacaacgagauccuggagcuggacgagaagguggacgaccugagagccgacaccaucagcagccagaucgagcuggccgugcugcugagcaacgagggcaucaucaacagcgaggacgagcaccugcuggcccuggagagaaagcugaagaagaugcugggccccagcgccguggagaucggcaacggcugcuucgagaccaagcacaagugcaaccagaccugccuggacagaaucgccgccggcaccuucgacgccggcgaguucagccugcccaccuucgacagccugaacaucaccgccgccagccugaacgacgacggccuggacaaccacaccauccugcuguacuacagcaccgccgccagcagccuggccgugacccugaugaucgccaucuucgugguguacauggugagcagagacaacgugagcugcagcaucugccuguga

SEQ ID NO: 187566 - RNA, 1758 nt, Artificial Sequence
  derived and/or modified CDS sequence (opt4) from hemagglutinin__InfluenzaB__AGX21568
augaaggccaucaucgugcugcugaugguggugaccagcaacgccgacagaaucugcaccggcaucaccagcagcaacagcccccacguggugaagaccgccacccagggcgaggugaacgugaccggcgugaucccccugaccaccacccccaccaagagccacuucgccaaccugaagggcaccgagaccagaggcaagcugugccccaagugccugaacugcaccgaccuggacguggcccugggcagacccaagugcaccggcaagauccccagcgccagagugagcauccugcacgaggugagacccgugaccagcggcugcuuccccaugaugcacgacagaaccaagaucagacagcugcccaaccugcugagaggcuacgagcacaucagacugagcacccacaacgugaucaacgccgagaacgcccccggcggccccuacaagaucggcaccagcggcagcugccccaacgugaccaacggcaacggcuucuucgccaccauggccugggccgugcccaagaacgacaagaacaagaccgccaccaacccccugaccaucgaggugcccuacaucugcaccgagggcgaggaccagaucaccguguggggcuuccacagcgacaacgagacccagauggccaagcuguacggcgacagcaagccccagaaguucaccagcagcgccaacggcgugaccacccacuacgugagccagaucggcggcuuccccaaccagaccgaggacggcggccugccccagagcggcagaaucgugguggacuacauggugcagaagagcggcaagaccggcaccaucaccuaccagagaggcauccugcugccccagaagguguggugcgccagcggcagaagcaaggugaucaagggcagccugccccugaucggcgaggccgacugccugcacgagaaguacggcggccugaacaagagcaagcccuacuacaccggcgagcacgccaaggccaucggcaacugccccaucugggugaagaccccccugaagcuggccaacggcaccaaguacagaccccccgccaagcugcugaaggagagaggcuucuucggcgccaucgccggcuuccuggagggcggcugggagggcaugaucgccggcuggcacggcuacaccagccacggcgcccacggcguggccguggccgccgaccugaagagcacccaggaggccaucaacaagaucaccaagaaccugaacagccugagcgagcuggaggugaagaaccugcagagacugagcggcgccauggacgagcugcacaacgagauccuggagcuggacgagaagguggacgaccugagagccgacaccaucagcagccagaucgagcuggccgugcugcugagcaacgagggcaucaucaacagcgaggacgagcaccugcuggcccuggagagaaagcugaagaagaugcugggccccagcgccguggagaucggcaacggcugcuucgagaccaagcacaagugcaaccagaccugccuggacagaaucgccgccggcaccuucgacgccggcgaguucagccugcccaccuucgacagccugaacaucaccgccgccagccugaacgacgacggccuggacaaccacaccauccugcuguacuacagcaccgccgccagcagccuggccgugacccugaugaucgccaucuucgugguguacauggugagcagagacaacgugagcugcagcaucugccuguga

SEQ ID NO: 187567 - RNA, 1758 nt, Artificial Sequence; identical to SEQ ID NO: 186668
  derived and/or modified CDS sequence (opt4) from hemagglutinin__InfluenzaB__AGX21579

SEQ ID NO: 187568 - RNA, 1758 nt, Artificial Sequence; identical to SEQ ID NO: 186705
  derived and/or modified CDS sequence (opt4) from hemagglutinin__InfluenzaB__AGX21590

SEQ ID NO: 187569 - RNA, 1758 nt, Artificial Sequence; identical to SEQ ID NO: 187518
  derived and/or modified CDS sequence (opt4) from hemagglutinin__InfluenzaB__AGX21601

SEQ ID NO: 187570 - RNA, 1758 nt, Artificial Sequence; identical to SEQ ID NO: 186705
  derived and/or modified CDS sequence (opt4) from hemagglutinin__InfluenzaB__AGX21611

SEQ ID NO: 187571 - RNA, 1758 nt, Artificial Sequence; identical to SEQ ID NO: 187049
  derived and/or modified CDS sequence (opt4) from hemagglutinin__InfluenzaB__AGX21622

SEQ ID NO: 187572 - RNA, 1758 nt, Artificial Sequence
  derived and/or modified CDS sequence (opt4) from hemagglutinin__InfluenzaB__AGX21633
augaaggccaucaucgugcugcugaugguggugaccagcaacgccgacagaaucugcaccggcaucaccagcagcaacagcccccacaucgugaagaccgccacccagggcgaggugaacgugaccggcgugaucccccugaccaccacccccaccaagagccacuucgccaaccugaagggcaccgagaccagaggcaagcugugccccaagugccugaacugcaccgaccuggacguggcccugggcagacccaagugcaccggcaagauccccagcgccagagugagcauccugcacgaggugagacccgugaccagcggcugcuuccccaucaugcacgacagaaccaagaucagacagcugcccaaccugcugagaggcuacgagcacaucagacugagcacccacaacgugaucaacgccgagaacgcccccggcggccccuacaagaucggcaccagcggcagcugccccaacaucaccaacggcaacggcuucuucgccaccauggccugggccgugcccaagaacgacaagaacaagaccgccaccaacccccugaccaucgaggugcccuacaucugcaccgagggcgaggaccagaucaccguguggggcuuccacagcgacaacgagacccagauggccaagcuguacggcgacagcaagccccagaaguucaccagcagcgccaacggcgugaccacccacuacgugagccagaucggcggcuuccccaaccagaccgaggacggcggccugccccagagcggcagaaucgugguggacuacauggugcagaagagcggcaagaccggcaccaucaccuaccagagaggcauccugcugccccagaagguguggugcgccagcggcagaagcaaggugaucaagggcagccugccccugaucggcgaggccgacugccugcacgagaaguacggcggccugaacaagagcaagcccuacuacaccggcgagcacgccaaggccaucggcaacugccccaucugggugaagaccccccugaagcuggccaacggcaccaaguacagaccccccgccagacugcugaaggagagaggcuucuucggcgccaucgccggcuuccuggagggcggcugggagggcaugaucgccggcuggcacggcuacaccagccacggcgcccacggcguggccguggccgccgaccugaagagcacccaggaggccaucaacaagaucaccaagaaccugaacagccugagcgagcuggaggugaagaaccugcagagacugagcggcgccauggacgagcugcacaacgagauccuggagcuggacgagaagguggacgaccugagagccgacaccaucagcagccagaucgagcuggccgugcugcugagcaacgagggcaucaucaacagcgaggacgagcaccugcuggcccuggagagaaagcugaagaagaugcugggccccagcgccguggagaucggcaacggcugcuucgagaccaagcacaagugcaaccagaccugccuggacagaaucgccgccggcaccuucgacgccggcgaguucagccugcccaccuucgacagccugaacaucaccgccgccagccugaacgacgacggccuggacaaccacaccauccugcuguacuacagcaccgccgccagcagccuggccgugacccugaugaucgccaucuucgugguguacauggugagcagagacaacgugagcugcagcaucugccuguga

SEQ ID NO: 187573 - RNA, 1758 nt, Artificial Sequence; identical to SEQ ID NO: 186743
  derived and/or modified CDS sequence (opt4) from hemagglutinin__InfluenzaB__AGX21644

SEQ ID NO: 187574 - RNA, 1758 nt, Artificial Sequence; identical to SEQ ID NO: 186668
  derived and/or modified CDS sequence (opt4) from hemagglutinin__InfluenzaB__AGX21655

SEQ ID NO: 187575 - RNA, 1758 nt, Artificial Sequence
  derived and/or modified CDS sequence (opt4) from hemagglutinin__InfluenzaB__AGX21666
augaaggccaucaucgugcugcugaugguggugaccagcaacgccgacagaaucugcaccggcaucaccagcagcaacagcccccacguggugaagaccgccacccagggcgaggugaacgugaccggcgugaucccccugaccaccacccccaccaagagccacuucgccaaccugaagggcaccgagaccagaggcaagcugugccccaagugccccaacugcaccgaccuggacguggcccugggcagacccaagugcaccggcaagauccccagcgccagagugagcauccugcacgaggugagacccgugaccagcggcugcuuccccaucaugcacgacagaaccaagaucagacagcugcccaaccugcugagaggcuacgagcacaucagacugagcacccacaacgugaucaacgccgagaacgcccccggcggccccuacaagaucggcaccagcggcagcugccccaacgugaccaacggcaacggcuucuucgccaccauggccugggccgugcccaagaacgacaagaacaagaccgccaccaacccccugaccaucgaggugcccuacaucugcaccgagggcgaggaccagaucaccguguggggcuuccacagcgacaacgagacccagauggccaagcuguacggcgacagcaagccccagaaguucaccagcagcgccaacggcgugaccacccacuacgugagccagaucggcggcuuccccaaccagaccgaggacggcggccugccccagagcggcagaaucgugguggacuacauggugcagaagagcggcaagaccggcaccaucaccuaccagagaggcauccugcugccccagaagguguggugcgccagcggcagaagcaaggugaucaagggcagccugccccugaucggcgaggccgacugccugcacgagaaguacggcggccugaacaagagcaagcccuacuacaccggcgagcacgccaaggccaucggcaacugccccaucugggugaagaccccccugaagcuggccaacggcaccaaguacagaccccccgccaagcugcugaaggagagaggcuucuucggcgccaucgccggcuuccuggagggcggcugggagggcaugaucgccggcuggcacggcuacaccagccacggcgcccacggcguggccguggccgccgaccugaagagcacccaggaggccaucaacaagaucaccaagaaccugaacagccugagcgagcuggaggugaagaaccugcagagacugagcggcgccauggacgagcugcacaacgagauccuggagcuggacgagaagguggacgaccugagagccgacaccaucagcagccagaucgagcuggccgugcugcugagcaacgagggcaucaucaacagcgaggacgagcaccugcuggcccuggagagaaagcugaagaagaugcugggccccagcgccguggagaucggcaacggcugcuucgagaccaagcacaagugcaaccagaccugccuggacaagaucgccgccggcaccuucgacgccggcgaguucagccugcccaccuucgacagccugaacaucaccgccgccagccugaacgacgacggccuggacaaccacaccauccugcuguacuacagcaccgccgccagcagccuggccgugacccugaugaucgccaucuucgugguguacauggugagcagagacaacgugagcugcagcaucugccuguga

SEQ ID NO: 187576 - RNA, 1758 nt, Artificial Sequence; identical to SEQ ID NO: 186743
  derived and/or modified CDS sequence (opt4) from hemagglutinin__InfluenzaB__AGX21677

SEQ ID NO: 187577 - RNA, 1758 nt, Artificial Sequence; identical to SEQ ID NO: 186668
  derived and/or modified CDS sequence (opt4) from hemagglutinin__InfluenzaB__AGX21688

SEQ ID NO: 187578 - RNA, 1758 nt, Artificial Sequence
  derived and/or modified CDS sequence (opt4) from hemagglutinin__InfluenzaB__AGX21699
augaaggccaucaucgugcugcugaugguggugaccagcaacgccgacagaaucugcaccggcaucaccagcagcaacagcccccacguggugaagaccgccacccagggcgaggugaacgugaccggcgugaucccccugaccaccacccccaccaagagccacuucgccaaccugaagggcaccgagaccagaggcaagcugugccccaagugccugaacugcaccgaccuggacguggcccugggcagacccaagugcaccggcaagauccccagcgccagagugagcauccugcacgaggugagacccgugaccagcggcugcuuccccaucaugcacgacagaaccaagaucagacagcugcccaaccugcugagaggcuacgagcacaucagacugagcacccacaacgugaucaacgccgagaacgcccccggcggccccuacaagaucggcaccagcggcagcugccccaacgugaccaacggcaacggcuucuucgccaccauggccugggccgugcccaagaacgacaagaacaagaccgccaccaacccccugaccaucgaggugcccuacaucugcaccgagggcgaggaccagaucaccguguggggcuuccacagcgacaacgagacccagauggccaagcuguacggcgacagcaagccccagaaguucaccagcagcgccaacggcgugaccacccacuacgugagccagaucggcggcuuccccaaccagaccgaggacggcggccugccccagagcggcagaaucgugguggacuacauggugcagaagagcggcaagaccggcaccaucaccuaccagagaggcauccugcugccccagaagguguggugcgccagcggcagaagcaaggugaucaagggcagccugccccugaucggcgaggccgacugccugcacgagaaguacggcggccugaacaagagcaagcccuacuacaccggcgagcacgccaaggccaucggcaacugccccaucugggugaagaccccccugaaccuggccaacggcaccaaguacagaccccccgccaagcugcugaaggagagaggcuucuucggcgccaucgccggcuuccuggagggcggcugggagggcaugaucgccggcuggcacggcuacaccagccacggcgcccacggcguggccguggccgccgaccugaagagcacccaggaggccaucaacaagaucaccaagaaccugaacagccugagcgagcuggaggugaagaaccugcagagacugagcggcgccauggacgagcugcacaacgagauccuggagcuggacgagaagguggacgaccugagagccgacaccaucagcagccagaucgagcuggccgugcugcugagcaacgagggcaucaucaacagcgaggacgagcaccugcuggcccuggagagaaagcugaagaagaugcugggccccagcgccguggagaucggcaacggcugcuucgagaccaagcacaagugcaaccagaccugccuggacagaaucgccgccggcaccuucgacgccggcgaguucagccugcccaccuucgacagccugaacaucaccgccgccagccugagcgacgacggccuggacaaccacaccauccugcuguacuacagcaccgccgccagcagccuggccgugacccugaugaucgccaucuucgugguguacauggugagcagagacaacgugagcugcagcaucugccuguga

SEQ ID NO: 187579 - RNA, 1758 nt, Artificial Sequence; identical to SEQ ID NO: 187518
  derived and/or modified CDS sequence (opt4) from hemagglutinin__InfluenzaB__AGX21710

SEQ ID NO: 187580 - RNA, 1758 nt, Artificial Sequence; identical to SEQ ID NO: 186743
  derived and/or modified CDS sequence (opt4) from hemagglutinin__InfluenzaB__AGX21721

SEQ ID NO: 187581 - RNA, 1755 nt, Artificial Sequence
  derived and/or modified CDS sequence (opt4) from hemagglutinin__InfluenzaB__AGX21732
augaaggccaucaucgugcugcugaugguggugaccagcaacgccgacagaaucugcaccggcaucaccagcagcaacagcccccacguggugaagaccgccacccagggcgaggugaacgugaccggcgccaucccccugaccaccacccccaccaagagccacuucgccaaccugaagggcaccaagaccagaggcaagcugugccccaccugccugaacugcaccgaccuggacguggcccugggcggccccaugugcgugggcaucacccccagcgccaaggccagcauccugcacgaggugagacccgugaccagcggcugcuuccccaucaugcacgacagaaccaagaucagacagcugcccaaccugcugagaggcuacgagaagaucagacugagcgcccagaacgugaucaacgccgagaaggcccccggcggccccuacaagcugggcaccagcggcagcugccccaacgccaccagcaagagcggcuucuucgccaccauggccugggccgugcccagagacgacaacaagaccgccaccaacccccugaccguggaggugccccacaucugcgccaacgaggaggaccagaucaccguguggggcuuccacagcgacaacaagacccagaugaagaaccuguacggcgacagcaacccccagaaguucaccagcagcgccaacggcaucaccacccacuacgugagccagaucggcggcuuccccgaccagaccgaggacggcggccugccccagagcggcagaaucgugguggacuacauggugcagaagcccggcaagaccggcaccaucguguaccagagaggcauccugcugccccagaagguguggugcgccagcggcagaagcaaggugaucaagggcagccugccccugaucggcgaggccgacugccugcacgagaaguacggcggccugaacaagagcaagcccuacuacaccggcgagcacgccaaggccaucggcaacugccccaucugggugaagaccccccugaagcuggccaacggcaccaaguacagaccccccgccaagcugcugaaggagagaggcuucuucggcgccaucgccggcuuccuggagggcggcugggagggcaugaucgccggcuggcacggcuacaccagccacggcgcccacggcguggccguggccgccgaccugaagagcacccaggaggccaucaacaagaucaccaagaaccugaacagccugagcgagcuggaggugaagaaccugcagagacugagcggcgccauggacgagcugcacaacgagauccuggagcuggacgagaagguggacgaccugagagccgacaccaucagcagccagaucgagcuggccgugcugcugagcaacgagggcaucaucaacagcgaggacgagcaccugcuggcccuggagagaaagcugaagaagaugcugggccccagcgccguggacaucggcaacggcugcuucgagaccaagcacaagugcaaccagaccugccuggacagaaucgccgccggcaccuucaacgccggcgaguucagccugcccaccuucgacagccugaacaucaccgccgccagccugaacgacgacggccuggacaaccacaccauccugcuguacuacagcaccgccgccagcagccuggccgugacccugaugaucgccaucuucaucguguacaugaucagcagagacaacgugagcugcagcaucugccuguga

SEQ ID NO: 187582 - RNA, 1755 nt, Artificial Sequence
  derived and/or modified CDS sequence (opt4) from hemagglutinin__InfluenzaB__AGX21743
augaaggccaucaucgugcugcugaugguggugaccagcaacgccgacagaaucugcaccggcaucaccagcagcaacagcccccacguggugaagaccgccacccagggcgaggugaacgugaccggcgugaucccccugaccaccacccccaccaagagccacuucgccaaccugaagggcaccagaaccagaggcaagcugugccccgacugccugaacugcaccgaccuggacguggcccugggcagacccaugugcgugggcaccacccccagcgccaaggccagcauccugcacgaggugagacccgugaccagcggcugcuuccccaucaugcacgacagaaccaagaucagacagcugcccaaccugcugagaggcuacgagaacaucagacugagcacccagaacgugaucgacgccgagaaggcccugggcggccccuacagacugggcaccagcggcagcugccccaacgccaccagcaagagcggcuucuucgccaccauggccugggccgugcccaaggacaacaacaagaacgccaccaacccccugaccguggaggugcccuacaucugcaccgagggcgaggaccagaucaccguguggggcuuccacagcgacaacaagacccagaugaagaaccuguacggcgacagcaacccccagaaguucaccagcagcgccaacggcgugaccacccacuacgugagccagaucggcggcuuccccgaccagaccgaggacggcggccugccccagagcggcagaaucgugguggacuacauggugcagaagcccggcaagaccggcaccaucguguaccagagaggcgugcugcugccccagaagguguggugcgccagcggcaagagcaaggugaucaagggcagccugccccugaucggcgaggccgacugccugcacgagaaguacggcggccugaacaagagcaagcccuacuacaccggcgagcacgccaaggccaucggcaacugccccaucugggugaagaccccccugaagcuggccaacggcaccaaguacagaccccccgccaagcugcugaaggagagaggcuucuucggcgccaucgccggcuuccuggagggcggcugggagggcaugaucgccggcuggcacggcuacaccagccacggcgcccacggcguggccguggccgccgaccugaagagcacccaggaggccaucaacaagaucaccaagaaccugaacagccugagcgagcuggaggugaagaaccugcagagacugagcggcgccauggacgagcugcacaacgagauccuggagcuggacgagaagguggacgaccugagagccgacaccaucagcagccagaucgagcuggccgugcugcugagcaacgagggcaucaucaacagcgaggacgagcaccugcuggcccuggagagaaagcugaagaagaugcugggccccagcgccguggacaucggcaacggcugcuucgagaccaagcacaagugcaaccagaccugccuggacagaaucgccgccggcaccuucaacgccggcgaguucagccugcccaccuucgacagccugaacaucaccgccgccagccugaacgacgacggccuggacaaccacaccauccugcuguacuacagcaccgccgccagcagccuggccgugacccugaugcuggccaucuucaucguguacauggugagcagagacaacgugagcugcagcaucugccuguga

SEQ ID NO: 187583 - RNA, 1755 nt, Artificial Sequence
  derived and/or modified CDS sequence (opt4) from hemagglutinin__InfluenzaB__AGX21754
augaaggccaucaucgugcugcugaugguggugaccagcaacgccgacagaaucugcaccggcaucaccagcagcaacagcccccacguggugaagaccgccacccagggcgaggugaacgugaccggcgccaucccccugaccaccacccccgccaagagccacuucgccaaccugaagggcaccaagaccagaggcaagcugugccccaccugccugaacugcaccgaccuggacguggcccugggcggccccaugugcgugggcaucacccccagcgccaaggccagcauccugcacgaggugagacccgugaccagcggcugcuuccccaucaugcacgacagaaccaagaucagacagcugcccaaccugcugagaggcuacgagaagaucagacugagcgcccagaacgugaucaacgccgagaaggcccccggcggccccuacaagcugggcaccagcggcagcugccccaacgccaccagcaagagcggcuucuucgccaccauggccugggccgugcccagagacgacaacaagaccgccaccaacccccugaccguggaggugccccacaucugcgccaacgaggaggaccagaucaccguguggggcuuccacagcgacaacaagacccagaugaagaaccuguacggcgacagcaacccccagaaguucaccagcagcgccaacggcaucaccacccacuacgugagccagaucggcggcuuccccgaccagaccgaggacggcggccugccccagagcggcagaaucgugguggacuacauggugcagaagcccggcaagaccggcaccaucguguaccagagaggcauccugcugccccagaagguguggugcgccagcggcagaagcaaggugaucaagggcagccugccccugaucggcgaggccgacugccugcacgagaaguacggcggccugaacaagagcaagcccuacuacaccggcgagcacgccaaggccaucggcaacugccccaucugggugaagaccccccugaagcuggccaacggcaccaaguacagaccccccgccaagcugcugaaggagagaggcuucuucggcgccaucgccggcuuccuggagggcggcugggagggcaugaucgccggcuggcacggcuacaccagccacggcgcccacggcguggccguggccgccgaccugaagagcacccaggaggccaucaacaagaucaccaagaaccugaacagccugagcgagcuggaggugaagaaccugcagagacugagcggcgccauggacgagcugcacaacgagauccuggagcuggacgagaagguggacgaccugagagccgacaccaucagcagccagaucgagcuggccgugcugcugagcaacgagggcaucaucaacagcgaggacgagcaccugcuggcccuggagagaaagcugaagaagaugcugggccccagcgccguggacaucggcaacggcugcuucgagaccaagcacaagugcaaccagaccugccuggacagaaucgccgccggcaccuucaacgccggcgaguucagccugcccaccuucgacagccugaacaucaccgccgccagccugaacgacgacggccuggacaaccacaccauccugcuguacuacagcaccgccgccagcagccuggccgugacccugaugaucgccaucuucaucguguacaugaucagcagagacaacgugagcugcagcaucugccuguga

SEQ ID NO: 187584 - RNA, 1755 nt, Artificial Sequence
  derived and/or modified CDS sequence (opt4) from hemagglutinin__InfluenzaB__AGX21776
augaaggccaucaucgugcugcugaugguggugaccagcaacgccgacagaaucugcaccggcaucaccagcagcaacagcccccacguggugaagaccgccacccagggcgaggugaacgugaccggcgugaucccccugaccaccacccccaccaagagcuacuucgccaaccugaagggcaccagaaccagaggcaagcugugccccgacugccugaacugcaccgaccuggacguggcccugggcagacccaugugcgugggcaucacccccagcgccaaggccagcauccugcacgaggugagacccgugaccagcggcugcuuccccaucaugcacgacagaaccaagaucagacagcugcccaaccugcugagaggcuacgagaacaucagacugagcacccagaacgugaucgacgccgagaaggcccccggcggccccuacagacugggcaccagcggcagcugccccaacgccaccagcaagagcggcuucuucgccaccauggccugggccgugcccaaggacaacaacaagaacgccaccaacccccugaccguggaggugcccuacgugugcaccgagggcgaggaccagaucaccguguggggcuuccacagcgacaacaagacccagaugaagaaccuguacggcgacagcaacccccagaaguucaccagcagcgccaacggcgugaccacccacuacgugagccagaucggcggcuuccccgaccagaccgaggacggcggccugccccagagcggcagaaucgugguggacuacauggugcagaagcccggcaagaccggcaccaucguguaccagagaggcgugcugcugccccagaagguguggugcgccagcggcagaagcaaggugaucaagggcagccugccccugaucggcgaggccgacugccugcacgagaaguacggcggccugaacaagagcaagcccuacuacaccggcgagcacgccaaggccaucggcaacugccccaucugggugaagaccccccugaagcuggccaacggcaccaaguacagaccccccgccaagcugcugaaggagagaggcuucuucggcgccaucgccggcuuccuggagggcggcugggagggcaugaucgccggcuggcacggcuacaccagccacggcgcccacggcguggccguggccgccgaccugaagagcacccaggaggccaucaacaagaucaccaagaaccugaacagccugagcgagcuggaggugaagaaccugcagagacugagcggcgccauggacgagcugcacaacgagauccuggagcuggacgagaagguggacgaccugagagccgacaccaucagcagccagaucgagcuggccgugcugcugagcaacgagggcaucaucaacagcgaggacgagcaccugcuggcccuggagagaaagcugaagaagaugcugggccccagcgccguggacaucggcaacggcugcuucgagaccaagcacaagugcaaccagaccugccuggacagaaucgccgccggcaccuucaacgccggcgaguucagccugcccaccuucgacagccugaacaucaccgccgccagccugaacgacgacggccuggacaaccacaccauccugcuguacuacagcaccgccgccagcagccuggccgugacccugaugcuggccaucuucaucguguacauggugagcagagacaacgugagcugcagcaucugccuguga

SEQ ID NO: 187585 - RNA, 1758 nt, Artificial Sequence; identical to SEQ ID NO: 187039
  derived and/or modified CDS sequence (opt4) from hemagglutinin__InfluenzaB__AGX21787

SEQ ID NO: 187586 - RNA, 1755 nt, Artificial Sequence
  derived and/or modified CDS sequence (opt4) from hemagglutinin__InfluenzaB__AGX21798
augaaggccaucaucgugcugcugaugguggugaccagcaacgccgacagaaucugcaccggcaucaccagcagcaacagcccccacguggugaagaccgccacccagggcgaggugaacgugaccggcgugaucccccugaccaccacccccaccaagagcuacuucgccaaccugaagggcaccagaaccagaggcaagcugugccccgacugccugaacugcaccgaccuggacguggcccugggcagacccaugugcgugggcaccacccccagcgccaaggccagcauccugcacgaggugagacccgugaccagcggcugcuuccccaucaugcacgacagaaccaagaucagacagcugcccaaccugcugagaggcuacgagaacaucagacugagcacccagaacgugaucgacgccgagaaggcccccggcggccccuacagacugggcaccagcggcagcugccccaacgccaccagcaagagcggcuucuucgccaccauggccugggccgugcccaaggacaacaacaagaacgccaccaacccccugaccguggaggugcccuacgugugcaccgagggcgaggaccagaucaccguguggggcuuccacagcgacaacaagacccagaugaagaaccuguacggcgacagcaacccccagaaguucaccagcagcgccaacggcgugaccacccacuacgugagccagaucggcggcuuccccgaccagaccgaggacggcggccugccccagagcggcagaaucgugguggacuacauggugcagaagcccggcaagaccggcaccaucguguaccagagaggcgugcugcugccccagaagguguggugcgccagcggcagaagcaaggugaucaagggcagccugccccugaucggcgaggccgacugccugcacgagaaguacggcggccugaacaagagcaagcccuacuacaccggcgagcacgccaaggccaucggcaacugccccaucugggugaagaccccccugaagcuggccaacggcaccaaguacagaccccccgccaagcugcugaaggagagaggcuucuucggcgccaucgccggcuuccuggagggcggcugggagggcaugaucgccggcuggcacggcuacaccagccacggcgcccacggcguggccguggccgccgaccugaagagcacccaggaggccaucaacaagaucaccaagaaccugaacagccugagcgagcuggaggugaagaaccugcagagacugagcggcgccauggacgagcugcacaacgagauccuggagcuggacgagaagguggacgaccugagagccgacaccaucagcagccagaucgagcuggccgugcugcugagcaacgagggcaucaucaacagcgaggacgagcaccugcuggcccuggagagaaagcugaagaagaugcugggccccagcgccguggacaucggcaacggcugcuucgagaccaagcacaagugcaaccagaccugccuggacagaaucgccgccggcaccuucaacgccggcgaguucagccugcccaccuucgacagccugaacaucaccgccgccagccugaacgacgacggccuggacaaccacaccauccugcuguacuacagcaccgccgccagcagccuggccgugacccugaugcuggccaucuucaucguguacauggugagcagagacaacgugagcugcagcaucugccuguga

SEQ ID NO: 187587 - RNA, 1755 nt, Artificial Sequence
  derived and/or modified CDS sequence (opt4) from hemagglutinin__InfluenzaB__AGX21809
augaaggccaucaucgugcugcugaugguggugaccagcaacgccgacagaaucugcaccggcaucaccagcagcaacagcccccacguggugaagaccgccacccagggcgaggugaacgugaccggcgugaucccccugaccaccacccccaccaagagcuacuucgccaaccugaagggcaccagaaccagaggcaagcugugccccgacugccugaacugcaccgaccuggacguggcccugggcagacccaugugcgugggcaccacccccagcgccaaggccagcauccugcacgaggugagacccgugaccagcggcugcuuccccaucaugcacgacagaaccaagaucagacagcugcccaaccugcugagaggcuacgagaacaucagacugagcacccagaacgugaucgacgccgagaaggcccccggcggccccuacagacugggcaccagcggcagcugccccaacgccaccagcaagagcggcuucuucgccaccauggccugggccgugcccaaggacaacaacaagaacgccaccaacccccugaccguggaggugcccuacgugugcaccgagggcgaggaccagaucaccguguggggcuuccacagcgacaacaagacccagaugaagaaccuguacggcgacagcaacccccagaaguucaccagcagcgccaacggcgugaccacccacuacgugagccagaucggcggcuuccccgaccagaccgaggacggcggccugccccagagcggcagaaucgugguggacuacauggugcagaagcccggcaagaccggcaccaucguguaccagagaggcgugcugcugccccagaagguguggugcgccagcggcagaagcaaggugaucaagggcagccugccccugaucggcgaggccgacugccugcacgagaaguacggcggccugaacaagagcagacccuacuacaccggcgagcacgccaaggccaucggcaacugccccaucugggugaagaccccccugaagcuggccaacggcaccaaguacagaccccccgccaagcugcugaaggagagaggcuucuucggcgccaucgccggcuuccuggagggcggcugggagggcaugaucgccggcuggcacggcuacaccagccacggcgcccacggcguggccguggccgccgaccugaagagcacccaggaggccaucaacaagaucaccaagaaccugaacagccugagcgagcuggaggugaagaaccugcagagacugagcggcgccauggacgagcugcacaacgagauccuggagcuggacgagaagguggacgaccugagagccgacaccaucagcagccagaucgagcuggccgugcugcugagcaacgagggcaucaucaacagcgaggacgagcaccugcuggcccuggagagaaagcugaagaagaugcugggccccagcgccguggacaucggcaacggcugcuucgagaccaagcacaagugcaaccagaccugccuggacagaaucgccgccggcaccuucaacgccggcgaguucagccugcccaccuucgacagccugaacaucaccgccgccagccugaacgacgacggccuggacaaccacaccauccugcuguacuacagcaccgccgccagcagccuggccgugacccugaugcuggccaucuucaucguguacauggugagcagagacaacgugagcugcagcaucugccuguga

SEQ ID NO: 187588 - RNA, 1755 nt, Artificial Sequence
  derived and/or modified CDS sequence (opt4) from hemagglutinin__InfluenzaB__AGX21820
augaaggccaucaucgugcugcugaugguggugaccagcaacgccgacagaaucugcaccggcaucaccagcagcaacagcccccacguggugaagaccgccacccagggcgaggugaacgugaccggcgugaucccccugaccaccacccccaccaagagcuacuucgccaaccugaagggcaccagaaccagaggcaagcugugccccgacugccugaacugcaccgaccuggacguggcccugggcagacccaugugcgugggcaccacccccagcgccaaggccagcauccugcacgaggugagacccgugaccagcggcugcuuccccaucaugcacgacagaaccaagaucagacagcugcccaaccugcugagaggcuacgagaacaucagacugagcacccagaacgugaucgacgccgagaaggcccccggcggccccuacagacugggcaccagcggcagcugccccaacgccaccaacaagagcggcuucuucgccaccauggccugggccgugcccaaggacaacaacaagaacgccaccaacccccugaccguggaggugcccuacaucugcaccgagggcgaggaccagaucaccguguggggcuuccacagcgacaacaagacccagaugaagaaccuguacggcgacagcaacccccagaaguucaccagcagcgccaacggcgugaccacccacuacgugagccagaucggcggcuuccccgaccagaccgaggacggcggccugccccagagcggcagaaucgugguggacuacaugaugcagaagcccggcaagaccggcaccaucguguaccagagaggcgugcugcugccccagaagguguggugcgccagcggcagaagcaaggugaucaagggcagccugccccugaucggcgaggccgacugccugcacgagaaguacggcggccugaacaagagcaagcccuacuacaccggcgagcacgccaaggccaucggcaacugccccaucugggugaagaccccccugaagcuggccaacggcaccaaguacagaccccccgccaagcugcugaaggagagaggcuucuucggcgccaucgccggcuuccuggagggcggcugggagggcaugaucgccggcuggcacggcuacaccagccacggcgcccacggcguggccguggccgccgaccugaagagcacccaggaggccaucaacaagaucaccaagaaccugaacagccugagcgagcuggaggugaagaaccugcagagacugagcggcgccauggacgagcugcacaacgagauccuggagcuggacgagaagguggacgaccugagagccgacaccaucagcagccagaucgagcuggccgugcugcugagcaacgagggcaucaucaacagcgaggacgagcaccugcuggcccuggagagaaagcugaagaagaugcugggccccagcgccguggacaucggcaacggcugcuucgagaccaagcacaagugcaaccagaccugccuggacagaaucgccgccggcaccuucaacgccggcgaguucagccugcccaccuucgacagccugaacaucaccgccgccagccugaacgacgacggccuggacaaccacaccauccugcuguacuacagcaccgccgccagcagccuggccgugacccugaugcuggccaucuucaucguguacauggugagcagagacaacgugagcugcagcaucugccuguga

SEQ ID NO: 187589 - RNA, 1755 nt, Artificial Sequence; identical to SEQ ID NO: 187083
  derived and/or modified CDS sequence (opt4) from hemagglutinin__InfluenzaB__AGX21831

SEQ ID NO: 187590 - RNA, 1755 nt, Artificial Sequence; identical to SEQ ID NO: 187086
  derived and/or modified CDS sequence (opt4) from hemagglutinin__InfluenzaB__AGX21842

SEQ ID NO: 187591 - RNA, 1755 nt, Artificial Sequence; identical to SEQ ID NO: 187086
  derived and/or modified CDS sequence (opt4) from hemagglutinin__InfluenzaB__AGX21853

SEQ ID NO: 187592 - RNA, 1755 nt, Artificial Sequence
  derived and/or modified CDS sequence (opt4) from hemagglutinin__InfluenzaB__AGX21864
augaaggccaucaucgugcugcugaugguggugaccagcaacgccgacagaaucugcaccggcaucaccagcagcaacagcccccacguggugaagaccgccacccagggcgaggugaacgugaccggcgugaucccccugaccaccacccccaccaagagcuacuucgccaaccugaagggcaccagaaccagaggcaagcugugccccgacugccugaacugcaccgaccuggacguggcccugggcagacccaugugcgugggcaccacccccagcgccaaggccagcauccugcacgaggugagacccgugaccagcggcugcuuccccaucaugcacgacagaaccaagaucagacagcugcccaaccugcugagaggcuacgagaacaucagacugagcaaccagaacgugaucgacgccgagaaggcccccggcggccccuacagacugggcaccagcggcagcugccccaacgccaccagcaagagcggcuucuucgccaccauggccugggccgugcccaaggacaacaacaagaacgccaccaacccccugaccguggaggugcccuacaucugcaccgagggcgaggaccagaucaccguguggggcuuccacagcgacaacaagacccagaugaagaaccuguacggcgacagcaacccccagaaguucaccagcagcgccaacggcgugaccacccacuacgugagccagaucggcggcuuccccgaccagaccgaggacggcggccugccccagagcggcagaaucgugguggacuacaugaugcagaagcccggcaagaccggcaccaucguguaccagagaggcgugcugcugccccagaagguguggugcgccagcggcagaagcaaggugaucaagggcagccugccccugaucggcgaggccgacugccugcacgagaaguacggcggccugaacaagagcaagcccuacuacaccggcgagcacgccaaggccaucggcaacugccccaucugggugaagaccccccugaagcuggccaacggcaccaaguacagaccccccgccaagcugcugaaggagagaggcuucuucggcgccaucgccggcuuccuggagggcggcugggagggcaugaucgccggcuggcacggcuacaccagccacggcgcccacggcguggccguggccgccgaccugaagagcacccaggaggccaucaacaagaucaccaagaaccugaacagccugagcgagcuggaggugaagaaccugcagagacugagcggcgccauggacgagcugcacaacgagauccuggagcuggacgagaagguggacgaccugagagccgacaccaucagcagccagaucgagcuggccgugcugcugagcaacgagggcaucaucaacagcgaggacgagcaccugcuggcccuggagagaaagcugaagaagaugcugggccccagcgccguggacaucggcaacggcugcuucgagaccaagcacaagugcaaccagaccugccuggacagaaucgccgccggcaccuucaacgccggcgaguucagccugcccaccuucgacagccugaacaucaccgccgccagccugaacgacgacggccuggacaaccacaccauccugcuguacuacagcaccgccgccagcagccuggccgugacccugaugcuggccaucuucaucguguacauggugagcagagacaacgugagcugcagcaucugccuguga

SEQ ID NO: 187593 - RNA, 1755 nt, Artificial Sequence; identical to SEQ ID NO: 187084
  derived and/or modified CDS sequence (opt4) from hemagglutinin__InfluenzaB__AGX21875

SEQ ID NO: 187594 - RNA, 1755 nt, Artificial Sequence; identical to SEQ ID NO: 187083
  derived and/or modified CDS sequence (opt4) from hemagglutinin__InfluenzaB__AGX21886

SEQ ID NO: 187595 - RNA, 1755 nt, Artificial Sequence; identical to SEQ ID NO: 187083
  derived and/or modified CDS sequence (opt4) from hemagglutinin__InfluenzaB__AGX21897

SEQ ID NO: 187596 - RNA, 1755 nt, Artificial Sequence; identical to SEQ ID NO: 187083
  derived and/or modified CDS sequence (opt4) from hemagglutinin__InfluenzaB__AGX21908

SEQ ID NO: 187597 - RNA, 1755 nt, Artificial Sequence
  derived and/or modified CDS sequence (opt4) from hemagglutinin__InfluenzaB__AGX21919
augaaggccaucaucgugcugcugaugguggugaccagcaacgccgacagaaucugcaccggcaucaccagcagcaacagcccccacguggugaagaccgccacccagggcgaggugaacgugaccggcgugaucccccugaccaccacccccaccaagagcuacuucgccaaccugaagggcaccagaaccagaggcaagcugugccccgacugccugaacugcaccgaccuggacguggcccugggcagacccaugugcgugggcaccacccccagcgccaaggccagcauccugcacgaggugagacccgugaccagcggcugcuuccccaucaugcacgacagaaccaagaucagacagcugcccaaccugcugagaggcuacgagaacaucagacugagcacccagaacgugaucgacgccgagaaggcccccggcggccccuacagacugggcaccagcggcagcugccccaacgccaccagcaagagcggcuucuucgccaccauggccugggccgugcccaaggacaacaacaagaacgccaccaacccccugaccguggaggugcccuacaucugcaccgagggcgaggaccagaucaccguguggggcuuccacagcgacaacaagacccagaugaagaaccuguacggcgacagcaacccccagaaguucaccagcagcgccaacggcgugaccacccacuacgugagccagaucggcggcuuccccgaccagaccgaggacggcggccugccccagagcggcagaaucgugguggacuacaugaugcagaagcccggcaaggccggcaccaucguguaccagagaggcgugcugcugccccagaagguguggugcgccagcggcagaagcaaggugaucaagggcagccugccccugaucggcgaggccgacugccugcacgagaaguacggcggccugaacaagagcaagcccuacuacaccggcgagcacgccaaggccaucggcaacugccccaucugggugaagaccccccugaagcuggccaacggcaccaaguacagaccccccgccaagcugcugaaggagagaggcuucuucggcgccaucgccggcuuccuggagggcggcugggagggcaugaucgccggcuggcacggcuacaccagccacggcgcccacggcguggccguggccgccgaccugaagagcacccaggaggccaucaacaagaucaccaagaaccugaacagccugagcgagcuggaggugaagaaccugcagagacugagcggcgccauggacgagcugcacaacgagauccuggagcuggacgagaagguggacgaccugagagccgacaccaucagcagccagaucgagcuggccgugcugcugagcaacgagggcaucaucaacagcgaggacgagcaccugcuggcccuggagagaaagcugaagaagaugcugggccccagcgccguggacaucggcaacggcugcuucgagaccaagcacaagugcaaccagaccugccuggacagaaucgccgccggcaccuucaacgccggcgaguucagccugcccaccuucgacagccugaacaucaccgccgccagccugaacgacgacggccuggacaaccacaccauccugcuguacuacagcaccgccgccagcagccuggccgugacccugaugcuggccaucuucaucguguacauggugagcagagacaacgugagcugcagcaucugccuguga

SEQ ID NO: 187598 - RNA, 1755 nt, Artificial Sequence; identical to SEQ ID NO: 187086
  derived and/or modified CDS sequence (opt4) from hemagglutinin__InfluenzaB__AGX21941

SEQ ID NO: 187599 - RNA, 1755 nt, Artificial Sequence; identical to SEQ ID NO: 187083
  derived and/or modified CDS sequence (opt4) from hemagglutinin__InfluenzaB__AGX21952

SEQ ID NO: 187600 - RNA, 1755 nt, Artificial Sequence; identical to SEQ ID NO: 187086
  derived and/or modified CDS sequence (opt4) from hemagglutinin__InfluenzaB__AGX21963

SEQ ID NO: 187601 - RNA, 1755 nt, Artificial Sequence
  derived and/or modified CDS sequence (opt4) from hemagglutinin__InfluenzaB__AGX21974
augaaggccaucaucgugcugcugaugguggugaccagcaacgccgacagaaucugcaccggcaucaccagcagcaacagcccccacguggugaagaccgccacccagggcgaggugaacgugaccggcgugaucccccugaccaccacccccaccaagagcuacuucgccaaccugaagggcaccagaaccagaggcaagcugugccccgacugccugaacugcaccgaccuggacguggcccugggcagacccaugugcgugggcaccacccccagcgccaaggccagcauccugcacgaggugagacccgugaccagcggcugcuuccccaucaugcacgacagaaccaagaucagacagcugcccaaccugcugagaggcuacgagaacaucagacugagcacccagaacgugaucgacgccgagaaggcccccggcggccccuacagacugggcaccagcggcagcugccccaacgccaccagcaagagcggcuucuucgccaccauggccugggccgugcccaaggugaacaacaagaacgccaccaacccccugaccguggaggugcccuacaucugcaccgagggcgaggaccagaucaccguguggggcuuccacagcgacaacaagacccagaugaagaaccuguacggcgacagcaacccccagaaguucaccagcagcgccaacggcgugaccacccacuacgugagccagaucggcagcuuccccgaccagaccgaggacggcggccugccccagagcggcagaaucgugguggacuacaugaugcagaagcccggcaagaccggcaccaucguguaccagagaggcgugcugcugccccagaagguguggugcgccagcggcagaagcaaggugaucaagggcagccugccccugaucggcgaggccgacugccugcacgagaaguacggcggccugaacaagagcaagcccuacuacaccggcgagcacgccaaggccaucggcaacugccccaucugggugaagaccccccugaagcuggccaacggcaccaaguacagaccccccgccaagcugcugaaggagagaggcuucuucggcgccaucgccggcuuccuggagggcggcugggagggcaugaucgccggcuggcacggcuacaccagccacggcgcccacggcguggccguggccgccgaccugaagagcacccaggaggccaucaacaagaucaccaagaaccugaacagccugagcgagcuggaggugaagaaccugcagagacugagcggcgccauggacgagcugcacaacgagauccuggagcuggacgagaagguggacgaccugagagccgacaccaucagcagccagaucgagcuggccgugcugcugagcaacgagggcaucaucaacagcgaggacgagcaccugcuggcccuggagagaaagcugaagaagaugcugggccccagcgccguggacaucggcaacggcugcuucgagaccaagcacaagugcaaccagaccugccuggacagaaucgccgccggcaccuucaacgccggcgaguucagccugcccaccuucgacagccugaacaucaccgccgccagccugaacgacgacggccuggacaaccacaccauccugcuguacuacagcaccgccgccagcagccuggccgugacccugaugcuggccaucuucaucguguacaugaucagcagagacaacgugagcugcagcaucugccuguga

SEQ ID NO: 187602 - RNA, 1755 nt, Artificial Sequence; identical to SEQ ID NO: 187086
  derived and/or modified CDS sequence (opt4) from hemagglutinin__InfluenzaB__AGX21985

SEQ ID NO: 187603 - RNA, 1755 nt, Artificial Sequence; identical to SEQ ID NO: 187084
  derived and/or modified CDS sequence (opt4) from hemagglutinin__InfluenzaB__AGX21996

SEQ ID NO: 187604 - RNA, 1755 nt, Artificial Sequence; identical to SEQ ID NO: 187084
  derived and/or modified CDS sequence (opt4) from hemagglutinin__InfluenzaB__AGX22007

SEQ ID NO: 187605 - RNA, 1755 nt, Artificial Sequence; identical to SEQ ID NO: 187083
  derived and/or modified CDS sequence (opt4) from hemagglutinin__InfluenzaB__AGX22018

SEQ ID NO: 187606 - RNA, 1755 nt, Artificial Sequence; identical to SEQ ID NO: 187083
  derived and/or modified CDS sequence (opt4) from hemagglutinin__InfluenzaB__AGX22029

SEQ ID NO: 187607 - RNA, 1755 nt, Artificial Sequence; identical to SEQ ID NO: 187083
  derived and/or modified CDS sequence (opt4) from hemagglutinin__InfluenzaB__AGX22040

SEQ ID NO: 187608 - RNA, 1755 nt, Artificial Sequence
  derived and/or modified CDS sequence (opt4) from hemagglutinin__InfluenzaB__AGX22051
augaaggccaucaucgugcugcugaugguggugaccagcaacgccgacagaaucugcaccggcaucaccagcagcaacagcccccacguggugaagaccgccacccagggcgaggugaacgugaccggcgugaucccccugaccaccacccccaccaagagcuacuucgccaaccugaagggcaccagaaccagaggcaagcugugccccgacugccugaacugcaccgaccuggacguggcccugggcagacccaugugcgugggcaccacccccagcgccaaggccagcauccugcacgaggugagacccgugaccagcggcugcuuccccaucaugcacgacagaaccaagaucagacagcugcccaaccugcugagaggcuacgagaacaucagacugagcacccagaacgugaucgacgccgagaaggcccccggcggccccuacagacugggcaccagcggcagcugccccaacgccaccagcaagagcggcuucuucgccaccauggccugggccgugcccaaggacaacaacaagaacgccaccaacccccugaccguggaggugcccuacaucugcaccgagggcgaggaccagaucaccguguggggcuuccacagcgacaacaagacccagaugaagaaccuguacggcgacagcaacccccagaaguucaccagcagcgccaacggcgugaccacccacuacgugagccagaucggcggcuuccccgaccagaucgaggacggcggccugccccagagcggcagaaucgugguggacuacaugaugcagaagcccggcaagaccggcaccaucguguaccagagaggcgugcugcugccccagaagguguggugcgccagcggcagaagcaaggugaucaagggcagccugccccugaucggcgaggccgacugccugcacgagaaguacggcggccugaacaagagcaagcccuacuacaccggcgagcacgccaaggccaucggcaacugccccaucugggugaagaccccccugaagcuggccaacggcaccaaguacagaccccccgccaagcugcugaaggagagaggcuucuucggcgccaucgccggcuuccuggagggcggcugggagggcaugaucgccggcuggcacggcuacaccagccacggcgcccacggcguggccguggccgccgaccugaagagcacccaggaggccaucaacaagaucaccaagaaccugaacagccugagcgagcuggaggugaagaaccugcagagacugagcggcgccauggacgcccugcacaacgagauccuggagcuggacgagaagguggacgaccugagagccgacaccaucagcagccagaucgagcuggccgugcugcugagcaacgagggcaucaucaacagcgaggacgagcaccugcuggcccuggagagaaagcugaagaagaugcugggccccagcgccguggagaucggcaacggcugcuucgagaccaagcacaagugcaaccagaccugccuggacagaaucgccgccggcaccuucaacgccggcgaguucagccugcccaccuucgacagccugaacaucaccgccgccagccugaacgacgacggccuggacaaccacaccauccugcuguacuacagcaccgccgccagcagccuggccgugacccugaugcuggccaucuucaucguguacauggugagcagagacaacgugagcugcagcaucugccuguga

SEQ ID NO: 187609 - RNA, 1755 nt, Artificial Sequence; identical to SEQ ID NO: 187083
  derived and/or modified CDS sequence (opt4) from hemagglutinin__InfluenzaB__AGX22062

SEQ ID NO: 187610 - RNA, 1755 nt, Artificial Sequence
  derived and/or modified CDS sequence (opt4) from hemagglutinin__InfluenzaB__AGX22073
augaaggccaucaucgugcugcugaugguggugaccagcaacgccgacagaaucugcaccggcaucaccagcagcaacagcccccacguggugaagaccgccacccagggcgaggugaacgugaccggcgugaucccccugaccaccacccccaccaagagcuacuucgccaaccugaagggcaccagaaccagaggcaagcugugccccgacugccugaacugcaccgaccuggacguggcccugggcagacccaugugcgugggcaccacccccagcgccaaggccagcauccugcacgaggugagacccgugaccagcggcugcuuccccaucaugcacgacagaaccaagaucagacagcugcccaaccugcugagaggcuacgagaacaucagacugagcacccagaacgugaucgacgccgagaaggcccccggcggccccuacagacugggcaccagcggcagcugccccaacgccaccagcaagagcggcuucuucgccaccauggccugggccgugcccaaggacaacaacaagaacgccaccaacccccugaccguggaggugcccuacaucugcaccgagggcgaggaccagaucaccguguggggcuuccacagcgacaacaagacccagaugaagaaccuguacggcgacagcaacccccagaaguucaccagcagcgccaacggcgugaccacccacuacgugagccagaucggcggcuuccccgaccagaccgaggacggcggccugccccagagcggcagaaucgugguggacuacaugaugcagaagcccggcaagaccggcaccaucguguaccagagaggcgugcugcugccccagaagguguggugcgccagcggcagaagcaaggugaucaagggcagccugccccugaucggcgaggccgacugccugcacgagaaguacggcggccugaacaagagcaagcccuacuacaccggcgagcacgccaaggccaucggcaacugccccaucugggugaagaccccccugaagcuggccaacggcaccaaguacagaccccccgccaagcugcugaaggagagaggcuucuucggcgccaucgccggcuucaucgagggcggcugggagggcaugaucgccggcuggcacggcuacaccagccacggcgcccacggcguggccguggccgccgaccugaagagcacccaggaggccaucaacaagaucaccaagaaccugaacagccugagcgagcuggaggugaagaaccugcagagacugagcggcgccauggacgagcugcacaacgagauccuggagcuggacgagaagguggacgaccugagagccgacaccaucagcagccagaucgagcuggccgugcugcugagcaacgagggcaucaucaacagcgaggacgagcaccugcuggcccuggagagaaagcugaagaagaugcugggccccagcgccguggacaucggcaacggcugcuucgagaccaagcacaagugcaaccagaccugccuggacagaaucgccgccggcaccuucaacgccggcgacuucagccugcccaccuucgacagccugaacaucaccgccgccagccugaacgacgacggccuggacaaccacaccauccugcuguacuacagcaccgccgccagcagccuggccgugacccugaugcuggccaucuucaucguguacauggugagcagagacaacgugagcugcagcaucugccuguga

SEQ ID NO: 187611 - RNA, 1755 nt, Artificial Sequence; identical to SEQ ID NO: 187086
  derived and/or modified CDS sequence (opt4) from hemagglutinin__InfluenzaB__AGX22095

SEQ ID NO: 187612 - RNA, 1755 nt, Artificial Sequence; identical to SEQ ID NO: 187084
  derived and/or modified CDS sequence (opt4) from hemagglutinin__InfluenzaB__AGX22106

SEQ ID NO: 187613 - RNA, 1755 nt, Artificial Sequence
  derived and/or modified CDS sequence (opt4) from hemagglutinin__InfluenzaB__AGX22128
augaaggccaucaucgugcugcugaugguggugaccagcaacgccgacagaaucugcaccggcaucaccagcagcaacagcccccacguggugaagaccgccacccagggcgaggugaacgugaccggcgugaucccccugaccaccacccccaccaagagcuacuucgccaaccugaagggcaccagaaccagaggcaagcugugccccgacugccugaacugcaccgaccuggacguggcccugggcagacccaugugcgugggcaccacccccagcgccaaggccagcauccugcacgaggugagacccgugaccagcggcugcuuccccaucaugcacgacagaaccaagaucagacagcugcccaaccugcugagaggcuacgagaacaucagacugagcacccagaacgugaucgacgccgagaacgcccccggcggccccuacagacugggcaccagcggcagcugccccaacgccaccagcaagagcggcuucuucgccaccauggccugggccgugcccaaggacaacaacaagaacgccaccaacccccugaccguggaggugcccuacgugugcaccgagggcgaggaccagaucaccguguggggcuuccacagcgacaacaagacccagaugaagaaccuguacggcgacagcaacccccagaaguucaccagcagcgccaacggcgugaccacccacuacgugagccagaucggcggcuuccccgcccagaccgaggacggcggccugccccagagcggcagaaucgugguggacuacauggugcagaagcccagaaagaccggcaccaucguguaccagagaggcgugcugcugccccagaagguguggugcgccagcggcagaagcaaggugaucaagggcagccugccccugaucggcgaggccgacugccugcacgagaaguacggcggccugaacaagagcaagcccuacuacaccggcgagcacgccaaggccaucggcaacugccccaucugggugaagaccccccugaagcuggccaacggcaccaaguacagaccccccgccaagcugcugaaggagagaggcuucuucggcgccaucgccggcuuccuggagggcggcugggagggcaugaucgccggcuggcacggcuacaccagccacggcgcccacggcguggccguggccgccgaccugaagagcacccaggaggccaucaacaagaucaccaagaaccugaacagccugagcgagcuggagaucaagaaccugcagagacugagcggcgccaugaacgagcugcacaacgagauccuggagcuggacgagaagguggacgaccugagagccgacaccaucagcagccagaucgagcuggccgugcugcugagcaacgagggcaucaucaacagcgaggacgagcaccugcuggcccuggagagaaagcugaagaagaugcugggccccagcgccguggacaucggcaacggcugcuucgagaccaagcacaagugcaaccagaccugccuggacagaaucgccgccggcaccuucaacgccggcgaguucagccugcccaccuucgacagccugaacaucaccgccgccagccugaacgacgacggccuggacaaccacaccauccugcuguacuacagcaccgccgccagcagccuggccgugacccugaugcuggccaucuucaucguguacauggugagcagagacaacgugagcugcagcaucugccuguga

SEQ ID NO: 187614 - RNA, 1755 nt, Artificial Sequence
  derived and/or modified CDS sequence (opt4) from hemagglutinin__InfluenzaB__AGX22139
augaaggccaucaucgugcugcugaugguggugaccagcaacgccgacagaaucugcaccggcaucaccagcagcaacagcccccacguggugaagaccgccacccagggcgaggugaacgugaccggcgugaucccccugaccaccacccccaccaagagcuacuucgccaaccugaagggcaccagaaccagaggcaagcugugccccgacugccugaacugcaccgaccuggacguggcccugggcagacccaugugcgugggcaccacccccagcgccgaggccagcauccugcacgaggugagacccgugaccagcggcugcuuccccaucaugcacgacagaaccaagaucagacagcugcccaaccugcugagaggcuacgagaacaucagacugagcacccagaacgugaucgacgccgagaaggcccccggcggccccuacagacugggcaccagcggcagcugccccaacgccaccagcaagagcggcuucuucgccaccauggccugggccgugcccaaggacaacaacaagaacgccaccaacccccugaccguggaggugcccuacaucugcaccgagggcgaggaccagaucaccguguggggcuuccacagcgacaacaagacccagaugaagaaccuguacggcgacagcaacccccagaaguucaccagcagcgccaacggcgugaccacccacuacgugagccagaucggcggcuuccccgaccagaccgaggacggcggccugccccagagcggcagaaucgugguggacuacaugaugcagaagcccggcaagaccggcaccaucguguaccagagaggcgugcugcugccccagaagguguggugcgccagcggcagaagcaaggugaucaagggcagccugccccugaucggcgaggccgacugccugcacgagaaguacggcggccugaacaagagcaagcccuacuacaccggcgagcacgccaaggccaucggcaacugccccaucugggugaagaccccccugaagcuggccaacggcaccaaguacagaccccccgccaagcugcugaaggagagaggcuucuucggcgccaucgccggcuuccuggagggcggcugggagggcaugaucgccggcuggcacggcuacaccagccacggcgcccacggcguggccguggccgccgaccugaagagcacccaggaggccaucaacaagaucaccaagaaccugaacagccugagcgagcuggaggugaagaaccugcagagacugagcggcgccauggacgagcugcacaacgagauccuggagcuggacgagaagguggacgaccugagagccgacaccaucagcagccagaucgagcuggccgugcugcugagcaacgagggcaucaucaacagcgaggacgagcaccugcuggcccuggagagaaagcugaagaagaugcugggccccagcgccguggacaucggcaacggcugcuucgagaccaagcacaagugcaaccagaccugccuggacagaaucgccgccggcaccuucaacgccggcgaguucagccugcccaccuucgacagccugaacaucaccgccgccagccugaacgacgacggccuggacaaccacaccauccugcuguacuacagcaccgccgccagcagccuggccgugacccugaugcuggccaucuucaucguguacauggugagcagagacaacgugagcugcagcaucugccuguga

SEQ ID NO: 187615 - RNA, 1755 nt, Artificial Sequence; identical to SEQ ID NO: 187614
  derived and/or modified CDS sequence (opt4) from hemagglutinin__InfluenzaB__AGX22150

SEQ ID NO: 187616 - RNA, 1755 nt, Artificial Sequence; identical to SEQ ID NO: 187614
  derived and/or modified CDS sequence (opt4) from hemagglutinin__InfluenzaB__AGX22161

SEQ ID NO: 187617 - RNA, 1755 nt, Artificial Sequence; identical to SEQ ID NO: 187083
  derived and/or modified CDS sequence (opt4) from hemagglutinin__InfluenzaB__AGX22172

SEQ ID NO: 187618 - RNA, 1755 nt, Artificial Sequence; identical to SEQ ID NO: 187614
  derived and/or modified CDS sequence (opt4) from hemagglutinin__InfluenzaB__AGX22183

SEQ ID NO: 187619 - RNA, 1755 nt, Artificial Sequence; identical to SEQ ID NO: 187614
  derived and/or modified CDS sequence (opt4) from hemagglutinin__InfluenzaB__AGX22194

SEQ ID NO: 187620 - RNA, 1755 nt, Artificial Sequence; identical to SEQ ID NO: 187614
  derived and/or modified CDS sequence (opt4) from hemagglutinin__InfluenzaB__AGX22205

SEQ ID NO: 187621 - RNA, 1755 nt, Artificial Sequence; identical to SEQ ID NO: 187084
  derived and/or modified CDS sequence (opt4) from hemagglutinin__InfluenzaB__AGX22216

SEQ ID NO: 187622 - RNA, 1755 nt, Artificial Sequence; identical to SEQ ID NO: 187086
  derived and/or modified CDS sequence (opt4) from hemagglutinin__InfluenzaB__AGX22227

SEQ ID NO: 187623 - RNA, 1755 nt, Artificial Sequence
  derived and/or modified CDS sequence (opt4) from hemagglutinin__InfluenzaB__AGX22238
augaaggccaucaucgugcugcugaugguggugaccagcaacgccgacagaaucugcaccggcaucaccagcagcaacagcccccacauggugaagaccgccacccagggcgaggugaacgugaccggcgugaucccccugaccaccacccccaccaagagcuacuucgccaaccugaagggcaccagaaccagaggcaagcugugccccgacugccugaacugcaccgaccuggacguggcccugggcagacccaugugcgugggcaccacccccagcgccaaggccagcauccugcacgaggugagacccgugaccagcggcugcuuccccaucaugcacgacagaaccaagaucagacagcugcccaaccugcugagaggcuacgagaacaucagacugagcacccagaacgugaucgacgccgagaaggcccccggcggccccuacagacugggcaccagcggcagcugccccaacgccaccagcaagagcggcuucuucgccaccauggccugggccgugcccaaggacaacaacaagaacgccaccaacccccugaccguggaggugcccuacaucugcaccgagggcgaggaccagaucaccguguggggcuuccacagcgacaacaagacccagaugaagaaccuguacggcgacagcaacccccagaaguucaccagcagcgccaacggcgugaccacccacuacgugagccagaucggcggcuuccccgaccagaccgaggacggcggccugccccagagcggcagaaucgugguggacuacaugaugcagaagcccggcaagaccggcaccaucguguaccagagaggcgugcugcugccccagaagguguggugcgccagcggcagaagcaaggugaucaagggcagccugccccugaucggcgaggccgacugccugcacgagaaguacggcggccugaacaagagcaagcccuacuacaccggcgagcacgccaaggccaucggcaacugccccaucugggugaagaccccccugaagcuggccaacggcaccaaguacagaccccccgccaagcugcugaaggagagaggcuucuucggcgccaucgccggcuuccuggagggcggcugggagggcaugaucgccggcuggcacggcuacaccagccacggcgcccacggcguggccguggccgccgaccugaagagcacccaggaggccaucaacaagaucaccaagaaccugaacagccugagcgagcuggaggugaagaaccugcagagacugagcggcgccauggacgagcugcacaacgagauccuggagcuggacgagaagguggacgaccugagagccgacaccaucagcagccagaucgagcuggccgugcugcugagcaacgagggcaucaucaacagcgaggacgagcaccugcuggcccuggagagaaagcugaagaagaugcugggccccagcgccguggacaucggcaacggcugcuucgagaccaagcacaagugcaaccagaccugccuggacagaaucgccgccggcaccuucaacgccggcgaguucagccugcccaccuucgacagccugaacaucaccgccgccagccugaacgacgacggccuggacaaccacaccauccugcuguacuacagcaccgccgccagcagccuggccgugacccugaugcuggccaucuucaucguguacauggugagcagagacaacgugagcugcagcaucugccuguga

SEQ ID NO: 187624 - RNA, 1755 nt, Artificial Sequence; identical to SEQ ID NO: 187084
  derived and/or modified CDS sequence (opt4) from hemagglutinin__InfluenzaB__AGX22249

SEQ ID NO: 187625 - RNA, 1755 nt, Artificial Sequence; identical to SEQ ID NO: 187083
  derived and/or modified CDS sequence (opt4) from hemagglutinin__InfluenzaB__AGX22260

SEQ ID NO: 187626 - RNA, 1755 nt, Artificial Sequence
  derived and/or modified CDS sequence (opt4) from hemagglutinin__InfluenzaB__AGX22271
augaaggccaucaucgugcugcugaugguggugaccagcaacgccgacagaaucugcaccggcaucaccagcagcaacagcccccacguggugaagaccgccacccagggcgaggugaacgugaccggcgugaucccccugaccaccacccccaccaagagcuacuucgccaaccugaagggcaccagaaccagaggcaagcugugccccgacugccugaacugcaccgaccuggacguggcccugggcagacccaugugcgugggcaccacccccagcgccaaggccagcauccugcacgaggugagacccgugaccagcggcugcuuccccaucaugcacgacagaaccaagaucagacagcugcccaaccugcugagaggcuacgagaacaucagacugagcacccagaacgugaucgacgccgagaaggcccccggcggccccuacagacugggcaccagcggcagcugccccaacgccaccagcaagagcggcuucuucgccaccauggccugggccgugcccaaggacaacaacaagaacgccaccaacccccugaccguggaggugcccuacaucugcaccgagggcgaggaccagaucaccguguggggcuuccacagcgacaacaagacccagaugaagaaccuguacggcgacagcaacccccagaaguucaccagcagcgccaacggcgugaccacccacuacgugagccagaucggcggcuuccccgaccagaccgaggacggcggccugccccagagcggcagaaucgugguggacuacaugaugcagaagcccggcaagaccggcaccaucguguaccagagaggcgugcugcugccccagaagguguggugcgccagcggcagaagcaaggugaucaagggcagccugccccugaucggcgaggccgacugccugcacgagaaguacggcggccugaacaagagcaagcccuacuacaccggcgagcacgccaaggccaucggcaacugccccaucugggugaagaccccccugaagcuggccaacggcaccaaguacagacccagcgccaagcugcugaaggagagaggcuucuucggcgccaucgccggcuuccuggagggcggcugggagggcaugaucgccggcuggcacggcuacaccagccacggcgcccacggcguggccguggccgccgaccugaagagcacccaggaggccaucaacaagaucaccaagaaccugaacagccugagcgagcuggaggugaagaaccugcagagacugagcggcgccauggacgagcugcacaacgagauccuggagcuggacgagaagguggacgaccugagagccgacaccaucagcagccagaucgagcuggccgugcugcugagcaacgagggcaucaucaacagcgaggacgagcaccugcuggcccuggagagaaagcugaagaagaugcugggccccagcgccguggagaucggcaacggcugcuucgagaccaagcacaagugcaaccagaccugccuggacagaaucgccgccggcaccuucaacgccggcgaguucagccugcccaccuucgacagccugaacaucaccgccgccagccugaacgacgacggccuggacaaccacaccauccugcuguacuacagcaccgccgccagcagccuggccgugacccugaugcuggccaucuucaucguguacauggugagcagagacaacgugagcugcagcaucugccuguga

SEQ ID NO: 187627 - RNA, 1755 nt, Artificial Sequence
  derived and/or modified CDS sequence (opt4) from hemagglutinin__InfluenzaB__AGX22282
augaaggccaucaucgugcugcugaugguggugaccagcaacgccgacagaaucugcaccggcaucaccagcagcaacagcccccacguggugaagaccgccacccagggcgaggugaacgugaccggcgugaucccccugaccaccacccccaccaagagcuacuucgccaaccugaagggcaccagaaccagaggcaagcugugccccgacugccugaacugcaccgaccuggacguggcccugggcagacccaugugcgugggcaccacccccagcgccaaggccagcauccugcacgaggugagacccgugaccagcggcugcuuccccaucaugcacgacagaaccaagaucagacagcugcccaaccugcugagaggcuacgagaacaucagacugagcacccagaacgugaucgacgccgagaaggcccccggcggccccuacagacugggcaccagcggcagcugccccaacgccaccagcaagagcggcuucuucgccaccauggccugggccgugcccaaggacaacaacaagaacgccaccaacccccugaccguggaggugcccuacaucugcaccgagggcgaggaccagaucaccguguggggcuuccacagcgacaacaagacccagaugaagaaccuguacggcgacagcaacccccagaaguucaccagcagcgccaacggcgugaccacccacuacgugagccagaucggcgacuuccccgaccagaccgaggacggcggccugccccagagcggcagaaucgugguggacuacaugaugcagaagcccggcaagaccggcaccaucguguaccagagaggcgugcugcugccccagaagguguggugcgccagcggcagaagcaaggugaucaagggcagccugccccugaucggcgaggccgacugccugcacgagaaguacggcggccugaacaagagcaagcccuacuacaccggcgagcacgccaaggccaucggcaacugccccaucugggugaagaccccccugaagcuggccaacggcaccaaguacagaccccccgccaagcugcugaaggagagaggcuucuucggcgccaucgccggcuuccuggagggcggcugggagggcaugaucgccggcuggcacggcuacaccagccacggcgcccacggcguggccguggccgccgaccugaagagcacccaggaggccaucaacaagaucaccaagaaccugaacagccugagcgagcuggaggugaagaaccugcagagacugagcggcgccauggacgagcugcacaacgagauccuggagcuggacgagaagguggacgaccugagagccgacaccaucagcagccagaucgagcuggccgugcugcugagcaacgagggcaucaucaacagcgaggacgagcaccugcuggcccuggagagaaagcugaagaagaugcugggccccagcgccguggacaucggcaacggcugcuucgagaccaagcacaagugcaaccagaccugccuggacagaaucgccgccggcaccuucaacgccggcgaguucagccugcccaccuucgacagccugaacaucaccgccgccagccugaacgacgacggccuggacaaccacaccauccugcuguacuacagcaccgccgccagcagccuggccgugacccugaugcuggccaucuucaucguguacauggugagcagagacaacgugagcugcagcaucugccuguga

SEQ ID NO: 187628 - RNA, 1755 nt, Artificial Sequence; identical to SEQ ID NO: 187083
  derived and/or modified CDS sequence (opt4) from hemagglutinin__InfluenzaB__AGX22293

SEQ ID NO: 187629 - RNA, 1755 nt, Artificial Sequence
  derived and/or modified CDS sequence (opt4) from hemagglutinin__InfluenzaB__AGX22304
augaaggccaucaucgugcugcugaugguggugaccagcaacgccgacagaaucugcaccggcaucaccagcagcaacagcccccacguggugaagaccgccacccagggcgaggugaacgugaccggcgugaucccccugaccaccacccccaccaagagcuacuucgccaaccugaagggcaccagaaccagaggcaagcugugccccgacugccugaacugcaccgaccuggacguggcccugggcagacccaugugcgugggcaccacccccagcgccaaggccagcauccugcacgaggugagacccgugaccagcggcugcuuccccaucaugcacgacagaaccaagaucagacagcugcccaaccugcugagaggcuacgagaacaucagacugagcacccagaacgugaucgacgccgagaaggcccccggcggccccuacagacugggcaccagcggcagcugccccaacgccaccagcaagagcggcuucuucgccaccauggccugggccgugcccaaggacaacaacaagaacgccaccaacccccugaccguggaggugcccuacaucugcaccgagggcgaggaccagaucaccguguggggcuuccacagcgacaacaagacccagaugaagaaccuguacggcgacagcaacccccagaaguucaccagcagcaccaacggcgugaccacccacuacgugagccagaucggcggcuuccccgaccagaccgaggacggcggccugccccagagcggcagaaucgugguggacuacaugaugcagaagcccggcaagaccggcaccaucguguaccagagaggcgugcugcugccccagaagguguggugcgccagcggcagaagcaaggugaucaagggcagccugccccugaucggcgaggccgacugccugcacgagaaguacggcggccugaacaagagcaagcccuacuacaccggcgagcacgccaaggccaucggcaacugccccaucugggugaagaccccccugaagcuggccaacggcaccaaguacagaccccccgccaagcugcugaaggagagaggcuucuucggcgccaucgccggcuuccuggagggcggcugggagggcaugaucgccggcuggcacggcuacaccagccacggcgcccacggcguggccguggccgccgaccugaagagcacccaggaggccaucaacaagaucaccaagaaccugaacagccugagcgagcuggaggugaagaaccugcagagacugagcggcgccauggacgagcugcacaacgagauccuggagcuggacgagaagguggacgaccugagagccgacaccaucagcagccagaucgagcuggccgugcugcugagcaacgagggcaucaucaacagcgaggacgagcaccugcuggcccuggagagaaagcugaagaagaugcugggccccagcgccguggacaucggcaacggcugcuucgagaccaagcacaagugcaaccagaccugccuggacagaaucgccgccggcaccuucaacgccggcgaguucagccugcccaccuucgacagccugaacaucaccgccgccagccugaacgacgacggccuggacaaccacaccauccugcuguacuacagcaccgccgccagcagccuggccgugacccugaugcuggccaucuucaucguguacauggugagcagagacaacgugagcugcagcaucugccuguga

SEQ ID NO: 187630 - RNA, 1755 nt, Artificial Sequence; identical to SEQ ID NO: 187083
  derived and/or modified CDS sequence (opt4) from hemagglutinin__InfluenzaB__AGX22315

SEQ ID NO: 187631 - RNA, 1755 nt, Artificial Sequence; identical to SEQ ID NO: 186486
  derived and/or modified CDS sequence (opt4) from hemagglutinin__InfluenzaB__AGX22326

SEQ ID NO: 187632 - RNA, 1755 nt, Artificial Sequence; identical to SEQ ID NO: 187086
  derived and/or modified CDS sequence (opt4) from hemagglutinin__InfluenzaB__AGX22337

SEQ ID NO: 187633 - RNA, 1755 nt, Artificial Sequence; identical to SEQ ID NO: 187086
  derived and/or modified CDS sequence (opt4) from hemagglutinin__InfluenzaB__AGX22348

SEQ ID NO: 187634 - RNA, 1755 nt, Artificial Sequence
  derived and/or modified CDS sequence (opt4) from hemagglutinin__InfluenzaB__AGX22359
augaaggccaucaucgugcugcugaugguggugaccagcaacgccgacagaaucugcaccggcaucaccagcagcaacagcccccacguggugaagaccgccacccagggcgaggugaacgugaccggcgugaucccccugaccaccacccccaccaagagcuacuucgccaaccugaagggcaccagaaccagaggcaagcugugccccgacugccugaacugcaccgaccuggacguggcccugggcagacccaugugcgugggcaccacccccagcgccaaggccagcauccugcacgaggugagacccgugaccagcggcugcuuccccaucaugcacgacagaaccaagaucagacagcugcccaaccugcugagaggcuacgagaacaucagacugagcacccagaacgugaucgacgccgagaacgcccccggcggccccuacagacugggcaccagcggcagcugccccaacgccaccagcaagagcggcuucuucgccaccauggccugggccgugcccaaggacaacaacaagaacgccaccaacccccugaccguggaggugcccuacgugugcaccgagggcgaggaccagaucaccguguggggcuuccacagcgacaacaagacccagaugaagaaccuguacggcgacagcaacccccagaaguucaccagcagcgccaacggcgugaccacccacuacgugagccagaucggcggcuuccccgcccagaccgaggacggcggccugccccagagcggcagaaucgugguggacuacauggugcagaagcccaagaagaccggcaccaucguguaccagagaggcgugcugcugccccagaagguguggugcgccagcggcagaagcaaggugaucaagggcagccugccccugaucggcgaggccgacugccugcacgagaaguacggcggccugaacaagagcaagcccuacuacaccggcgagcacgccaaggccaucggcaacugccccaucugggugaagaccccccugaagcuggccaacggcaccaaguacagaccccccgccaagcugcugaaggagagaggcuucuucggcgccaucgccggcuuccuggagggcggcugggagggcaugaucgccggcuggcacggcuacaccagccacggcgcccacggcguggccguggccgccgaccugaagagcacccaggaggccaucaacaagaucaccaagaaccugaacagccugagcgagcuggagaucaagaaccugcagagacugagcggcgccauggacgagcugcacaacgagauccuggagcuggacgagaagguggacgaccugagagccgacaccaucagcagccagaucgagcuggccgugcugcugagcaacgagggcaucaucaacagcgaggacgagcaccugcuggcccuggagagaaagcugaagaagaugcugggccccagcgccguggacaucggcaacggcugcuucgagaccaagcacaagugcaaccagaccugccuggacagaaucgccgccggcaccuucaacgccggcgaguucagccugcccaccuucgacagccugaacaucaccgccgccagccugaacgacgacggccuggacaaccacaccauccugcuguacuacagcaccgccgccagcagccuggccgugacccugaugcuggccaucuucaucguguacauggugagcagagacaacgugagcugcagcaucugccuguga

SEQ ID NO: 187635 - RNA, 1755 nt, Artificial Sequence; identical to SEQ ID NO: 187084
  derived and/or modified CDS sequence (opt4) from hemagglutinin__InfluenzaB__AGX22370

SEQ ID NO: 187636 - RNA, 1755 nt, Artificial Sequence
  derived and/or modified CDS sequence (opt4) from hemagglutinin__InfluenzaB__AGX22381
augaaggccaucaucgugcugcugaugguggugaccagcaacgccgacagaaucugcaccggcaucaccagcagcaacagcccccacguggugaagaccgccacccagggcgaggugaacgugaccggcgugaucccccugaccaccacccccaccaagagcuacuucgccaaccugaagggcaccagaaccagaggcaagcugugccccgacugccugaacugcaccgaccuggacguggcccugggcagacccaugugcgugggcaccacccccagcgccaaggccagcauccugcacgaggugagacccgugaccagcggcugcuuccccaucaugcacgacagaaccaagaucagacagcugagcaaccugcugagaggcuacgagaacaucagacugagcacccagaacgugaucgacgccgagaaggcccccggcggccccuacagacugggcaccagcggcagcugccccaacgccaccagcaagagcggcuucuucgccaccauggccugggccgugcccaaggacaacaacaagaacgccaccaacccccugaccguggaggugcccuacaucugcaccgagggcgaggaccagaucaccguguggggcuuccacagcgacaacaagacccagaugaagaaccuguacggcgacagcaacccccagaaguucaccagcagcgccaacggcgugaccacccacuacgugagccagaucggcggcuuccccgaccagaccgaggacggcggccugccccagagcggcagaaucgugguggacuacaugaugcagaagcccggcaagaccggcaccaucguguaccagagaggcgugcugcugccccagaagguguggugcgccagcggcagaagcaaggugaucaagggcagccugccccugaucggcgaggccgacugccugcacgagaaguacggcggccugaacaagagcaagcccuacuacaccggcgagcacgccaaggccaucggcaacugccccaucugggugaagaccccccugaagcuggccaacggcaccaaguacagaccccccgccaagcugcugaaggagagaggcuucuucggcgccaucgccggcuuccuggagggcggcugggagggcaugaucgccggcuggcacggcuacaccagccacggcgcccacggcguggccguggccgccgaccugaagagcacccaggaggccaucaacaagaucaccaagaaccugaacagccugagcgagcuggaggugaagaaccugcagagacugagcggcgccauggacgagcugcacaacgagauccuggagcuggacgagaagguggacgaccugagagccgacaccaucagcagccagaucgagcuggccgugcugcugagcaacgagggcaucaucaacagcgaggacgagcaccugcuggcccuggagagaaagcugaagaagaugcugggccccagcgccguggacaucggcaacggcugcuucgagaccaagcacaagugcaaccagaccugccuggacagaaucgccgccggcaccuucaacgccggcgaguucagccugcccaccuucgacagccugaacaucaccgccgccagccugaacgacgacggccuggacaaccacaccauccugcuguacuacagcaccgccgccagcagccuggccgugacccugaugcuggccaucuucaucguguacauggugagcagagacaacgugagcugcagcaucugccuguga

SEQ ID NO: 187637 - RNA, 1755 nt, Artificial Sequence; identical to SEQ ID NO: 187083
  derived and/or modified CDS sequence (opt4) from hemagglutinin__InfluenzaB__AGX22392

SEQ ID NO: 187638 - RNA, 1755 nt, Artificial Sequence
  derived and/or modified CDS sequence (opt4) from hemagglutinin__InfluenzaB__AGX22403
augaaggccaucaucgugcugcugaugguggugaccagcaacgccgacagaaucugcaccggcaucaccagcagcaacagcccccacguggugaagaccgccacccagggcgaggugaacgugaccggcgugaucccccugaccaccacccccaccaagagcuacuucgccaaccugaagggcaccagaaccagaggcaagcugugccccgacugccugaacugcaccgaccuggacguggcccugggcagacccaugugcgugggcaccacccccagcgccaaggccagcauccugcacgaggugagacccgugaccagcggcugcuuccccaucaugcacgacagaaccaagaucagacagcugcccaaccugcugagaggcuacgagaacaucagacugagcacccagaacgugaucgacgccgagaaggcccccggcggccccuacagacugggcaccagcggcagcugccccaacgccaccagcaagagcggcuucuucgccaccauggccugggccgugcccaaggacaacaacaagaacgccaccaacccccugaccguggaggugcccuacaucugcaccgagggcgaggaccagaucaccguguggggcuuccacagcgacaacaagacccagaugaagaaccuguacggcgacagcaacccccagaaguucaccagcagcgccaacggcgugaccacccacuacgugagccagaucggcggcuuccccgaccagaccgaggacggcggccugccccagagcggcagaaucgugguggacuacaugaugcagaagcccggcaagaccggcaccaucguguaccagagaggcgugcugcugccccagaagguguggugcgccagcggcagaagcaaggugaucaagggcagccugccccugaucggcgaggccgacugccugcacgagaaguacggcggccugaacaagagcaagcccuacuacaccggcgagcacgccaaggccaucggcaacugccccaucugggugaagaccccccugaagcuggccaacggcaccaaguacagaccccccgccaagcugcugaaggagagaggcuucuucggcgccaucgccggcuuccuggagggcggcugggagggcaugaucgccggcuggcacggcuacaccagccacggcgcccacggcguggccguggccgccgaccugaagagcacccaggaggccaucaacaagaucaccaagaaccugaacagccugagcgagcuggaggugaagaaccugcagagacugagcggcgccauggacgagcugcacaacgagauccuggagcuggacgagaagguggacgaccugagagccgacaccaucagcagccagaucgagcuggccgugcugcugagcaacgagggcaucaucaacagcgaggacgagcaccugcuggcccuggagagaaagcugaagaagaugcugggccccagcgccguggacaucggcaacggcugcuucgagaccaagcacaagugcaaccagaccugccuggacagaaucgccgccggcaccuucaacgccggcgacuucagccugcccaccuucgacagccugaacaucaccgccgccagccugaacgacgacggccuggacaaccacaccauccugcuguacuacagcaccgccgccagcagccuggccgugacccugaugcuggccaucuucaucguguacauggugagcagagacaacgugagcugcagcaucugccuguga

SEQ ID NO: 187639 - RNA, 1755 nt, Artificial Sequence; identical to SEQ ID NO: 187083
  derived and/or modified CDS sequence (opt4) from hemagglutinin__InfluenzaB__AGX22414

SEQ ID NO: 187640 - RNA, 1755 nt, Artificial Sequence
  derived and/or modified CDS sequence (opt4) from hemagglutinin__InfluenzaB__AGX22425
augaaggccaucaucgugcugcugaugguggugaccagcaacgccgacagaaucugcaccggcaucaccagcagcaacagcccccacguggugaagaccgccacccagggcgaggugaacgugaccggcgugaucccccugaccaccacccccaccaagagcuacuucgccaaccugaagggcaccagaaccagaggcaagcugugccccgacugccugaacugcaccgaccuggacguggcccugggcagacccaugugcgugggcaccacccccagcgccaaggccagcauccugcacgaggugagacccgugaccagcggcugcuuccccaucaugcacgacagaaccaagaucagacagcugcccaaccugcugagaggcuacgagaacaucagacugagcacccagaacgugaucgacgccgagaaggcccccggcggccccuacagacugggcaccagcggcagcugccccaacgccaccagcaagagcggcuucuucgccaccauggccugggccgugcccaaggacaacaacaagaacgccaccaacccccugaccguggaggugcccuacaucugcaccgagggcgaggaccagaucaccguguggggcuuccacagcgacaacaagauccagaugaagaaccuguacggcgacagcaacccccagaaguucaccagcagcgccaacggcgugaccacccacuacgugagccagaucggcggcuuccccgaccagaccgaggacggcggccugccccagagcggcagaaucgugguggacuacaugaugcagaagcccggcaagaccggcaccaucguguaccagagaggcgugcugcugccccagaagguguggugcgccagcggcagaagcaaggugaucaagggcagccugccccugaucggcgaggccgacugccugcacgagaaguacggcggccugaacaagagcaagcccuacuacaccggcgagcacgccaaggccaucggcaacugccccaucugggugaagaccccccugaagcuggccaacggcaccaaguacagaccccccgccaagcugcugaaggagagaggcuucuucggcgccaucgccggcuuccuggagggcggcugggagggcaugaucgccggcuggcacggcuacaccagccacggcgcccacggcguggccguggccgccgaccugaagagcacccaggaggccaucaacaagaucaccaagaaccugaacagccugagcgagcuggaggugaagaaccugcagagacugagcggcgccauggacgagcugcacaacgagauccuggagcuggacgagaagguggacgaccugagagccgacaccaucagcagccagaucgagcuggccgugcugcugagcaacgagggcaucaucaacagcgaggacgagcaccugcuggcccuggagagaaagcugaagaagaugcugggccccagcgccguggagaucggcaacggcugcuucgagaccaagcacaagugcaaccagaccugccuggacagaaucgccgccggcaccuucaacgccggcgaguucagccugcccaccuucgacagccugaacaucaccgccgccagccugaacgacgacggccuggacaaccacaccauccugcuguacuacagcaccgccgccagcagccuggccgugacccugaugcuggccaucuucaucguguacauggugagcagagacaacgugagcugcagcaucugccuguga

SEQ ID NO: 187641 - RNA, 1755 nt, Artificial Sequence; identical to SEQ ID NO: 187084
  derived and/or modified CDS sequence (opt4) from hemagglutinin__InfluenzaB__AGX22436

SEQ ID NO: 187642 - RNA, 1755 nt, Artificial Sequence; identical to SEQ ID NO: 187084
  derived and/or modified CDS sequence (opt4) from hemagglutinin__InfluenzaB__AGX22445

SEQ ID NO: 187643 - RNA, 1755 nt, Artificial Sequence
  derived and/or modified CDS sequence (opt4) from hemagglutinin__InfluenzaB__AGX22456
augaaggccaucaucgugcugcugaugguggugaccagcaacgccgacagaaucugcaccggcaucaccagcagcagcagcccccacguggugaagaccgccacccagggcgaggugaacgugaccggcgugaucccccugaccaccacccccaccaagagcuacuucgccaaccugaagggcaccagaaccagaggcaagcugugccccgacugccugaacugcaccgaccuggacguggcccugggcagacccaugugcgugggcaccacccccagcgccaaggccagcauccugcacgaggugagacccgugaccagcggcugcuuccccaucaugcacgacagaaccaagaucagacagcugcccaaccugcugagaggcuacgagaacaucagacugagcacccagaacgugaucgacgccgagaaggcccccggcggccccuacagacugggcaccagcggcagcugccccaacgccaccagcaagagcggcuucuucgccaccauggccugggccgugcccaaggacaacaacaagaacgccaccaacccccugaccguggaggugcccuacaucugcaccgagggcgaggaccagaucaccguguggggcuuccacagcgacaacaagacccagaugaagaaccuguacggcgacagcaacccccagaaguucaccagcagcgccaacggcgugaccacccacuacgugagccagaucggcggcuuccccgaccagaccgaggacggcggccugccccagagcggcagaaucgugguggacuacaugaugcagaagcccggcaagaccggcaccaucguguaccagagaggcgugcugcugccccagaagguguggugcgccagcggcagaagcaaggugaucaagggcagccugccccugaucggcgaggccgacugccugcacgagaaguacggcggccugaacaagagcaagcccuacuacaccggcgagcacgccaaggccaucggcaacugccccaucugggugaagaccccccugaagcuggccaacggcaccaaguacagaccccccgccaagcugcugaaggagagaggcuucuucggcgccaucgccggcuuccuggagggcggcugggagggcaugaucgccggcuggcacggcuacaccagccacggcgcccacggcguggccguggccgccgaccugaagagcacccaggaggccaucaacaagaucaccaagaaccugaacagccugagcgagcuggaggugaagaaccugcagagacugagcggcgccauggacgagcugcacagcgagauccuggagcuggacgagaagguggacgaccugagagccgacaccaucagcagccagaucgagcuggccgugcugcugagcaacgagggcaucaucaacagcgaggacgagcaccugcuggcccuggagagaaagcugaagaagaugcugggccccagcgccguggacaucggcaacggcugcuucgagaccaagcacaagugcaaccagaccugccuggacagaaucgccgccggcaccuucaacgccggcgaguucagccugcccaccuucgacagccugaacaucaccgccgccagccugaacgacgacggccuggacaaccacaccauccugcuguacuacagcaccgccgccagcagccuggccgugacccugaugcuggccaucuucaucguguacaucgugagcagagacaacgugagcugcagcaucugccuguga

SEQ ID NO: 187644 - RNA, 1755 nt, Artificial Sequence; identical to SEQ ID NO: 187083
  derived and/or modified CDS sequence (opt4) from hemagglutinin__InfluenzaB__AGX22467

SEQ ID NO: 187645 - RNA, 1755 nt, Artificial Sequence; identical to SEQ ID NO: 187083
  derived and/or modified CDS sequence (opt4) from hemagglutinin__InfluenzaB__AGX22478

SEQ ID NO: 187646 - RNA, 1755 nt, Artificial Sequence
  derived and/or modified CDS sequence (opt4) from hemagglutinin__InfluenzaB__AGX22489
augaaggccaucaucgugcugcugaugguggugaccagcaacgccgacagaaucugcaccggcaucaccagcagcaacagcccccacguggugaagaccgccacccagggcgaggugaacgugaccggcgugaucccccugaccaccacccccaccaagagcuacuucgccaaccugaagggcaccagaaccagaggcaagcugugccccgacugccugaacugcaccgaccuggacguggcccugggcagacccaugugcgugggcaccacccccagcgccaaggccagcauccugcacgaggugagacccgugaccagcggcugcuuccccaucaugcacgacagaaccaagaucagacagcugcccaaccugcugagaggcuacgagaacaucagacugagcacccagagcgccaucgacgccgagaaggcccccggcggccccuacagacugggcaccagcggcagcugccccaacgccaccagcaagagcggcuucuucgccaccauggccugggccgugcccaaggacaacaacaagaacgccaccaacccccugaccguggaggugcccuacaucugcaccgagggcgaggaccagaucaccguguggggcuuccacagcgacaacaagacccagaugaagaaccuguacggcgacagcaacccccagaaguucaccagcagcgccaacggcgugaccacccacuacgugagccagaucggcggcuuccccggccagaccgaggacggcggccugccccagagcggcagaaucgugguggacuacaugauccagaagcccggcaagaccggcaccaucguguaccagagaggcgugcugcugccccagaagguguggugcgccagcggcagaagcaaggugaucaagggcagccugccccugaucggcgaggccgacugccugcacgagaaguacggcggccugaacaagagcaagcccuacuacaccggcgagcacgccaaggccaucggcaacugccccaucugggugaagaccccccugaagcuggccaacggcaccaaguacagaccccccgccaagcugcugaaggagagaggcuucuucggcgccaucgccggcuuccuggagggcggcugggagggcaugaucgccggcuggcacggcuacaccagccacggcgcccacggcguggccguggccgccgaccugaagagcacccaggaggccaucaacaagaucaccaagaaccugaacagccugagcgagcuggaggugaagaaccugcagagacugagcggcgccauggacgagcugcacaacgagauccuggagcuggacgagaagguggacgaccugagagccgacaccaucagcgcccagaucgagcuggccgugcugcugagcaacgagggcaucaucaacagcgaggacgagcaccugcuggcccuggagagaaagcugaagaagaugcugggccccagcgccguggacaucggcaacggcugcuucgagaccaagcacaagugcaaccagaccugccuggacagaaucgccgccggcaccuucaacgccggcgaguucagccugcccaccuucgacagccugaacaucaccgccgccagccugaacgacgacggccuggacaaccacaccauccugcuguacuacagcaccgccgccagcagccuggccgugacccugaugcuggccaucuucaucguguacauggugagcagagacaacgugagcugcagcaucugccuguga

SEQ ID NO: 187647 - RNA, 1755 nt, Artificial Sequence
  derived and/or modified CDS sequence (opt4) from hemagglutinin__InfluenzaB__AGX22500
augaaggccaucaucgugcugcugaugguggugaccagcaacgccgacagaaucugcaccggcaucaccagcagcaacagcccccacguggugaagaccgccacccagggcgaggugaacgugaccggcgugaucccccugaccaccacccccaccaagagcuacuucgccaaccugaagggcaccagaaccagaggcaagcugugccccgacugccugaacugcaccgaccuggacguggcccugggcagacccaugugcgugggcaccacccccagcgccaaggccagcauccugcacgaggugagacccgugaccagcggcugcuuccccaucaugcacgacagaaccaagaucagacagcugcccaaccugcugagaggcuacgagaacaucagacugagcacccagaacgugaucgacgccgagaacgcccccggcggccccuacagacugggcaccagcggcagcugccccaacgccaccagcaagagcggcuucuucgccaccauggccugggccgugcccaaggacaacaacaagaacgccaccaacccccugaccguggaggugcccuacaucugcaccgagggcgaggaccagaucaccguguggggcuuccacagcgacaacaagacccagaugaagaaccuguacggcgacagcaacccccagaaguucaccagcagcgccaacggcgugaccacccacuacgugagccagaucggcggcuuccccgcccagaccgaggacggcggccugccccagagcggcagaaucaucguggacuacauggugcagaagcccagaaagaccggcaccaucguguaccagagaggcgugcugcugccccagaagguguggugcgccagcggcagaagcaaggugaucaagggcagccugccccugaucggcgaggccgacugccugcacgagaaguacggcggccugaacaagagcaagcccuacuacaccggcgagcacgccaaggccaucggcaacugccccaucugggugaagaccccccugaagcuggccaacggcaccaaguacagaccccccgccaagcugcugaaggagagaggcuucuucggcgccaucgccggcuuccuggagggcggcugggagggcaugaucgccggcuggcacggcuacaccagccacggcgcccacggcguggccguggccgccgaccugaagagcacccaggaggccaucaacaagaucaccaagaaccugaacagccugagcgagcuggaggugaagaaccugcagagacugagcggcgccauggacgagcugcacaacgagauccuggagcuggacgagaagguggacgaccugagagccgacaccaucagcagccagaucgagcuggccgugcugcugagcaacgagggcaucaucaacagcgaggacgagcaccugcuggcccuggagagaaagcugaagaagaugcugggccccagcgccguggacaucggcaacggcugcuucgagaccaagcacaagugcaaccagaccugccuggacagaaucgccgccggcaccuucaacgccggcgaguucagccugcccaccuucgacagccugaacaucaccgccgccagccugaacgacgacggccuggacaaccacaccauccugcuguacuacagcaccguggccagcagccuggccgugacccugaugcuggccaucuucaucguguacauggugagcagagacaacgugagcugcagcaucugccuguga

SEQ ID NO: 187648 - RNA, 1755 nt, Artificial Sequence; identical to SEQ ID NO: 187084
  derived and/or modified CDS sequence (opt4) from hemagglutinin__InfluenzaB__AGX22511

SEQ ID NO: 187649 - RNA, 1755 nt, Artificial Sequence
  derived and/or modified CDS sequence (opt4) from hemagglutinin__InfluenzaB__AGX22522
augaaggccaucaucgugcugcugaugguggugaccagcaacgccgacagaaucugcaccggcaucaccagcagcaacagcccccacguggugaagaccgccacccagggcgaggugaacgugaccggcgugaucccccugaccaccacccccaccaagagcuacuucgccaaccugaagggcaccagaaccagaggcaagcugugccccgacugccugaacugcaccgaccuggacguggcccugggcagacccaugugcgugggcaccacccccagcgccaaggccagcauccugcacgaggugagacccgugaccagcggcugcuuccccaucaugcacgacagaaccaagaucagacagcuggccaaccugcugagaggcuacgagaacaucagacugagcacccagaacgugaucgacgccgagaaggcccccggcggccccuacagacugggcaccagcggcagcugccccaacgccaccagcaagagcggcuucuucgccaccauggccugggccgugcccaaggacaacaacaagaacgccaccaacccccugaccguggaggugcccuacaucugcaccgagggcgaggaccagaucaccguguggggcuuccacagcgacaacaagacccagaugaagaaccuguacggcgacagcaacccccagaaguucaccagcagcgccaacggcgugaccaagcacuacgugagccagaucggcggcuuccccgaccagaccgaggacggcggccugccccagagcggcagaaucgugguggacuacaugaugcagaagcccggcaagaccggcaccaucguguaccagagaggcgugcugcugccccagaagguguggugcgccagcggcagaagcaaggugaucaagggcagccugccccugaucggcgaggccgacugccugcacgagaaguacggcggccugaacaagagcaagcccuacuacaccggcgagcacgccaaggccaucggcaacugccccaucugggugaagaccccccugaagcuggccaacggcaccaaguacagaccccccgccaagcugcugaaggagagaggcuucuucggcgccaucgccggcuuccuggagggcggcugggagggcaugaucgccggcuggcacggcuacaccagccacggcgcccacggcguggccguggccgccgaccugaagagcacccaggaggccaucaacaagaucaccaagaaccugaacagccugagcgagcuggaggugaagaaccugcagagacugagcggcgccauggacgagcugcacaacgagauccuggagcuggacgagaagguggacgaccugagagccgacaccaucagcagccagaucgagcuggccgugcugcugagcaacgagggcaucaucaacagcgaggacgagcaccugcuggcccuggagagaaagcugaagaagaugcugggccccagcgccguggacaucggcaacggcugcuucgagaccaagcacaagugcaaccagaccugccuggacagaaucgccgccggcaccuucaacgccggcgaguucagccugcccaccuucgacagccugaacaucaccgccgccagccugaacgacgacggccuggacaaccacaccauccugcuguacuacagcaccgccgccagcagccuggccgugacccugaugcuggccaucuucaucguguacauggugagcagagacaacgugagcugcagcaucugccuguga

SEQ ID NO: 187650 - RNA, 1755 nt, Artificial Sequence; identical to SEQ ID NO: 186486
  derived and/or modified CDS sequence (opt4) from hemagglutinin__InfluenzaB__AGX22533

SEQ ID NO: 187651 - RNA, 1755 nt, Artificial Sequence; identical to SEQ ID NO: 187098
  derived and/or modified CDS sequence (opt4) from hemagglutinin__InfluenzaB__AGX22566

SEQ ID NO: 187652 - RNA, 1755 nt, Artificial Sequence; identical to SEQ ID NO: 187084
  derived and/or modified CDS sequence (opt4) from hemagglutinin__InfluenzaB__AGX22577

SEQ ID NO: 187653 - RNA, 1755 nt, Artificial Sequence; identical to SEQ ID NO: 187098
  derived and/or modified CDS sequence (opt4) from hemagglutinin__InfluenzaB__AGX22588

SEQ ID NO: 187654 - RNA, 1755 nt, Artificial Sequence; identical to SEQ ID NO: 186486
  derived and/or modified CDS sequence (opt4) from hemagglutinin__InfluenzaB__AGX22599

SEQ ID NO: 187655 - RNA, 1755 nt, Artificial Sequence
  derived and/or modified CDS sequence (opt4) from hemagglutinin__InfluenzaB__AGX22610
augaaggccaucaucgugcugcugaugguggugaccagcaacgccgacagaaucugcaccggcaucaccagcagcaacagcccccacguggugaagaccgccacccagggcgaggugaacgugaccggcgugaucccccugaccaccacccccaccaagagcuacuucgccaaccugaagggcaccagaaccagaggcaagcugugccccgacugccugaacugcaccgaccuggacguggcccugggcagacccaugugcgugggcaccacccccagcgccaaggccagcauccugcacgaggugagacccgugaccagcggcugcuuccccaucaugcacgacagaaccaagaucagacagcugcccaaccugcugagaggcuacgagaacaucagacugagcacccagaacgugaucgacgccgagaaggcccccggcggccccuacagacugggcaccagcggcagcugccccaacgccaccagcaagagcggcuucuucgccaccauggccugggccgugcccaaggacaacaacaagaacgccaccaacccccugaccguggaggugcccuacaucugcaccgagggcgaggaccagaucaccguguggggcuuccacagcgacaacaagacccagaugaagaaccuguacggcgaccccaacccccagaaguucaccagcagcgccaacggcgugaccacccacuacgugagccagaucggcggcuuccccgaccagaccgaggacggcggccugccccagagcggcagaaucgugguggacuacaugaugcagaagcccggcaagaccggcaccaucguguaccagagaggcgugcugcugccccagaagguguggugcgccagcggcagaagcaaggugaucaagggcagccugccccugaucggcgaggccgacugccugcacgagaaguacggcggccugaacaagagcaagcccuacuacaccggcgagcacgccaaggccaucggcaacugccccaucugggugaagaccccccugaagcuggccaacggcaccaaguacagaccccccgccaagcugcugaaggagagaggcuucuucggcgccaucgccggcuuccuggagggcggcugggagggcaugaucgccggcuggcacggcuacaccagccacggcgcccacggcguggccguggccgccgaccugaagagcacccaggaggccaucaacaagaucaccaagaaccugaacagccugagcgagcuggaggugaagaaccugcagagacugagcggcgccauggacgagcugcacaacgagauccuggagcuggacgagaagguggacgaccugagagccgacaccaucagcagccagaucgagcuggccgugcugcugagcaacgagggcaucaucaacagcgaggacgagcaccugcuggcccuggagagaaagcugaagaagaugcugggccccagcgccguggacaucggcaacggcugcuucgagaccaagcacaagugcaaccagaccugccuggacagaaucgccgccggcaccuucaacgccggcgaguucagccugcccaccuucgacagccugaacaucaccgccgccagccugaacgacgacggccuggacaaccacaccauccugcuguacuacagcaccgccgccagcagccuggccgugacccugaugcuggccaucuucaucguguacauggugagcagagacaacgugagcugcagcaucugccuguga

SEQ ID NO: 187656 - RNA, 1755 nt, Artificial Sequence
  derived and/or modified CDS sequence (opt4) from hemagglutinin__InfluenzaB__AGX22621
augaaggccaucaucgugcugcugaugguggugaccagcaacgccgacagaaucugcaccggcaucaccagcagcaacagcccccacguggugaagaccgccacccagggcgaggugaacgugaccggcgugaucccccugaccaccacccccaccaagagcuacuucgccaaccugaagggcaccagaaccagaggcaagcugugccccgacugccugaacugcaccgaccuggacguggcccugggcagacccaugugcgugggcaccacccccagcgccaaggccagcauccugcacgaggugagacccgugaccagcggcugcuuccccaucaugcacgacagaaccaagaucagacagcuggccaaccugcugagaggcuacgagaacaucagacugagcacccagaacgugaucgacgccgagaaggcccccggcggccccuacagacugggcaccagcggcagcugccccaacgccaccagcaagagcggcuucuucgccaccauggccugggccgugcccaaggacaacaacaagaacgccaccaacccccugaccguggaggugcccuacaucugcaccggcggcgaggaccagaucaccguguggggcuuccacagcgacaacaagacccagaugaagaaccuguacggcgacagcaacccccagaaguucaccagcagcgccaacggcgugaccacccacuacgugagccagaucggcggcuuccccgaccagaccgaggacggcggccugccccagagcggcagaaucgugguggacuacaugaugcagaagcccggcaagaccggcaccaucguguaccagagaggcgugcugcugccccagaagguguggugcgccagcggcagaagcaaggugaucaagggcagccugccccugaucggcgaggccgacugccugcacgagaaguacggcggccugaacaagagcaagcccuacuacaccggcgagcacgccaaggccaucggcaacugccccaucugggugaagaccccccugaagcuggccaacggcaccaaguacagaccccccgccaagcugcugaaggagagaggcuucuucggcgccaucgccggcuuccuggagggcggcugggagggcaugaucgccggcuggcacggcuacaccagccacggcgcccacggcguggccguggccgccgaccugaagagcacccaggaggccaucaacaagaucaccaagaaccugaacagccugagcgagcuggaggugaagaaccugcagagacugagcggcgccauggacgagcugcacaacgagauccuggagcuggacgagaagguggacgaccugagagccgacaccaucagcagccagaucgagcuggccgugcugcugagcaacgagggcaucaucaacagcgaggacgagcaccugcuggcccuggagagaaagcugaagaagaugcugggccccagcgccguggacaucggcaacggcugcuucgagaccaagcacaagugcaaccagaccugccuggacagaaucgccgccggcaccuucaacgccggcgaguucagccugcccaccuucgacagccugaacaucaccgccgccagccugaacgacgacggccuggacaaccacaccauccugcuguacuacagcaccgccgccagcagccuggccgugacccugaugcuggccaucuucaucguguacauggugagcagagacaacgugagcugcagcaucugccuguga

SEQ ID NO: 187657 - RNA, 1755 nt, Artificial Sequence; identical to SEQ ID NO: 186486
  derived and/or modified CDS sequence (opt4) from hemagglutinin__InfluenzaB__AGX22632

SEQ ID NO: 187658 - RNA, 1755 nt, Artificial Sequence
  derived and/or modified CDS sequence (opt4) from hemagglutinin__InfluenzaB__AGX22643
augaaggccaucaucgugcugcugaugguggugaccagcaacgccgacagaaucugcaccggcaucaccagcagcaacagcccccacguggugaagaccgccacccagggcgaggugaacgugaccggcgugaucccccugaccaccacccccaccaagagcuacuucgccaaccugaagggcaccagaaccagaggcaagcugugccccgacugccugaacugcaccgaccuggacguggcccugggcagacccaugugcgugggcaccacccccagcgccaaggccagcauccugcacgaggugagacccgugaccagcggcugcuuccccaucaugcacgacagaaccaagaucagacagcuggccaaccugcugagaggcuacgagaacaucagacugagcauccagaacgugaucgacgccgagaaggcccccggcggccccuacagacugggcaccagcggcagcugccccaacgccaccagcaagagcggcuucuucgccaccauggccugggccgugcccaaggacaacaacaagaacgccaccaacccccugaccguggaggugcccuacaucugcaccgagggcgaggaccagaucaccguguggggcuuccacagcgacaacaagacccagaugaagaaccuguacggcgacagcaacccccagaaguucaccagcagcgccaacggcgugaccacccacuacgugagccagaucggcggcuuccccgaccagaccgaggacggcggccugccccagagcggcagaaucgugguggacuacaugaugcagaagcccggcaagaccggcaccaucguguaccagagaggcgugcugcugccccagaagguguggugcgccagcggcagaagcaaggugaucaagggcagccugccccugaucggcgaggccgacugccugcacgagaaguacggcggccugaacaagagcaagcccuacuacaccggcgagcacgccaaggccaucggcaacugccccaucugggugaagaccccccugaagcuggccaacggcaccaaguacagaccccccgccaagcugcugaaggagagaggcuucuucggcgccaucgccggcuuccuggagggcggcugggagggcaugaucgccggcuggcacggcuacaccagccacggcgcccacggcguggccguggccgccgaccugaagagcacccaggaggccaucaacaagaucaccaagaaccugaacagccugagcgagcuggaggugaagaaccugcagagacugagcggcgccauggacgagcugcacaacgagauccuggagcuggacgagaagguggacgaccugagagccgacaccaucagcagccagaucgagcuggccgugcugcugagcaacgagggcaucaucaacagcgaggacgagcaccugcuggcccuggagagaaagcugaagaagaugcugggccccagcgccguggacaucggcaacggcugcuucgagaccaagcacaagugcaaccagaccugccuggacagaaucgccgccggcaccuucaacgccggcgaguucagccugcccaccuucgacagccugaacaucaccgccgccagccugaacgacgacggccuggacaaccacaccauccugcuguacuacagcaccgccgccagcagccuggccgugacccugaugcuggccaucuucaucguguacauggugagcagagacaacgugagcugcagcaucugccuguga

SEQ ID NO: 187659 - RNA, 1755 nt, Artificial Sequence
  derived and/or modified CDS sequence (opt4) from hemagglutinin__InfluenzaB__AGX22654
augaaggccaucaucgugcugcugaugguggugaccagcaacgccgacagaaucugcaccggcaucaccagcagcaacagcccccacguggugaagaccgccacccagggcgaggugaacgugaccggcgugaucccccugaccaccacccccaccaagagcuacuucgccaaccugaagggcaccagaaccagaggcaagcugugccccgacugccugaacugcaccgaccuggacguggcccugggcagacccaugugcgugggcaccacccccagcgccaaggccagcauccugcacgaggugagacccgugaccagcggcugcuuccccaucaugcacgacagaaccaagaucagacagcuggccaaccugcugagaggcuacgagaacaucagacugagcacccagaacgugaucgacgccgagaaggcccccggcggccccuacagacugggcaccagcggcagcugccccaacgccaccagcaagagcggcuucuucgccaccauggccugggccgugcccaaggacaacaacaagaacgccaccaacccccugaccguggaggugcccuacaucugcaccgagggcgaggaccagaucaccguguggggcuuccacagcgacaacaagacccagaugaagaaccuguacggcgacagcaacccccagaaguucaccagcagcgccaacggcgugaccacccacuacgugagccagaucggcggcuuccccgaccagaccgaggacggcggccugccccagagcggcagaaucgugguggacuacaugaugcagaagcccggcaagaccggcaccaucguguaccagagaggcgugcugcugccccagaagguguggugcgccagcggcagaagcaaggugaucaagggcagccugccccugaucggcgaggccgacugccugcacgagaaguacggcggccugaacaagagcaagcccuacuacaccggcgagcacgccaaggccaucggcaacugccccaucugggugaagaccccccugaagcuggccaacggcaccaaguacagaccccccgccaagcugcugaaggagagaggcuucuucggcgccaucgccggcuuccuggagggcggcugggagggcaugaucgccggcuggcacggcuacaccagccacggcgcccacggcguggccguggccgccgaccugaagagcacccaggaggccaucaacaagaucaccaagaaccugaacagccugagcgagcuggaggugaagaaccugcagagacugagcggcgccauggacgagcugcacagcgagauccuggagcuggacgagaagguggacgaccugagagccgacaccaucagcagccagaucgagcuggccgugcugcugagcaacgagggcaucaucaacagcgaggacgagcaccugcuggcccuggagagaaagcugaagaagaugcugggccccagcgccguggacaucggcaacggcugcuucgagaccaagcacaagugcaaccagaccugccuggacagaaucgccgccggcaccuucaacgccggcgaguucagccugcccaccuucgacagccugaacaucaccgccgccagccugaacgacgacggccuggacaaccacaccauccugcuguacuacagcaccgccgccagcagccuggccgugacccugaugcuggccaucuucaucguguacauggugagcagagacaacgugagcugcagcaucugccuguga

SEQ ID NO: 187660 - RNA, 1755 nt, Artificial Sequence; identical to SEQ ID NO: 187098
  derived and/or modified CDS sequence (opt4) from hemagglutinin__InfluenzaB__AGX22665

SEQ ID NO: 187661 - RNA, 1755 nt, Artificial Sequence; identical to SEQ ID NO: 187098
  derived and/or modified CDS sequence (opt4) from hemagglutinin__InfluenzaB__AGX22676

SEQ ID NO: 187662 - RNA, 1755 nt, Artificial Sequence; identical to SEQ ID NO: 186486
  derived and/or modified CDS sequence (opt4) from hemagglutinin__InfluenzaB__AGX22687

SEQ ID NO: 187663 - RNA, 1755 nt, Artificial Sequence; identical to SEQ ID NO: 187098
  derived and/or modified CDS sequence (opt4) from hemagglutinin__InfluenzaB__AGX22698

SEQ ID NO: 187664 - RNA, 1755 nt, Artificial Sequence
  derived and/or modified CDS sequence (opt4) from hemagglutinin__InfluenzaB__AGX22709
augaaggccaucaucgugcugcugaugguggugaccagcaacgccgacagaaucugcaccggcaucaccagcagcaacagcccccacguggugaagaccgccacccagggcgaggugaacgugaccggcgugaucccccugaccaccacccccaccaagagcuacuucgccaaccugaagggcaccagaaccagaggcaagcugugccccgacugccugaacugcaccgaccuggacguggcccugggcagacccaugugcgugggcaccacccccagcgccaaggccagcauccugcacgaggugagacccgugaccagcggcugcuuccccaucaugcacgacagaaccaagaucagacagcuggccaaccugcugagaggcuacgagaacaucagacugagcacccagaacgugaucgacgccgagaaggcccccggcggccccuacagacugggcaccagcggcagcugccccaacgccaccagcaagagcggcuucuucgccaccauggccugggccgugcccaaggacaacaacaagaacgccaccaacccccugaccguggaggugcccuacaucugcaccgagggcgaggaccagaucaccguguggggcuuccacagcgacaacaagacccagaugaagaaccuguacggcgacagcaacccccagaaguucaccagcagcgccaacggcgugaccacccacuacgugagccagaucggcggcuuccccgaccagaccgaggacggcggccugccccagagcggcagaaucgugguggacuacaugaugcagaagcccgagaagaccggcaccaucguguaccagagaggcgugcugcugccccagaagguguggugcgccagcggcagaagcaaggugaucaagggcagccugccccugaucggcgaggccgacugccugcacgagaaguacggcggccugaacaagagcaagcccuacuacaccggcgagcacgccaaggccaucggcaacugccccaucugggugaagaccccccugaagcuggccaacggcaccaaguacagaccccccgccaagcugcugaaggagagaggcuucuucggcgccaucgccggcuuccuggagggcggcugggagggcaugaucgccggcuggcacggcuacaccagccacggcgcccacggcguggccguggccgccgaccugaagagcacccaggaggccaucaacaagaucaccaagaaccugaacagccugagcgagcuggaggugaagaaccugcagagacugagcggcgccauggacgagcugcacaacgagauccuggagcuggacgagaagguggacgaccugagagccgacaccaucagcagccagaucgagcuggccgugcugcugagcaacgagggcaucaucaacagcgaggacgagcaccugcuggcccuggagagaaagcugaagaagaugcugggccccagcgccguggacaucggcaacggcugcuucgagaccaagcacaagugcaaccagaccugccuggacagaaucgccgccggcaccuucaacgccggcgaguucagccugcccaccuucgacagccugaacaucaccgccgccagccugaacgacgacggccuggacaaccacaccauccugcuguacuacagcaccgccgccagcagccuggccgugacccugaugcuggccaucuucaucguguacauggugagcagagacaacgugagcugcagcaucugccuguga

SEQ ID NO: 187665 - RNA, 1755 nt, Artificial Sequence
  derived and/or modified CDS sequence (opt4) from hemagglutinin__InfluenzaB__AGX22720
augaaggccaucaucgugcugcugaugguggugaccagcaacgccgacagaaucugcaccggcaucaccagcagcaacagcccccacguggugaagaccgccacccagggcgaggugaacgugaccggcgugaucccccugaccaccacccccaccaagagcuacuucgccaaccugaagggcaccagaaccagaggcaagcugugccccgacugccugaacugcaccgaccuggacguggcccugggcagacccaugugcgugggcaccacccccagcgccaaggccagcauccugcacgaggugagacccgugaccagcggcugcuuccccaucaugcacgacagaaccaagaucagacagcugcccaaccugcugagaggcuacgagaacaucagacugagcacccagaacgugaucgacgccgagaaggcccccggcggccccuacagacugggcaccagcggcagcugccccaacgccaccagcaagagcggcuucuucgccaccauggccugggccgugcccaaggacaacaacaagaacgccaccaacccccugaccguggaggugcccuacaucugcaccgagggcgaggaccagaucaccguguggggcuuccacagcgacaacaagacccagaugaagaaccuguacggcgacagcaacccccagaaguucaccagcagcgccaacggcgccaccacccacuacgugagccagaucggcggcuuccccgaccagaccgaggacggcggccugccccagagcggcagaaucgugguggacuacaugaugcagaagcccggcaagaccggcaccaucguguaccagagaggcgugcugcugccccagaagguguggugcgccagcggcagaagcaaggugaucaagggcagccugccccugaucggcgaggccgacugccugcacgagaaguacggcggccugaacaagagcaagcccuacuacaccggcgagcacgccaaggccaucggcaacugccccaucugggugaagaccccccugaagcuggccaacggcaccaaguacagaccccccgccaagcugcugaaggagagaggcuucuucggcgccaucgccggcuuccuggagggcggcugggagggcaugaucgccggcuggcacggcuacaccagccacggcgcccacggcguggccguggccgccgaccugaagagcacccaggaggccaucaacaagaucaccaagaaccugaacagccugagcgagcuggaggugaagaaccugcagagacugagcggcgccauggacgagcugcacaacgagauccuggagcuggacgagaagguggacgaccugagagccgacaccaucagcagccagaucgagcuggccgugcugcugagcaacgagggcaucaucaacagcgaggacgagcaccugcuggcccuggagagaaagcugaagaagaugcugggccccagcgccguggacaucggcaacggcugcuucgagaccaagcacaagugcaaccagaccugccuggacagaaucgccgccggcaccuucaacgccggcgaguucagccugcccaccuucgacagccugaacaucaccgccgccagccugaacgacgacggccuggacaaccacaccauccugcuguacuacagcaccgccgccagcagccuggccgugacccugaugcuggccaucuucaucguguacauggugagcagagacaacgugagcugcagcaucugccuguga

SEQ ID NO: 187666 - RNA, 1755 nt, Artificial Sequence; identical to SEQ ID NO: 187098
  derived and/or modified CDS sequence (opt4) from hemagglutinin__InfluenzaB__AGX22731

SEQ ID NO: 187667 - RNA, 1755 nt, Artificial Sequence; identical to SEQ ID NO: 187659
  derived and/or modified CDS sequence (opt4) from hemagglutinin__InfluenzaB__AGX22742

SEQ ID NO: 187668 - RNA, 1755 nt, Artificial Sequence
  derived and/or modified CDS sequence (opt4) from hemagglutinin__InfluenzaB__AGX22753
augaaggccaucaucgugcugcugaugguggugaccagcaacgccgacagaaucugcaccggcaucaccagcagcaacagcccccacguggugaagaccgccacccagggcgaggugaacgugaccggcgugaucccccugaccaccacccccgccaagagcuacuucgccaaccugaagggcaccagaaccagaggcaagcugugccccgacugccugaacugcaccgaccuggacguggcccugggcagacccaugugcgugggcaccacccccagcgccaaggccagcauccugcacgaggugagacccgugaccagcggcugcuuccccaucaugcacgacagaaccaagaucagacagcuggccaaccugcugagaggcuacgagaacaucagacugagcacccagaacgugaucgacgccgagaaggcccccggcggccccuacagacugggcaccagcggcagcugccccaacgccaccagcaagagcggcuucuucgccaccauggccugggccgugcccaaggacaacaacaagaacgccaccaacccccugaccguggaggugcccuacaucugcaaggagggcgaggaccagaucaccguguggggcuuccacagcgacaacaagacccagaugaagaaccuguacggcgacagcaacccccagaaguucaccagcagcgccaacggcgugaccacccacuacgugagccagaucggcggcuuccccgaccagaccgaggacggcggccugccccagagcggcagaaucgugguggacuacaugauccagaagcccggcaagaccggcaccaucguguaccagagaggcgugcugcugccccagaagguguggugcgccagcggcagaagcaaggugaucaagggcagccugccccugaucggcgaggccgacugccugcacgagaaguacggcggccugaacaagagcaagcccuacuacaccggcgagcacgccaaggccaucggcaacugccccaucugggugaagaccccccugaagcuggccaacggcaccaaguacagaccccccgccaagcugcugaaggagagaggcuucuucggcgccaucgccggcuuccuggagggcggcugggagggcaugaucgccggcuggcacggcuacaccagccacggcgcccacggcguggccguggccgccgaccugaagagcacccaggaggccaucaacaagaucaccaagaaccugaacagccugagcgagcuggaggugaagaaccugcagagacugagcggcgccauggacgagcugcacaacgagauccuggagcuggacgagaagguggacgaccugagagccgacaccaucagcagccagaucgagcuggccgugcugcugagcaacgagggcaucaucaacagcgaggacgagcaccugcuggcccuggagagaaagcugaagaagaugcugggccccagcgccguggacaucggcaacggcugcuucgagaccaagcacaagugcaaccagaccugccuggacagaaucgccgccggcaccuucaacgccggcgaguucagccugcccaccuucgacagccugaacaucaccgccgccagccugaacgacgacggccuggacaaccacaccauccugcuguacuacagcaccgccgccagcagccuggccgugacccugaugcuggccaucuucaucguguacauggugagcagagacaacgugagcugcagcaucugccuguga

SEQ ID NO: 187669 - RNA, 1755 nt, Artificial Sequence
  derived and/or modified CDS sequence (opt4) from hemagglutinin__InfluenzaB__AGX22764
augaaggccaucaucgugcugcugaugguggugaccagcaacgccgacagaaucugcaccggcaucaccagcagcaacagcccccacguggugaagaccgccacccagggcgaggugaacgugaccggcgugaucccccugaccaccacccccaccaagagcuacuucgccaaccugaagggcaccagaaccagaggcaagcugugccccgacugccugaacugcaccgaccuggacguggcccugggcagacccaugugcgugggcaccacccccagcgccaaggccagcauccugcacgaggugagacccgugaccagcggcugcuuccccaucaugcacgacagaaccaagaucagacagcuggccaaccugcugagaggcuacgagaacaucagacugagcacccagaacgugaucgacgccgagaaggcccccggcggccccuacagacugggcaccagcggcagcugccccaacgccaccagcaagagcggcuucuucgccaccauggccugggccgugcccaaggacaacaacaagaacgccaccaacccccugaccguggaggugcccuacaucugcaaggagggcgaggaccagaucaccguguggggcuuccacagcgacaacaagacccagaugaagaaccuguacggcgacagcaacccccagaaguucaccagcagcgccaacggcgugaccacccacuacgugagccagaucggcggcuuccccgaccagaccgaggacggcggccugccccagagcggcagaaucgugguggacuacaugauccagaagcccggcaagaccggcaccaucguguaccagagaggcgugcugcugccccagaagguguggugcgccagcggcagaagcaaggugaucaagggcagccugccccugaucggcgaggccgacugccugcacgagaaguacggcggccugaacaagagcaagcccuacuacaccggcgaccacgccaaggccaucggcaacugccccaucugggugaagaccccccugaagcuggccaacggcaccaaguacagaccccccgccaagcugcugaaggagagaggcuucuucggcgccaucgccggcuuccuggagggcggcugggagggcaugaucgccggcuggcacggcuacaccagccacggcgcccacggcguggccguggccgccgaccugaagagcacccaggaggccaucaacaagaucaccaagaaccugaacagccugagcgagcuggaggugaagaaccugcagagacugagcggcgccauggacgagcugcacaacgagauccuggagcuggacgagaagguggacgaccugagagccgacaccaucagcagccagaucgagcuggccgugcugcugagcaacgagggcaucaucaacagcgaggacgagcaccugcuggcccuggagagaaagcugaagaagaugcugggccccagcgccguggacaucggcaacggcugcuucgagaccaagcacaagugcaaccagaccugccuggacagaaucgccgccggcaccuucaacgccggcgaguucagccugcccaccuucgacagccugaacaucaccgccgccagccugaacgacgacggccuggacaaccacaccauccugcuguacuacagcaccgccgccagcagccuggccgugacccugaugcuggccaucuucaucguguacauggugagcagagacaacgugagcugcagcaucugccuguga

SEQ ID NO: 187670 - RNA, 1755 nt, Artificial Sequence
  derived and/or modified CDS sequence (opt4) from hemagglutinin__InfluenzaB__AGX22775
augaaggccaucaucgugcugcugaugguggugaccagcaacgccgacagaaucugcaccggcaucaccagcagcaacagcccccacguggugaagaccgccacccagggcgaggugaacgugaccggcgugaucccccugaccaccacccccaccaagagcuacuucgccaaccugaagggcaccagaaccagaggcaagcugugccccgacugccugaacugcaccgaccuggacguggcccugggcagacccaugugcgugggcaccacccccagcgccaaggccagcauccugcacgaggugagacccgugaccagcggcugcuuccccaucaugcacgacagaaccaagaucagacagcugcccaaccugcugagaggcuacgagaacaucagacugagcacccagaacgugaucgacgccgagaaggcccccggcggccccuacagacugggcaccagcggcagcugccccaacgccaccagcaagagcggcuucuucgccaccauggccugggccgugcccaaggacaacaacaagaacgccaccaacccccugaccguggaggugcccuacaucugcaccgagggcgaggaccagaucaccguguggggcuuccacagcgacaacaagacccagaugaagaaccuguacggcgacagcaacccccagaaguucaccagcagcgccaacggcgugaccacccacuacgugagccagaucggcggcuuccccgaccagaccgaggacggcggccugccccagagcggcagaaucgugguggacuacaugaugcagaagcccggcaagaccggcaccaucguguaccagagaggcgugcugcugccccagaagguguggugcgccagcggcagaagcaaggugaucaagggcagccugccccugaucggcgaggccgacugccugcacgagaaguacggcggccugaacaagagcaagcccuacuacaccggcgagcacgccaaggccaucggcaacugccccaucugggugaagaccccccugaagcuggccaacggcaccaaguacagaccccccgccaagcugcugaaggagagaggcuucuucggcgccaucgccggcuuccuggagggcggcugggagggcaugaucgccggcuggcacggcuacaccagccacggcgcccacggcguggccguggccgccgaccugaagagcacccaggaggccaucaacaagaucaccaagaaccugaacagccugagcgagcuggaggugaagaaccugcagagacugagcggcgccauggacgagcugcacaacgagauccuggagcuggacgagaagguggacgaccugagagccgacaccaucagcagccagaucgagcuggccgugcugcugagcaacgagggcaucaucaacagcgaggacgagcaccugcuggcccuggagagaagacugaagaagaugcugggccccagcgccguggagaucggcaacggcugcuucgagaccaagcacaagugcaaccagaccugccuggacagaaucgccgccggcaccuucaacgccggcgaguucagccugcccaccuucgacagccugaacaucaccgccgccagccugaacgacgacggccuggacaaccacaccauccugcuguacuacagcaccgccgccagcagccuggccgugacccugaugcuggccaucuucaucguguacauggugagcagagacaacgugagcugcagcaucugccuguga

SEQ ID NO: 187671 - RNA, 1755 nt, Artificial Sequence; identical to SEQ ID NO: 187098
  derived and/or modified CDS sequence (opt4) from hemagglutinin__InfluenzaB__AGX22786

SEQ ID NO: 187672 - RNA, 1755 nt, Artificial Sequence
  derived and/or modified CDS sequence (opt4) from hemagglutinin__InfluenzaB__AGX22797
augaaggccaucaucgugcugcugaugguggugaccagcaacgccgacagaaucugcaccggcaucaccagcagcaacagcccccacguggugaagaccgccacccagggcgaggugaacgugaccggcgugaucccccugaccaccacccccaccaagagcuacuucgccaaccugaagggcaccagaaccagaggcaagcugugccccgacugccugaacugcaccgaccuggacguggcccugggcagacccaugugcgugggcaccacccccagcgccaaggccagcauccugcacgaggugagacccgugaccagcggcugcuuccccaucaugcacgacagaaccaagaucagacagcuggccaaccugcugagaggcuacgagaacaucagacugagcacccagaacgugaucgacgccgagaaggcccccggcggccccuacagacugggcaccagcggcagcugccccaacgccaccagcaagagcggcuucuucgccaccauggccugggccgugcccaaggacaacaacaagaacgccaccaacccccugaccguggaggugcccuacaucugcaaggagggcgaggaccagaucaccguguggggcuuccacagcgacaacaagacccagaugaagaaccuguacggcgacagcaacccccagaaguucaccagcagcgccaacggcgugaccacccacuacgugagccagaucggcggcuuccccgaccagaccgaggacggcggccugccccagagcggcagaaucgugguggacuacaugauccagaagcccggcaagaccggcaccaucguguaccagagaggcgugcuguucccccagaagguguggugcgccagcggcagaagcaaggugaucaagggcagccugccccugaucggcgaggccgacugccugcacgagaaguacggcggccugaacaagagcaagcccuacuacaccggcgagcacgccaaggccaucggcaacugccccaucugggugaagaccccccugaagcuggccaacggcaccaaguacagaccccccgccaagcugcugaaggagagaggcuucuucggcgccaucgccggcuuccuggagggcggcugggagggcaugaucgccggcuggcacggcuacaccagccacggcgcccacggcguggccguggccgccgaccugaagagcacccaggaggccaucaacaagaucaccaagaaccugaacagccugagcgagcuggaggugaagaaccugcagagacugagcggcgccauggacgagcugcacaacgagauccuggagcuggacgagaagguggacgaccugagagccgacaccaucagcagccagaucgagcuggccgugcugcugagcaacgagggcaucaucaacagcgaggacgagcaccugcuggcccuggagagaaagcugaagaagaugcugggccccagcgccguggacaucggcaacggcugcuucgagaccaagcacaagugcaaccagaccugccuggacagaaucgccgccggcaccuucaacgccggcgaguucagccugcccaccuucgacagccugaacaucaccgccgccagccugaacgacgacggccuggacaaccacaccauccugcuguacuacagcaccgccgccagcagccuggccgugacccugaugcuggccaucuucaucguguacauggugagcagagacaacgugagcugcagcaucugccuguga

SEQ ID NO: 187673 - RNA, 1755 nt, Artificial Sequence; identical to SEQ ID NO: 187098
  derived and/or modified CDS sequence (opt4) from hemagglutinin__InfluenzaB__AGX22808

SEQ ID NO: 187674 - RNA, 1755 nt, Artificial Sequence; identical to SEQ ID NO: 187098
  derived and/or modified CDS sequence (opt4) from hemagglutinin__InfluenzaB__AGX22819

SEQ ID NO: 187675 - RNA, 1755 nt, Artificial Sequence; identical to SEQ ID NO: 187098
  derived and/or modified CDS sequence (opt4) from hemagglutinin__InfluenzaB__AGX22830

SEQ ID NO: 187676 - RNA, 1755 nt, Artificial Sequence
  derived and/or modified CDS sequence (opt4) from hemagglutinin__InfluenzaB__AGX22841
augaaggccaucaucgugcugcugaugguggugaccagcaacgccgacagaaucugcaccggcaucaccagcagcaacagcccccacguggugaagaccgccacccagggcgaggugaacgugaccggcgugaucccccugaccaccacccccaccaagagcuacuucgccaaccugaagggcaccagaaccagaggcaagcugugccccgacugccugaacugcaccgaccuggacguggcccugggcagacccaugugcgugggcaccacccccagcgccaaggccagcauccugcacgaggugagacccgugaccagcggcugcuuccccaucaugcacgacagaaccaagaucagacagcuggccaaccugcugagaggcuacgagaacaucagacugagcacccagaacgugaucgacgccgagaaggcccccggcggccccuacagacugggcaccagcggcagcugccccaacgccaccagcaagagcggcuucuucgccaccauggccugggccgugcccaaggacaacaacaagaacgccaccaacccccugaccguggaggugcccuacaucugcaaggagggcgaggaccagaucaccguguggggcuuccacagcgacaacaagacccagaugaagaaccuguacggcgacagcaacccccagaaguucaccagcagcgccgacggcgugaccacccacuacgugagccagaucggcggcuuccccgaccagaccgaggacggcggccugccccagagcggcagaaucgugguggacuacaugauccagaagcccggcaagaccggcaccaucguguaccagagaggcgugcugcugccccagaagguguggugcgccagcggcagaagcaaggugaucaagggcagccugccccugaucggcgaggccgacugccugcacgagaaguacggcggccugaacaagagcaagcccuacuacaccggcgagcacgccaaggccaucggcaacugccccaucugggugaagaccccccugaagcuggccaacggcaccaaguacagaccccccgccaagcugcugaaggagagaggcuucuucggcgccaucgccggcuuccuggagggcggcugggagggcaugaucgccggcuggcacggcuacaccagccacggcgcccacggcguggccguggccgccgaccugaagagcacccaggaggccaucaacaagaucaccaagaaccugaacagccugagcgagcuggaggugaagaaccugcagagacugagcggcgccauggacgagcugcacaacgagauccuggagcuggacgagaagguggacgaccugagagccgacaccaucagcagccagaucgagcuggccgugcugcugagcaacgagggcaucaucaacagcgaggacgagcaccugcuggcccuggagagaaagcugaagaagaugcugggccccagcgccguggacaucggcaacggcugcuucgagaccaagcacaagugcaaccagaccugccuggacagaaucgccgccggcaccuucaacgccggcgaguucagccugcccaccuucgacagccugaacaucaccgccgccagccugaacgacgacggccuggacaaccacaccauccugcuguacuacagcaccgccgccagcagccuggccgugacccugaugcuggccaucuucaucguguacauggugagcagagacaacgugagcugcagcaucugccuguga

SEQ ID NO: 187677 - RNA, 1755 nt, Artificial Sequence; identical to SEQ ID NO: 186486
  derived and/or modified CDS sequence (opt4) from hemagglutinin__InfluenzaB__AGX22852

SEQ ID NO: 187678 - RNA, 1755 nt, Artificial Sequence; identical to SEQ ID NO: 187098
  derived and/or modified CDS sequence (opt4) from hemagglutinin__InfluenzaB__AGX22863

SEQ ID NO: 187679 - RNA, 1755 nt, Artificial Sequence; identical to SEQ ID NO: 187098
  derived and/or modified CDS sequence (opt4) from hemagglutinin__InfluenzaB__AGX22874

SEQ ID NO: 187680 - RNA, 1755 nt, Artificial Sequence; identical to SEQ ID NO: 186486
  derived and/or modified CDS sequence (opt4) from hemagglutinin__InfluenzaB__AGX22885

SEQ ID NO: 187681 - RNA, 1755 nt, Artificial Sequence; identical to SEQ ID NO: 187659
  derived and/or modified CDS sequence (opt4) from hemagglutinin__InfluenzaB__AGX22896

SEQ ID NO: 187682 - RNA, 1755 nt, Artificial Sequence
  derived and/or modified CDS sequence (opt4) from hemagglutinin__InfluenzaB__AGX22907
augaaggccaucaucgugcugcugaugguggugaccagcaacgccgacagaaucugcaccggcaucaccagcagcaacagcccccacguggugaagaccgccacccagggcgaggugaacgugaccggcgugaucccccugaccaccacccccaccaagagcuacuucgccaaccugaagggcaccagaaccagaggcaagcugugccccgacugccugaacugcaccgaccuggacguggcccugggcagacccaugugcgugggcaccacccccagcgccaaggccagcauccugcacgaggugagacccgugaccagcggcugcuuccccaucaugcacgacagaaccaagaucagacagcuggccaaccugcugagaggcuacgagaacaucagacugagcacccagaacgugaucgacgccgagaaggcccccggcggccccuacagacugggcaccagcggcagcugccccaacgccaccagcaagagcggcuucuucgccaccauggccugggccgugcccaaggacaacaacaagaacgccaccaacccccugaccguggaggugcccuacaucugcaccgagggcgaggaccagaucaccguguggggcuuccacagcgacaacaagacccagaugaagaaccuguacggcgacagcaacccccagaaguucaccagcagcgccaacggcgugaccacccacuacgugagccagaucggcggcuuccccgaccagaccgaggacggcggccugccccagagcggcagaaucgugguggacuacaugaugcagaagcccggcaagaccggcaccaucguguaccagagaggcgugcugcugccccagaagguguggugcgccagcggcagaagcaaggugaucaagggcagccugccccugaucggcgaggccgacugccugcacgagaaguacggcggccugaacaagagcaagcccuacuacaccggcgagcacgccaaggccaucggcaacugccccaucugggugaagaccccccugaagcuggccaacggcaccaaguacagaccccccgccaagcugcugaaggagagaggcuucuucggcgccaucgccggcuuccuggagggcggcugggagggcaugaucgccggcuggcacggcuacaccagccacggcgcccacggcguggccguggccgccgaccugaagagcacccaggaggccaucaacaagaucaccaagaaccugaacagccugagcgagcuggaggugaagaaccugcagagacugagcggcgccauggacgagcugcacaacgagauccuggagcuggacgagaagguggacgaccugagagccgacaccaucagcagccagaucgagcuggccgugcugcugagcaacgagggcaucaucaacagcgaggacgagcaccugcuggcccuggagagaaagcugaagaagaugcugggccccagcgccguggacaucggcaacggcugcuucgagaccaagcacaagugcaaccagaccugccuggacagaaucgccgccggcaccuucaacgccggcgaguucagccugcccaccuucgacagccugaacaucaccgccgccagccugaacgacgacggccuggacaaccacaccauccugcuguacuacagcaccgccgccagcagccuggccgugacccugaugcuggccaucuucaucguguacauggugagcagagacagcgugagcugcagcaucugccuguga

SEQ ID NO: 187683 - RNA, 1755 nt, Artificial Sequence; identical to SEQ ID NO: 186486
  derived and/or modified CDS sequence (opt4) from hemagglutinin__InfluenzaB__AGX22918

SEQ ID NO: 187684 - RNA, 1755 nt, Artificial Sequence; identical to SEQ ID NO: 186486
  derived and/or modified CDS sequence (opt4) from hemagglutinin__InfluenzaB__AGX22929

SEQ ID NO: 187685 - RNA, 1755 nt, Artificial Sequence; identical to SEQ ID NO: 187098
  derived and/or modified CDS sequence (opt4) from hemagglutinin__InfluenzaB__AGX22940

SEQ ID NO: 187686 - RNA, 1755 nt, Artificial Sequence; identical to SEQ ID NO: 186486
  derived and/or modified CDS sequence (opt4) from hemagglutinin__InfluenzaB__AGX22951

SEQ ID NO: 187687 - RNA, 1755 nt, Artificial Sequence; identical to SEQ ID NO: 186486
  derived and/or modified CDS sequence (opt4) from hemagglutinin__InfluenzaB__AGX22962

SEQ ID NO: 187688 - RNA, 1755 nt, Artificial Sequence; identical to SEQ ID NO: 186486
  derived and/or modified CDS sequence (opt4) from hemagglutinin__InfluenzaB__AGX22973

SEQ ID NO: 187689 - RNA, 1755 nt, Artificial Sequence; identical to SEQ ID NO: 186486
  derived and/or modified CDS sequence (opt4) from hemagglutinin__InfluenzaB__AGX22984

SEQ ID NO: 187690 - RNA, 1755 nt, Artificial Sequence; identical to SEQ ID NO: 186486
  derived and/or modified CDS sequence (opt4) from hemagglutinin__InfluenzaB__AGX22995

SEQ ID NO: 187691 - RNA, 1755 nt, Artificial Sequence; identical to SEQ ID NO: 186486
  derived and/or modified CDS sequence (opt4) from hemagglutinin__InfluenzaB__AGX23006

SEQ ID NO: 187692 - RNA, 1755 nt, Artificial Sequence
  derived and/or modified CDS sequence (opt4) from hemagglutinin__InfluenzaB__AGX23017
augaaggccaucaucgugcugcugaugguggugaccagcaacgccgacagaaucugcaccggcaucaccagcagcaacagcccccacguggugaagaccgccacccagggcgaggugaacgugaccggcgugaucccccugaccaccacccccaccaagagcuacuucgccaaccugaagggcaccagaaccagaggcaagcugugccccgacugccugaacugcaccgaccuggacguggcccugggcagacccaugugcgugggcaccacccccagcgccaaggccagcauccugcacgagaucagacccgugaccagcggcugcuuccccaucaugcacgacagaaccaagaucagacagcuggccaaccugcugagaggcuacgagaacaucagacugagcacccagaacgugaucgacgccgagaaggcccccggcggccccuacagacugggcaccagcggcagcugccccaacgccaccagcaagagcggcuucuucgccaccauggccugggccgugcccaaggacaacaacaagaacgccaccaacccccugaccguggaggugcccuacaucugcaccgagggcgaggaccagaucaccguguggggcuuccacagcgacaacaagacccagaugaagaaccuguacggcgacagcaacccccagaaguucaccagcagcgccaacggcgugaccacccacuacgugagccagaucggcggcuuccccgaccagaccgaggacggcggccugccccagagcggcagaaucgugguggacuacaugaugcagaagcccggcaagaccggcaccaucguguaccagagaggcgugcugcugccccagaagguguggugcgccagcggcagaagcaaggugaucaagggcagccugccccugaucggcgaggccgacugccugcacgagaaguacggcggccugaacaagagcaagcccuacuacaccggcgagcacgccaaggccaucggcaacugccccaucugggugaagaccccccugaagcuggccaacggcaccaaguacagaccccccgccaagcugcugaaggagagaggcuucuucggcgccaucgccggcuuccuggagggcggcugggagggcaugaucgccggcuggcacggcuacaccagccacggcgcccacggcguggccguggccgccgaccugaagagcacccaggaggccaucaacaagaucaccaagaaccugaacagccugagcgagcuggaggugaagaaccugcagagacugagcggcgccauggacgagcugcacaacgagauccuggagcuggacgagaagguggacgaccugagagccgacaccaucagcagccagaucgagcuggccgugcugcugagcaacgagggcaucaucaacagcgaggacgagcaccugcuggcccuggagagaaagcugaagaagaugcugggccccagcgccguggacaucggcaacggcugcuucgagaccaagcacaagugcaaccagaccugccuggacagaaucgccgccggcaccuucaacgccggcgaguucagccugcccaccuucgacagccugaacaucaccgccgccagccugaacgacgacggccuggacaaccacaccauccugcuguacuacagcaccgccgccagcagccuggccgugacccugaugcuggccaucuucaucguguacauggugagcagagacaacgugagcugcagcaucugccuguga

SEQ ID NO: 187693 - RNA, 1755 nt, Artificial Sequence
  derived and/or modified CDS sequence (opt4) from hemagglutinin__InfluenzaB__AGX23028
augaaggccaucaucgugcugcugaugguggugaccagcaacgccgacagaaucugcaccggcaucaccagcagcaacagcccccacguggugaagaccgccacccagggcgaggugaacgugaccggcgugaucccccugaccaccacccccaccaagagcuacuucgccaaccugaagggcaccaagaccagaggcaagcugugccccgacugccugaacugcaccgaccuggacguggcccugggcagacccaugugcgugggcaccacccccagcgccaaggccagcauccugcacgaggugagacccgugaccagcggcugcuuccccaucaugcacgacagaaccaagaucagacagcuggccaaccugcugagaggcuacgagaacaucagacugagcacccagaacgugaucgacgccgagaaggcccccggcggccccuacaagcugggcaccagcggcagcugccccaacgccaccagcaagagcggcuucuucgccaccauggccugggccgugcccaaggacaacaacaagaacgccaccaacccccugaccguggaggugcccuacaucugcaccgagggcgaggaccagaucaccguguggggcuuccacagcgacaacaagacccagaugaagaaccuguacggcgacagcaacccccagaaguucaccagcagcgccaacggcgugaccacccacuacgugagccagaucggcggcuuccccgaccagaccgaggacggcggccugccccagagcggcagaaucgugguggacuacaugaugcagaagcccggcaagaccggcaccaucguguaccagagaggcgugcugcugccccagaagguguggugcgccagcggcagaagcaaggugaucaagggcagccugccccugaucggcgaggccgacugccugcacgagaaguacggcggccugaacaagagcaagcccuacuacaccggcgagcacgccaaggccaucggcaacugccccaucugggugaagaccccccugaagcuggccaacggcaccaaguacagaccccccgccaagcugcugaaggagagaggcuucuucggcgccaucgccggcuuccuggagggcggcugggagggcaugaucgccggcuggcacggcuacaccagccacggcgcccacggcguggccguggccgccgaccugaagagcacccaggaggccaucaacaagaucaccaagaaccugaacagccugagcgagcuggaggugaagaaccugcagagacugagcggcgccauggacgagcugcacaacgagauccuggagcuggacgagaagguggacgaccugagagccgacaccaucagcagccagaucgagcuggccgugcugcugagcaacgagggcaucaucaacagcgaggacgagcaccugcuggcccuggagagaaagcugaagaagaugcugggccccagcgccguggacaucggcaacggcugcuucgagaccaagcacaagugcaaccagaccugccuggacagaaucgccgccggcaccuucaacgccggcgaguucagccugcccaccuucgacagccugaacaucaccgccgccagccugaacgacgacggccuggacaaccacaccauccugcuguacuacagcaccgccgccagcagccuggccgugacccugaugcuggccaucuucaucguguacauggugagcagagacaacgugagcugcagcaucugccuguga

SEQ ID NO: 187694 - RNA, 1755 nt, Artificial Sequence; identical to SEQ ID NO: 186486
  derived and/or modified CDS sequence (opt4) from hemagglutinin__InfluenzaB__AGX23039

SEQ ID NO: 187695 - RNA, 1755 nt, Artificial Sequence
  derived and/or modified CDS sequence (opt4) from hemagglutinin__InfluenzaB__AGX23050
augaaggccaucaucgugcugcugaugguggugaccagcaacgccgacagaaucugcaccggcaucaccagcagcaacagcccccacguggugaagaccgccacccagggcgaggugaacgugaccggcgugaucccccugaccaccacccccaccaagagcuacuucgccaaccugaagggcaccagaaccagaggcaagcugugccccgacugccugaacugcaccgaccuggacguggcccugggcagacccaugugcgugggcaccacccccagcgccaaggccagcauccugcacgaggugagccccgugaccagcggcugcuuccccaucaugcacgacagaaccaagaucagacagcuggccaaccugcugagaggcuacgagaacaucagacugagcacccagaacgugaucgacgccgagaaggcccccggcggccccuacagacugggcaccagcggcagcugccccaacgccaccagcaagagcggcuucuucgccaccauggccugggccgugcccaaggacaacaacaagaacgccaccaacccccugaccguggaggugcccuacaucugcaccgagggcgaggaccagaucaccguguggggcuuccacagcgacaacaagacccagaugaagaaccuguacggcgacagcaacccccagaaguucaccagcagcgccaacggcgugaccacccacuacgugagccagaucggcggcuuccccgaccagaccgaggacggcggccugccccagagcggcagaaucgugguggacuacaugaugcagaagcccggcaagaccggcaccaucguguaccagagaggcgugcugcugccccagaagguguggugcgccagcggcagaagcaaggugaucaagggcagccugccccugaucggcgaggccgacugccugcacgagaaguacggcggccugaacaagagcaagcccuacuacaccggcgagcacgccaaggccaucggcaacugccccaucugggugaagaccccccugagacuggccaacggcaccaaguacagaccccccgccaagcugcugaaggagagaggcuucuucggcgccaucgccggcuuccuggagggcggcugggagggcaugaucgccggcuggcacggcuacaccagccacggcgcccacggcguggccguggccgccgaccugaagagcacccaggaggccaucaacaagaucaccaagaaccugaacagccugagcgagcuggaggugaagaaccugcagagacugagcggcgccauggacgagcugcacaacgagauccuggagcuggacgagaagguggacgaccugagagccgacaccaucagcagccagaucgagcuggccgugcugcugagcaacgagggcaucaucaacagcgaggacgagcaccugcuggcccuggagagaaagcugaagaagaugcugggccccagcgccguggacaucggcaacggcugcuucgagaccaagcacaagugcaaccagaccugccuggacagaaucgccgccggcaccuucaacgccggcgaguucagccugcccaccuucgacagccugaacaucaccgccgccagccugaacgacgacggccuggacaaccacaccauccugcuguacuacagcaccgccgccagcagccuggccgugacccugaugcuggccaucuucaucguguacauggugagcagagacaacgugagcugcagcaucugccuguga

SEQ ID NO: 187696 - RNA, 1755 nt, Artificial Sequence
  derived and/or modified CDS sequence (opt4) from hemagglutinin__InfluenzaB__AGX23061
augaaggccaucaucgugcugcugaugguggugaccagcaacgccgacagaaucugcaccggcaucaccagcagcaacagcccccacguggugaagaccgccacccagggcgaggugaacgugaccggcgugaucccccugaccaccacccccaccaagagcuacuucgccaaccugaagggcaccagaaccagaggcaagcugugccccgacugccugaacugcaccgaccuggacguggcccugggcagacccaugugcgugggcaccacccccagcgccaaggccagcauccugcacgaggugagacccgugaccagcggcugcuuccccaucaugcacgacagaaccaagaucagacagcuggccaaccugcugagaggcuacgagaacaucagacugagcacccagaacgugaucgacgccgagaaggcccccggcggccccuacagacugggcaccagcggcagcugccccaacgccaccagcaagagcggcuucuucgccaccauggccugggccgugcccaaggacaacaacaagaacgccaccaacccccugaccguggaggugcccuacaucugcaccgagggcgaggaccagaucaccguguggggcuuccacagcgacaacaagacccagaugaagaaccuguacggcgacagcaacccccagaaguucaccagcagcgccaacggcgugaccacccacuacgugagccagaucggcggcuuccccgaccagaccgaggacggcggccugccccagagcggcagaaucgugguggacuacaugaugcagaagcccggcaagaccggcaccaucguguaccagagaggcgugcugcugccccagaagguguggugcgccagcggcagaagcaaggugaucaagggcagccugccccugaucggcgaggccgacugccugcacgagaaguacggcggccugaacaagagcaagcccuacuacaccggcgagcacgccaaggccaucggcaacugccccaucugggugaagaccccccugagacuggccaacggcaccaaguacagaccccccgccaagcugcugaaggagagaggcuucuucggcgccaucgccggcuuccuggagggcggcugggagggcaugaucgccggcuggcacggcuacaccagccacggcgcccacggcguggccguggccgccgaccugaagagcacccaggaggccaucaacaagaucaccaagaaccugaacagccugagcgagcuggaggugaagaaccugcagagacugagcggcgccauggacgagcugcacaacgagauccuggagcuggacgagaagguggacgaccugagagccgacaccaucagcagccagaucgagcuggccgugcugcugagcaacgagggcaucaucaacagcgaggacgagcaccugcuggcccuggagagaaagcugaagaagaugcugggccccagcgccguggacaucggcaacggcugcuucgagaccaagcacaagugcaaccagaccugccuggacagaaucgccgccggcaccuucaacgccggcgaguucagccugcccaccuucgacagccugaacaucaccgccgccagccugaacgacgacggccuggacaaccacaccauccugcuguacuacagcaccgccgccagcagccuggccgugacccugaugcuggccaucuucaucguguacauggugagcagagacaacgugagcugcagcaucugccuguga

SEQ ID NO: 187697 - RNA, 1755 nt, Artificial Sequence; identical to SEQ ID NO: 186486
  derived and/or modified CDS sequence (opt4) from hemagglutinin__InfluenzaB__AGX23072

SEQ ID NO: 187698 - RNA, 1755 nt, Artificial Sequence; identical to SEQ ID NO: 187098
  derived and/or modified CDS sequence (opt4) from hemagglutinin__InfluenzaB__AGX23083

SEQ ID NO: 187699 - RNA, 1755 nt, Artificial Sequence; identical to SEQ ID NO: 186486
  derived and/or modified CDS sequence (opt4) from hemagglutinin__InfluenzaB__AGX23094

SEQ ID NO: 187700 - RNA, 1755 nt, Artificial Sequence; identical to SEQ ID NO: 186486
  derived and/or modified CDS sequence (opt4) from hemagglutinin__InfluenzaB__AGX23105

SEQ ID NO: 187701 - RNA, 1755 nt, Artificial Sequence; identical to SEQ ID NO: 187098
  derived and/or modified CDS sequence (opt4) from hemagglutinin__InfluenzaB__AGX23116

SEQ ID NO: 187702 - RNA, 1755 nt, Artificial Sequence; identical to SEQ ID NO: 186486
  derived and/or modified CDS sequence (opt4) from hemagglutinin__InfluenzaB__AGX23127

SEQ ID NO: 187703 - RNA, 1755 nt, Artificial Sequence; identical to SEQ ID NO: 186486
  derived and/or modified CDS sequence (opt4) from hemagglutinin__InfluenzaB__AGX23138

SEQ ID NO: 187704 - RNA, 1755 nt, Artificial Sequence
  derived and/or modified CDS sequence (opt4) from hemagglutinin__InfluenzaB__AGX23149
augaaggccaucaucgugcugcugaugguggugaccagcaacgccgacagaaucugcaccggcaucaccagcagcgacagcccccacguggugaagaccgccacccagggcgaggugaacgugaccggcgugaucccccugaccaccacccccaccaagagcuacuucgccaaccugaagggcaccagaaccagaggcaagcugugccccgacugccugaacugcaccgaccuggacguggcccugggcagacccaugugcgugggcaccacccccagcgccaaggccagcauccugcacgaggugagacccgugaccagcggcugcuuccccaucaugcacgacagaaccaagaucagacagcuggccaaccugcugagaggcuacgagaacaucagacugagcacccagaacgugaucgacgccgagaaggcccccggcggccccuacagacugggcaccagcggcagcugccccaacgccaccagcaagagcggcuucuucgccaccauggccugggccgugcccaaggacaacaacaagaacgccaccaacccccugaccguggaggugcccuacaucugcaccgagggcgaggaccagaucaccguguggggcuuccacagcgacaacaagacccagaugaagaaccuguacggcgacagcaacccccagaaguucaccagcagcgccaacggcgugaccacccacuacgugagccagaucggcggcuuccccgaccagaccgaggacggcggccugccccagagcggcagaaucgugguggacuacaugaugcagaagcccggcaagaccggcaccaucguguaccagagaggcgugcugcugccccagaagguguggugcgccagcggcagaagcaaggugaucaagggcagccugccccugaucggcgaggccgacugccugcacgagaaguacggcggccugaacaagagcaagcccuacuacaccggcgagcacgccaaggccaucggcaacugccccaucugggugaagaccccccugaagcuggccaacggcaccaaguacagaccccccgccaagcugcugaaggagagaggcuucuucggcgccaucgccggcuuccuggagggcggcugggagggcaugaucgccggcuggcacggcuacaccagccacggcgcccacggcguggccguggccgccgaccugaagagcacccaggaggccaucaacaagaucaccaagaaccugaacagccugagcgagcuggaggugaagaaccugcagagacugagcggcgccauggacgagcugcacaacgagauccuggagcuggacgagaagguggacgaccugagagccgacaccaucagcagccagaucgagcuggccgugcugcugagcaacgagggcaucaucaacagcgaggacgagcaccugcuggcccuggagagaaagcugaagaagaugcugggccccagcgccguggacaucggcaacggcugcuucgagaccaagcacaagugcaaccagaccugccuggacagaaucgccgccggcaccuucaacgccggcgaguucagccugcccaccuucgacagccugaacaucaccgccgccagccugaacgacgacggccuggacaaccacaccauccugcuguacuacagcaccgccgccagcagccuggccgugacccugaugcuggccaucuucaucguguacauggugagcagagacaacgugagcugcagcaucugccuguga

SEQ ID NO: 187705 - RNA, 1755 nt, Artificial Sequence
  derived and/or modified CDS sequence (opt4) from hemagglutinin__InfluenzaB__AGX23160
augaaggccaucaucgugcugcugaugguggugaccagcaacgccgacagaaucugcaccggcaucaccagcagcaacagcccccacguggugaagaccgccacccagggcgaggugaacgugaccggcgugaucccccugaccaccacccccaccaagagcuacuucgccaaccugaagggcaccagaaccagaggcaagcugugccccgacugccugaacugcaccgaccuggacguggcccugggcagacccaugugcgugggcaucacccccagcgccaaggccagcauccugcacgaggugagacccgugaccagcggcugcuuccccaucaugcacgacagaaccaagaucagacagcuggccaaccugcugagaggcuacgagaacaucagacugagcacccagaacgugaucgacgccgagaaggcccccggcggccccuacagacugggcaccagcggcagcugccccaacgccaccagcaagagcggcuucuucgccaccauggccugggccgugcccaaggacaacaacaagaacgccaccaacccccugaccguggaggugcccuacaucugcaccgagggcgaggaccagaucaccguguggggcuuccacagcgacaacaagacccagaugaagaaccuguacggcgacagcaacccccagagauucaccagcagcgccaacggcgugaccacccacuacgugagccagaucggcggcuuccccgaccagaccgaggacggcggccugccccagagcggcagaaucgugguggacuacaugaugcagaagcccggcaagaccggcaccaucguguaccagagaggcgugcugcugccccagaagguguggugcgccagcggcagaagcaaggugaucaagggcagccugccccugaucggcgaggccgacugccugcacgagaaguacggcggccugaacaagagcaagcccuacuacaccggcgagcacgccaaggccaucggcaacugccccaucugggugaagaccccccugagacuggccaacggcaccaaguacagaccccccgccaagcugcugaaggagagaggcuucuucggcgccaucgccggcuuccuggagggcggcugggagggcaugaucgccggcuggcacggcuacaccagccacggcgcccacggcguggccguggccgccgaccugaagagcacccaggaggccaucaacaagaucaccaagaaccugaacagccugagcgagcuggaggugaagaaccugcagagacugagcggcgccauggacgagcugcacaacgagauccuggagcuggacgagaagguggacgaccugagagccgacaccaucagcagccagaucgagcuggccgugcugcugagcaacgagggcaucaucaacagcgaggacgagcaccugcuggcccuggagagaaagcugaagaagaugcugggccccagcgccguggacaucggcaacggcugcuucgagaccaagcacaagugcaaccagaccugccuggacagaaucgccgccggcaccuucaacgccggcgaguucagccugcccaccuucgacagccugaacaucaccgccgccagccugaacgacgacggccuggacaaccacaccauccugcuguacuacagcaccgccgccagcagccuggccgugacccugaugcuggccaucuucaucguguacauggugagcagagacaacgugagcugcagcaucugccuguga

SEQ ID NO: 187706 - RNA, 1755 nt, Artificial Sequence
  derived and/or modified CDS sequence (opt4) from hemagglutinin__InfluenzaB__AGX23171
augaaggccaucaucgugcugcugaugguggugaccagcaacgccgacagaaucugcaccggcaucaccagcagcaacagcccccacguggugaagaccgccacccagggcgaggugaacgugaccggcgugaucccccugaccaccacccccaccaagagcuacuucgccaaccugaagggcaccagaaccagaggcaagcugugccccgacugccugaacugcaccgaccuggacguggcccugggcagacccaugugcgugggcaccacccccagcgccaaggccagcauccugcacgaggugagacccgugaccagcggcugcuuccccaucaugcacgacagaaccaagaucagacagcuggccaaccugcugagaggcuacgagaacaucagacugagcacccagaacgugaucgacgccgagaaggcccccggcggccccuacagacugggcaccagcggcagcugccccaacgccaccagcaagagcggcuucuucgccaccauggccugggccgugcccaaggacaacaacaagaacgccaccaacccccugaccguggaggugcccuacaucugcaccgagggcgaggaccagaucaccguguggggcuuccacagcgacaacaagacccagaugaagaaccuguacggcgacagcaacccccagagauucaccagcagcgccaacggcgugaccacccacuacgugagccagaucggcggcuuccccgaccagaccgaggacggcggccugccccagagcggcagaaucgugguggacuacaugaugcagaagcccggcaagaccggcaccaucguguaccagagaggcgugcugcugccccagaagguguggugcgccagcggcagaagcaaggugaucaagggcagccugccccugaucggcgaggccgacugccugcacgagaaguacggcggccugaacaagagcaagcccuacuacaccggcgagcacgccaaggccaucggcaacugccccaucugggugaagaccccccugagacuggccaacggcaccaaguacagaccccccgccaagcugcugaaggagagaggcuucuucggcgccaucgccggcuuccuggagggcggcugggagggcaugaucgccggcuggcacggcuacaccagccacggcgcccacggcguggccguggccgccgaccugaagagcacccaggaggccaucaacaagaucaccaagaaccugaacagccugagcgagcuggaggugaagaaccugcagagacugagcggcgccauggacgagcugcacaacgagauccuggagcuggacgagaagguggacgaccugagagccgacaccaucagcagccagaucgagcuggccgugcugcugagcaacgagggcaucaucaacagcgaggacgagcaccugcuggcccuggagagaaagcugaagaagaugcugggccccagcgccguggacaucggcaacggcugcuucgagaccaagcacaagugcaaccagaccugccuggacagaaucgccgccggcaccuucaacgccggcgaguucagccugcccaccuucgacagccugaacaucaccgccgccagccugaacgacgacggccuggacaaccacaccauccugcuguacuacagcaccgccgccagcagccuggccgugacccugaugcuggccaucuucaucguguacauggugagcagagacaacgugagcugcagcaucugccuguga

SEQ ID NO: 187707 - RNA, 1755 nt, Artificial Sequence; identical to SEQ ID NO: 186486
  derived and/or modified CDS sequence (opt4) from hemagglutinin__InfluenzaB__AGX23182

SEQ ID NO: 187708 - RNA, 1755 nt, Artificial Sequence; identical to SEQ ID NO: 186486
  derived and/or modified CDS sequence (opt4) from hemagglutinin__InfluenzaB__AGX23193

SEQ ID NO: 187709 - RNA, 1755 nt, Artificial Sequence; identical to SEQ ID NO: 187098
  derived and/or modified CDS sequence (opt4) from hemagglutinin__InfluenzaB__AGX23204

SEQ ID NO: 187710 - RNA, 1755 nt, Artificial Sequence; identical to SEQ ID NO: 186486
  derived and/or modified CDS sequence (opt4) from hemagglutinin__InfluenzaB__AGX23215

SEQ ID NO: 187711 - RNA, 1755 nt, Artificial Sequence
  derived and/or modified CDS sequence (opt4) from hemagglutinin__InfluenzaB__AGX23226
augaaggccaucaucgugcugcugaugguggugaccagcaacgccgacagaaucugcaccggcaucaccagcagcaacagcccccacguggugaagaccgccacccagggcgaggugaacgugaccggcgugaucccccugaccaccacccccaccaagagcuacuucgccaaccugaagggcaccagaaccagaggcaagcugugccccgacugccugaacugcaccgaccuggacguggcccugggcagacccaugugcgugggcaccacccccagcgccaaggccagcauccugcacgaggugagacccgugaccagcggcugcuuccccaucaugcacgacagaaccaagaucagacagcuggccaaccugcugagaggcuacgagaacaucagacugagcacccagaacgugaucgacgccgagaaggcccccggcggccccuacagacugggcaccagcggcagcugccccaacgccaccagcaagagcggcuucuucgccaccauggccugggccgugcccaaggacaacaacaagaacgccaccaacccccugaccguggaggugcccuacaucugcaaggagggcgaggaccagaucaccguguggggcuuccacagcgacaacaagacccagaugaagaaccuguacggcgacagcaacccccagaaguucaccagcagcgccagcggcgugaccacccacuacgugagccagaucggcggcuuccccgaccagaccgaggacggcggccugccccagagcggcagaaucgugguggacuacaugauccagaagcccggcaagaccggcaccaucguguaccagagaggcgugcugcugccccagaagguguggugcgccagcggcagaagcaaggugaucaagggcagccugccccugaucggcgaggccgacugccugcacgagaaguacggcggccugaacaagagcaagcccuacuacaccggcgagcacgccaaggccaucggcaacugccccaucugggugaagaccccccugaagcuggccaacggcaccaaguacagaccccccgccaagcugcugaaggagagaggcuucuucggcgccaucgccggcuuccuggagggcggcugggagggcaugaucgccggcuggcacggcuacaccagccacggcgcccacggcguggccguggccgccgaccugaagagcacccaggaggccaucaacaagaucaccaagaaccugaacagccugagcgagcuggaggugaagaaccugcagagacugagcggcgccauggacgagcugcacaacgagauccuggagcuggacgagaagguggacgaccugagagccgacaccaucagcagccagaucgagcuggccgugcugcugagcaacgagggcaucaucaacagcgaggacgagcaccugcuggcccuggagagaaagcugaagaagaugcugggccccagcgccguggacaucggcaacggcugcuucgagaccaagcacaagugcaaccagaccugccuggacagaaucgccgccggcaccuucaacgccggcgaguucagccugcccaccuucgacagccugaacaucaccgccgccagccugaacgacgacggccuggacaaccacaccauccugcuguacuacagcaccgccgccagcagccuggccgugacccugaugcuggccaucuucaucguguacauggugagcagagacaacgugagcugcagcaucugccuguga

SEQ ID NO: 187712 - RNA, 1755 nt, Artificial Sequence; identical to SEQ ID NO: 187659
  derived and/or modified CDS sequence (opt4) from hemagglutinin__InfluenzaB__AGX23237

SEQ ID NO: 187713 - RNA, 1755 nt, Artificial Sequence
  derived and/or modified CDS sequence (opt4) from hemagglutinin__InfluenzaB__AGX23248
augaaggccaucaucgugcugcugaugguggugaccagcaacgccgacagaaucugcaccggcaucaccagcagcaacagcccccacguggugaagaccgccacccagggcgaggugaacgugaccggcgugaucccccugaccaccacccccaccaagagcuacuucgccaaccugaagggcaccagaaccagaggcaagcugugccccgacugccugaacugcaccgaccuggacguggcccugggcagacccaugugcgugggcaccacccccagcgccaaggccagcauccugcacgaggugagacccgugaccagcggcugcuuccccaucaugcacgacagaaccaagaucagacagcuggccaaccugcugagaggcuacgagaacaucagacugagcacccagaacgugaucgacgccgagaaggcccccggcggccccuacagacugggcaccagcggcagcugccccaacgccaccagcaagagcggcuucuucgccaccauggccugggccgugcccaaggacaacaacaagaacgccaccaacccccugaccguggaggugcccuacaucugcaaggagggcgaggaccagaucaccguguggggcuuccacagcgacaacaagacccagaugaagaaccuguacggcgacagcaacccccagaaguucaccagcagcgccagcggcgugaccacccacuacgugagccagaucggcggcuuccccgaccagaccgaggacggcggccugccccagagcggcagaaucgugguggacuacaugauccagaagcccggcaagaccggcaccaucguguaccagagaggcgugcugcugccccagaagguguggugcgccagcggcagaagcaaggugaucaagggcagccugccccugaucggcgaggccgacugccugcacgagaaguacggcggccugaacaagagcaagcccuacuacaccggcgagcacgccaaggccaucggcaacugccccaucugggugaagaccccccugaagcuggccaacggcaccaaguacagaccccccgccaagcugcugaaggagagaggcuucuucggcgccaucgccggcuuccuggagggcggcugggagggcaugaucgccggcuggcacggcuacaccagccacggcgcccacggcguggccguggccgccgaccugaagagcacccaggaggccaucaacaagaucaccaagaaccugaacagccugagcgagcuggaggugaagaaccugcagagacugagcggcgccauggacgagcugcacaacgagauccuggagcuggacgagaagguggacgaccugagagccgacaccaucagcagccagaucgagcuggccgugcugcugagcaacgagggcaucaucaacagcgaggacgagcaccugcuggcccuggagagaaagcugaagaagaugcugggccccagcgccguggacaucggcaacggcugcuucgagaccaagcacaagugcaaccagaccugccugaacagaaucgccgccggcaccuucaacgccggcgaguucagccugcccaccuucgacagccugaacaucaccgccgccagccugaacgacgacggccuggacaaccacaccauccugcuguacuacagcaccgccgccagcagccuggccgugacccugaugcuggccaucuucaucguguacauggugagcagagacaacgugagcugcagcaucugccuguga

SEQ ID NO: 187714 - RNA, 1755 nt, Artificial Sequence; identical to SEQ ID NO: 186486
  derived and/or modified CDS sequence (opt4) from hemagglutinin__InfluenzaB__AGX23259

SEQ ID NO: 187715 - RNA, 1755 nt, Artificial Sequence; identical to SEQ ID NO: 186486
  derived and/or modified CDS sequence (opt4) from hemagglutinin__InfluenzaB__AGX23270

SEQ ID NO: 187716 - RNA, 1755 nt, Artificial Sequence
  derived and/or modified CDS sequence (opt4) from hemagglutinin__InfluenzaB__AGX23281
augaaggccaucaucgugcugcugaugguggugaccagcaacgccgacagaaucugcaccggcaucaccagcagcaacagcccccacguggugaagaccgccacccagggcgaggugaacgugaccggcgugaucccccugaccaccacccccaccaagagcuacuucgccaaccugaagggcaccagaaccagaggcaagcugugccccgacugccugaacugcaccgaccuggacguggcccugggcagacccaugugcgugggcaccacccccagcgccaaggccagcauccugcacgaggugagacccgugaccagcggcugcuuccccaucaugcacgacagaaccaagaucagacagcuggccaaccugcugagaggcuacgagaacaucagacugagcacccagaacgugaucgacgccgagaaggcccccggcggccccuacagacugggcaccagcggcagcugccccaacgccgccagcaagagcggcuucuucgccaccauggccugggccgugcccaaggacaacaacaagaacgccaccaacccccugaccguggaggugcccuacaucugcaccgagggcgaggaccagaucaccguguggggcuuccacagcgacaacaagacccagaugaagaaccuguacggcgacagcaacccccagaaguucaccagcagcgccaacggcgugaccacccacuacgugagccagaucggcggcuuccccgaccagaccgaggacggcggccugccccagagcggcagaaucgugguggacuacaugaugcagaagcccggcaagaccggcaccaucguguaccagagaggcgugcugcugccccagaagguguggugcgccagcggcagaagcaaggugaucaagggcagccugccccugaucggcgaggccgacugccugcacgagaaguacggcggccugaacaagagcaagcccuacuacaccggcgagcacgccaaggccaucggcaacugccccaucugggugaagaccccccugaagcuggccaacggcaccaaguacagaccccccgccaagcugcugaaggagagaggcuucuucggcgccaucgccggcuuccuggagggcggcugggagggcaugaucgccggcuggcacggcuacaccagccacggcgcccacggcguggccguggccgccgaccugaagagcacccaggaggccaucaacaagaucaccaagaaccugaacagccugagcgagcuggaggugaagaaccugcagagacugagcggcgccauggacgagcugcacagcgagauccuggagcuggacgagaagguggacgaccugagagccgacaccaucagcagccagaucgagcuggccgugcugcugagcaacgagggcaucaucaacagcgaggacgagcaccugcuggcccuggagagaaagcugaagaagaugcugggccccagcgccguggacaucggcaacggcugcuucgagaccaagcacaagugcaaccagaccugccuggacagaaucgccgccggcaccuucaacgccggcgaguucagccugcccaccuucgacagccugaacaucaccgccgccagccugaacgacgacggccuggacaaccacaccauccugcuguacuacagcaccgccgccagcagccuggccgugacccugaugcuggccaucuucaucguguacauggugagcagagacaacgugagcugcagcaucugccuguga

SEQ ID NO: 187717 - RNA, 1755 nt, Artificial Sequence
  derived and/or modified CDS sequence (opt4) from hemagglutinin__InfluenzaB__AGX23292
augaaggccaucaucgugcugcugaugguggugaccagcaacgccgacagaaucugcaccggcaucaccagcagcaacagcccccacguggugaagaccgccacccagggcgaggugaacgugaccggcgugaucccccugaccaccacccccaccaagagcuacuucgccaaccugaagggcaccagaaccagaggcaagcugugccccgacugccugaacugcaccgaccuggacguggcccugggcagacccaugugcgugggcaccacccccagcgccaaggccagcauccugcacgaggugagacccgugaccagcggcugcuuccccaucaugcacgacagaaccaagaucagacagcuggccaaccugcugagaggcuacgagaacaucagacugagcacccagaacgugaucgacgccgagaaggcccccggcggccccuacagacugggcaccagcggcagcugccccaacgccaacagcaagagcggcuucuucgccaccauggccugggccgugcccaaggacaacaacaagaacgccaccaacccccugaccguggaggugcccuacaucugcaccgagggcgaggaccagaucaccguguggggcuuccacagcgacaacaagacccagaugaagaaccuguacggcgacagcaacccccagaaguucaccagcagcgccaacggcgugaccacccacuacgugagccagaucggcggcuuccccgaccagaccgaggacggcggccugccccagagcggcagaaucgugguggacuacaugaugcagaagcccggcaagaccggcaccaucguguaccagagaggcgugcugcugccccagaagguguggugcgccagcggcagaagcaaggugaucaagggcagccugccccugaucggcgaggccgacugccugcacgagaaguacggcggccugaacaagagcaagcccuacuacaccggcgagcacgccaaggccaucggcaacugccccaucugggugaagaccccccugaagcuggccaacggcaccaaguacagaccccccgccaagcugcugaaggagagaggcuucuucggcgccaucgccggcuuccuggagggcggcugggagggcaugaucgccggcuggcacggcuacaccagccacggcgcccacggcguggccguggccgccgaccugaagagcacccaggaggccaucaacaagaucaccaagaaccugaacagccugagcgagcuggaggugaagaaccugcagagacugagcggcgccauggacgagcugcacaacgagauccuggagcuggacgagaagguggacgaccugagagccgacaccaucagcagccagaucgagcuggccgugcugcugagcaacgagggcaucaucaacagcgaggacgagcaccugcuggcccuggagagaaagcugaagaagaugcugggccccagcgccguggacaucggcaacggcugcuucgagaccaagcacaagugcaaccagaccugccuggacagaaucgccgccggcaccuucaacgccggcgaguucagccugcccaccuucgacagccugaacaucaccgccgccagccugaacgacgacggccuggacaaccacaccauccugcuguacuacagcaccgccgccagcagccuggccgugacccugaugcuggccaucuucaucguguacauggugagcagagacaacgugagcugcagcaucugccuguga

SEQ ID NO: 187718 - RNA, 1755 nt, Artificial Sequence
  derived and/or modified CDS sequence (opt4) from hemagglutinin__InfluenzaB__AGX23314
augaaggccaucaucgugcugcugaugguggugaccagcaacgccgacagaaucugcaccggcaucaccagcagcaacagcccccacguggugaagaccgccacccagggcgaggugaacgugaccggcgugaucccccugaccaccacccccaccaagagcuacuucgccaaccugaagggcaccagaaccagaggcaagcugugccccgacugccugaacugcaccgaccuggacguggcccugggcagacccaugugcgugggcaccacccccagcgccaaggccagcauccugcacgaggugagacccgugaccagcggcugcuuccccaucaugcacgacagaaccaagaucagacagcuggccaaccugcugagaggcuacgagaacaucagacugagcacccagaacgugaucgacgccgagagagcccccggcggccccuacagacugggcaccagcggcagcugccccaacgccaccagcaagagcggcuucuucgccaccauggccugggccgugcccaaggacaacaacaagaacgccaccaacccccugaccguggaggugcccuacaucugcaccgagggcgaggaccagaucaccguguggggcuuccacagcgacaacaagacccagaugaagaaccuguacggcgacagcaacccccagaaguucaccagcagcgccaacggcgugaccacccacuacgugagccagaucggcggcuuccccgaccagaccgaggacggcggccugccccagagcggcagaaucgugguggacuacaugaugcagaagcccggcaagaccggcaccaucguguaccagagaggcgugcugcugccccagaagguguggugcgccagcggcagaagcaaggugaucaagggcagccugccccugaucggcgaggccgacugccugcacgagaaguacggcggccugaacaagagcaagcccuacuacaccggcgagcacgccaaggccaucggcaacugccccaucugggugaagaccccccugaagcuggccaacggcaccaaguacagaccccccgccaagcugcugaaggagagaggcuucuucggcgccaucgccggcuuccuggagggcggcugggagggcaugaucgccggcuggcacggcuacaccagccacggcgcccacggcguggccguggccgccgaccugaagagcacccaggaggccaucaacaagaucaccaagaaccugaacagccugagcgagcuggaggugaagaaccugcagagacugagcggcgccauggacgagcugcacaacgagauccuggagcuggacgagaagguggacgaccugagagccgacaccaucagcagccagaucgagcuggccgugcugcugagcaacgagggcaucaucaacagcgaggacgagcaccugcuggcccuggagagaaagcugaagaagaugcugggccccagcgccguggacaucggcaacggcugcuucgagaccaagcacaagugcaaccagaccugccuggacagaaucgccgccggcaccuucaacgccggcgaguucagccugcccaccuucgacagccugaacaucaccgccgccagccugaacgacgacggccuggacaaccacaccauccugcuguacuacagcaccgccgccagcagccuggccgugacccugaugcuggccaucuucaucguguacauggugagcagagacaacgugagcugcagcaucugccuguga

SEQ ID NO: 187719 - RNA, 1755 nt, Artificial Sequence; identical to SEQ ID NO: 187718
  derived and/or modified CDS sequence (opt4) from hemagglutinin__InfluenzaB__AGX23325

SEQ ID NO: 187720 - RNA, 1755 nt, Artificial Sequence; identical to SEQ ID NO: 187718
  derived and/or modified CDS sequence (opt4) from hemagglutinin__InfluenzaB__AGX23336

SEQ ID NO: 187721 - RNA, 1755 nt, Artificial Sequence; identical to SEQ ID NO: 187718
  derived and/or modified CDS sequence (opt4) from hemagglutinin__InfluenzaB__AGX23347

SEQ ID NO: 187722 - RNA, 1755 nt, Artificial Sequence; identical to SEQ ID NO: 187718
  derived and/or modified CDS sequence (opt4) from hemagglutinin__InfluenzaB__AGX23358

SEQ ID NO: 187723 - RNA, 1755 nt, Artificial Sequence; identical to SEQ ID NO: 187718
  derived and/or modified CDS sequence (opt4) from hemagglutinin__InfluenzaB__AGX23369

SEQ ID NO: 187724 - RNA, 1755 nt, Artificial Sequence; identical to SEQ ID NO: 187718
  derived and/or modified CDS sequence (opt4) from hemagglutinin__InfluenzaB__AGX23380

SEQ ID NO: 187725 - RNA, 1755 nt, Artificial Sequence; identical to SEQ ID NO: 186486
  derived and/or modified CDS sequence (opt4) from hemagglutinin__InfluenzaB__AGX23391

SEQ ID NO: 187726 - RNA, 1755 nt, Artificial Sequence
  derived and/or modified CDS sequence (opt4) from hemagglutinin__InfluenzaB__AGX23413
augaaggccaucaucgugcugcugaugguggugaccagcaacgccgacagaaucugcaccggcaucaccagcagcaacagcccccacguggugaagaccgccacccagggcgaggugaacgugaccggcgugaucccccugaccaccacccccaccaagagcuacuucgccaaccugaagggcaccagaaccagaggcaagcugugccccgacugccugaacugcaccgaccuggacguggcccugggcagacccaugugcgugggcaccacccccagcgccaaggccagcauccugcacgaggugagacccgugaccagcggcugcuuccccaucaugcacgacagaaccaagaucagacagcuggccaaccugcugagaggcuacgagaacaucagacugagcaaccagaacgugaucgacgccgagagagcccccggcggccccuacagacugggcaccagcggcagcugccccaacgccaccagcaagagcggcuucuucgccaccauggccugggccgugcccaaggacaacaacaagaacgccaccaacccccugaccguggaggugcccuacaucugcaccgagggcgaggaccagaucaccguguggggcuuccacagcgacaacaagacccagaugaagaaccuguacggcgacagcaacccccagaaguucaccagcagcgccaacggcgugaccacccacuacgugagccagaucggcggcuuccccgaccagaccgaggacggcggccugccccagagcggcagaaucgugguggacuacaugaugcagaagcccggcaagaccggcaccaucguguaccagagaggcgugcugcugccccagaagguguggugcgccagcggcagaagcaaggugaucaagggcagccugccccugaucggcgaggccgacugccugcacgagaaguacggcggccugaacaagagcaagcccuacuacaccggcgagcacgccaaggccaucggcaacugccccaucugggugaagaccccccugaagcuggccaacggcaccaaguacagaccccccgccaagcugcugaaggagagaggcuucuucggcgccaucgccggcuuccuggagggcggcugggagggcaugaucgccggcuggcacggcuacaccagccacggcgcccacggcguggccguggccgccgaccugaagagcacccaggaggccaucaacaagaucaccaagaaccugaacagccugagcgagcuggaggugaagaaccugcagagacugagcggcgccauggacgagcugcacaacgagauccuggagcuggacgagaagguggacgaccugagagccgacaccaucagcagccagaucgagcuggccgugcugcugagcaacgagggcaucaucaacagcgaggacgagcaccugcuggcccuggagagaaagcugaagaagaugcugggccccagcgccguggacaucggcaacggcugcuucgagaccaagcacaagugcaaccagaccugccuggacagaaucgccgccggcaccuucaacgccggcgaguucagccugcccaccuucgacagccugaacaucaccgccgccagccugaacgacgacggccuggacaaccacaccauccugcuguacuacagcaccgccgccagcagccuggccgugacccugaugcuggccaucuucaucguguacauggugagcagagacaacgugagcugcagcaucugccuguga

SEQ ID NO: 187727 - RNA, 1755 nt, Artificial Sequence; identical to SEQ ID NO: 187726
  derived and/or modified CDS sequence (opt4) from hemagglutinin__InfluenzaB__AGX23424

SEQ ID NO: 187728 - RNA, 1755 nt, Artificial Sequence; identical to SEQ ID NO: 186880
  derived and/or modified CDS sequence (opt4) from hemagglutinin__InfluenzaB__AGX23435

SEQ ID NO: 187729 - RNA, 1755 nt, Artificial Sequence; identical to SEQ ID NO: 186791
  derived and/or modified CDS sequence (opt4) from hemagglutinin__InfluenzaB__AGX23446

SEQ ID NO: 187730 - RNA, 1755 nt, Artificial Sequence; identical to SEQ ID NO: 186880
  derived and/or modified CDS sequence (opt4) from hemagglutinin__InfluenzaB__AGX23457

SEQ ID NO: 187731 - RNA, 1755 nt, Artificial Sequence; identical to SEQ ID NO: 186791
  derived and/or modified CDS sequence (opt4) from hemagglutinin__InfluenzaB__AGX23468

SEQ ID NO: 187732 - RNA, 1755 nt, Artificial Sequence; identical to SEQ ID NO: 186486
  derived and/or modified CDS sequence (opt4) from hemagglutinin__InfluenzaB__AGX23479

SEQ ID NO: 187733 - RNA, 1755 nt, Artificial Sequence; identical to SEQ ID NO: 186486
  derived and/or modified CDS sequence (opt4) from hemagglutinin__InfluenzaB__AGX23490

SEQ ID NO: 187734 - RNA, 1755 nt, Artificial Sequence; identical to SEQ ID NO: 187107
  derived and/or modified CDS sequence (opt4) from hemagglutinin__InfluenzaB__AGX23501

SEQ ID NO: 187735 - RNA, 1755 nt, Artificial Sequence
  derived and/or modified CDS sequence (opt4) from hemagglutinin__InfluenzaB__AGX23512
augaaggccaucaucgugcugcugaugguggugaccagcaacgccgacagaaucugcaccggcaucaccagcagcaacagcccccacguggugaagaccgccacccagggcgaggugaacgugaccggcgugaucccccugaccaccacccccaccaagagcuacuucgccaaccugaagggcaccaagaccagaggcaagcugugccccgacugccugaacugcaccgaccuggacguggcccugggcagacccaugugcgugggcaccacccccagcgccaaggccagcauccugcacgaggugagacccgugaccagcggcugcuuccccaucaugcacgacagaaccaagaucagacagcuggccaaccugcugagaggcuacgagaacaucagacugagcacccagaacgugaucgacgccgagaaggcccccggcggccccuacagacugggcaccagcggcagcugccccaacgccaccagcaagagcggcuucuucgccaccauggccugggccgugcccaaggacaacaacaagaacgccaccaacccccugaccguggaggugcccuacaucugcaccgagggcgaggaccagaucaccguguggggcuuccacagcgacaacaagacccagaugaagacccuguacggcgacagcaacccccagaaguucaccagcagcgccaacggcgugaccacccacuacgugagccagaucggcggcuuccccgaccagaccgaggacggcggccugccccagagcggcagaaucgugguggacuacaugaugcagaagcccggcaagaccggcaccaucguguaccagagaggcgugcugcugccccagaagguguggugcgccagcggcagaagcaaggugaucaagggcagccugccccugaucggcgaggccgacugccugcacgagaaguacggcggccugaacaagagcaagcccuacuacaccggcgagcacgccaaggccaucggcaacugccccaucugggugaagaccccccugaagcuggccaacggcaccaaguacagaccccccgccaagcugcugaaggagagaggcuucuucggcgccaucgccggcuuccuggagggcggcugggagggcaugaucgccggcuggcacggcuacaccagccacggcgcccacggcguggccguggccgccgaccugaagagcacccaggaggccaucaacaagaucaccaagaaccugaacagccugagcgagcuggaggugaagaaccugcagagacugagcggcgccauggacgagcugcacaacgagauccuggagcuggacgagaagguggacgaccugagagccgacaccaucagcagccagaucgagcuggccgugcugcugagcaacgagggcaucaucaacagcgaggacgagcaccugcuggcccuggagagaaagcugaagaagaugcugggccccagcgccguggacaucggcaacggcugcuucgagaccaagcacaagugcaaccagaccugccuggacagaaucgccgccggcaccuucaacgccggcgaguucagccugcccaccuucgacagccugaacaucaccgccgccagccugaacgacgacggccuggacaaccacaccauccugcuguacuacagcaccgccgccagcagccuggccgugacccugaugcuggccaucuucaucguguacauggugagcagagacaacgugagcugcagcaucugccuguga

SEQ ID NO: 187736 - RNA, 1755 nt, Artificial Sequence; identical to SEQ ID NO: 186486
  derived and/or modified CDS sequence (opt4) from hemagglutinin__InfluenzaB__AGX23523

SEQ ID NO: 187737 - RNA, 1755 nt, Artificial Sequence; identical to SEQ ID NO: 186791
  derived and/or modified CDS sequence (opt4) from hemagglutinin__InfluenzaB__AGX23534

SEQ ID NO: 187738 - RNA, 1755 nt, Artificial Sequence; identical to SEQ ID NO: 186791
  derived and/or modified CDS sequence (opt4) from hemagglutinin__InfluenzaB__AGX23545

SEQ ID NO: 187739 - RNA, 1755 nt, Artificial Sequence; identical to SEQ ID NO: 186486
  derived and/or modified CDS sequence (opt4) from hemagglutinin__InfluenzaB__AGX23556

SEQ ID NO: 187740 - RNA, 1755 nt, Artificial Sequence; identical to SEQ ID NO: 186486
  derived and/or modified CDS sequence (opt4) from hemagglutinin__InfluenzaB__AGX23567

SEQ ID NO: 187741 - RNA, 1755 nt, Artificial Sequence; identical to SEQ ID NO: 186486
  derived and/or modified CDS sequence (opt4) from hemagglutinin__InfluenzaB__AGX23578

SEQ ID NO: 187742 - RNA, 1755 nt, Artificial Sequence; identical to SEQ ID NO: 186486
  derived and/or modified CDS sequence (opt4) from hemagglutinin__InfluenzaB__AGX23600

SEQ ID NO: 187743 - RNA, 1755 nt, Artificial Sequence
  derived and/or modified CDS sequence (opt4) from hemagglutinin__InfluenzaB__AGX23611
augaaggccaucaucgugcugcugaugguggugaccagcaacgccgacagaaucugcaccggcaucaccagcagcaacagcccccacguggugaagaccgccacccagggcgaggugaacgugaccggcgugaucccccugaccaccacccccaccaagagcuacuucgccaaccugaagggcaccagaaccagaggcaagcugugccccgacugccugaacugcaccgaccuggacguggcccugggcagacccaugugcgugggcaccacccccagcgccaaggccagcauccugcacgaggugagacccgugaccagcggcugcuuccccaucaugcacgacagaaccaagaucagacagcuggccaaccugcugagaggcuacgagaacaucagacugagcacccagaacgugaucgacgccgagaaggcccccggcggccccuacagacugggcaccagcggcagcugccccaacgccaccagcaagagcggcuucuucgccaccauggccugggccgugcccaaggacaacaacaagaacgccaccaacccccugaccguggaggugcccuacaucugcaccgagggcgaggaccagaucaccguguggggcuuccacagcgacaacaagacccagaugaagaaccuguacggcgacagcaacccccagaaguucaccagcagcgccaacggcgugaccacccacuacgugagccagaucggcggcuuccccgaccagaccgaggacggcggccugccccagagcggcagaaucgugguggacuacaugaugcagaagcccggcaagaccggcaccaucguguaccagagaggcgugcugcugccccagaagguguggugcgccagcggcagaagcaaggugaucaagggcagccugccccugaucggcgaggccgacugccugcacgagaaguacggcggccugaacaagagcaagcccuacuacaccggcgagcacgccaaggccaucggcaacugccccaucugggugaagaccccccugaagcuggccaacggcaccaaguacagaccccccgccaagcugcugaaggagagaggcuucuucggcgccaucgccggcuuccuggagggcggcugggagggcaugaucgccggcuggcacggcuacaccagccacggcgcccacggcguggccguggccgccgaccugaagagcacccaggaggccaucaacaagaucaccaagaaccugaacagccugagcgagcuggagaucaagaaccugcagagacugagcggcgccauggacgagcugcacaacgagauccuggagcuggacgagaagguggacgaccugagagccgacaccaucagcagccagaucgagcuggccgugcugcugagcaacgagggcaucaucaacagcgaggacgagcaccugcuggcccuggagagaaagcugaagaagaugcugggccccagcgccguggacaucggcaacggcugcuucgagaccaagcacaagugcaaccagaccugccuggacagaaucgccgccggcaccuucaacgccggcgaguucagccugcccaccuucgacagccugaacaucaccgccgccagccugaacgacgacggccuggacaaccacaccauccugcuguacuacagcaccgccgccagcagccuggccgugacccugaugcuggccaucuucaucguguacauggugagcagagacaacgugagcugcagcaucugccuguga

SEQ ID NO: 187744 - RNA, 1755 nt, Artificial Sequence; identical to SEQ ID NO: 186486
  derived and/or modified CDS sequence (opt4) from hemagglutinin__InfluenzaB__AGX23622

SEQ ID NO: 187745 - RNA, 1755 nt, Artificial Sequence; identical to SEQ ID NO: 186791
  derived and/or modified CDS sequence (opt4) from hemagglutinin__InfluenzaB__AGX23633

SEQ ID NO: 187746 - RNA, 1755 nt, Artificial Sequence; identical to SEQ ID NO: 186791
  derived and/or modified CDS sequence (opt4) from hemagglutinin__InfluenzaB__AGX23644

SEQ ID NO: 187747 - RNA, 1755 nt, Artificial Sequence; identical to SEQ ID NO: 186486
  derived and/or modified CDS sequence (opt4) from hemagglutinin__InfluenzaB__AGX23655

SEQ ID NO: 187748 - RNA, 1755 nt, Artificial Sequence; identical to SEQ ID NO: 186791
  derived and/or modified CDS sequence (opt4) from hemagglutinin__InfluenzaB__AGX23666

SEQ ID NO: 187749 - RNA, 1755 nt, Artificial Sequence
  derived and/or modified CDS sequence (opt4) from hemagglutinin__InfluenzaB__AGX23677
augaaggccaucaucgugcugcugaugguggugaccagcaacgccgacagaaucugcaccggcaucaccagcagcaacagcccccacguggugaagaccgccacccagggcgaggugaacgugaccggcgugaucccccugaccaccacccccaccaagagcuacuucgccaaccugaagggcaccaagaccagaggcaagcugugccccgacugccugaacugcaccgaccuggacguggcccugggcagacccaugugcgugggcaccacccccagcgccaaggccagcauccugcacgaggugagacccgugaccagcggcugcuuccccaucaugcacgacagaaccaagaucagacagcuggccaaccugcugagaggcuacgagaagaucagacugagcacccagaacgugaucgacgccgagaaggcccccggcggccccuacagacugggcaccagcggcagcugccccaacgccaccagcaagagcggcuucuucgccaccauggccugggccgugcccaaggacaacaacaagaacgccaccaacccccugaccguggaggugcccuacaucugcaucgagggcgaggaccagaucaccguguggggcuuccacagcgacaacaagacccagaugaagaaccuguacggcgacagcaacccccagaaguucaccagcagcgccaacggcgugaccacccacuacgugagccagaucggcggcuuccccgaccagaccgaggacggcggccugccccagagcggcagaaucgugguggacuacaugaugcagaagcccggcaagaccggcaccaucguguaccagagaggcgugcugcugccccagaagguguggugcgccagcggcagaagcaaggugaucaagggcagccugccccugaucggcgaggccgacugccugcacgagaaguacggcggccugaacaagagcaagcccuacuacaccggcgagcacgccaaggccaucggcaacugccccaucugggugaagaccccccugaagcuggccaacggcaccaaguacagaccccccgccaagcugcugaaggagagaggcuucuucggcgccaucgccggcuuccuggagggcggcugggagggcaugaucgccggcuggcacggcuacaccagccacggcgcccacggcguggccguggccgccgaccugaagagcacccaggaggccaucaacaagaucaccaagaaccugaacagccugagcgagcuggaggugaagaaccugcagagacugagcggcgccauggacgagcugcacaacgagauccuggagcuggacgagaagguggacgaccugagagccgacaccaucagcagccagaucgagcuggccgugcugcugagcaacgagggcaucaucaacagcgaggacgagcaccugcuggcccuggagagaaagcugaagaagaugcugggccccagcgccguggacaucggcaacggcugcuucgagaccaagcacaagugcaaccagaccugccuggacagaaucgccgccggcaccuucaacgccggcgaguucagccugcccaccuucgacagccugaacaucaccgccgccagccugaacgacgacggccuggacaaccacaccauccugcuguacuacagcaccgccgccagcagccuggccgugacccugaugcuggccaucuucaucguguacauggugagcagagacaacgugagcugcagcaucugccuguga

SEQ ID NO: 187750 - RNA, 1755 nt, Artificial Sequence; identical to SEQ ID NO: 186791
  derived and/or modified CDS sequence (opt4) from hemagglutinin__InfluenzaB__AGX23688

SEQ ID NO: 187751 - RNA, 1755 nt, Artificial Sequence; identical to SEQ ID NO: 186791
  derived and/or modified CDS sequence (opt4) from hemagglutinin__InfluenzaB__AGX23699

SEQ ID NO: 187752 - RNA, 1755 nt, Artificial Sequence; identical to SEQ ID NO: 186486
  derived and/or modified CDS sequence (opt4) from hemagglutinin__InfluenzaB__AGX23710

SEQ ID NO: 187753 - RNA, 1755 nt, Artificial Sequence; identical to SEQ ID NO: 186791
  derived and/or modified CDS sequence (opt4) from hemagglutinin__InfluenzaB__AGX23721

SEQ ID NO: 187754 - RNA, 1755 nt, Artificial Sequence; identical to SEQ ID NO: 186486
  derived and/or modified CDS sequence (opt4) from hemagglutinin__InfluenzaB__AGX23732

SEQ ID NO: 187755 - RNA, 1755 nt, Artificial Sequence; identical to SEQ ID NO: 186791
  derived and/or modified CDS sequence (opt4) from hemagglutinin__InfluenzaB__AGX23743

SEQ ID NO: 187756 - RNA, 1755 nt, Artificial Sequence; identical to SEQ ID NO: 186791
  derived and/or modified CDS sequence (opt4) from hemagglutinin__InfluenzaB__AGX23754

SEQ ID NO: 187757 - RNA, 1755 nt, Artificial Sequence; identical to SEQ ID NO: 186486
  derived and/or modified CDS sequence (opt4) from hemagglutinin__InfluenzaB__AGX23765

SEQ ID NO: 187758 - RNA, 1755 nt, Artificial Sequence; identical to SEQ ID NO: 186791
  derived and/or modified CDS sequence (opt4) from hemagglutinin__InfluenzaB__AGX23776

SEQ ID NO: 187759 - RNA, 1755 nt, Artificial Sequence; identical to SEQ ID NO: 186791
  derived and/or modified CDS sequence (opt4) from hemagglutinin__InfluenzaB__AGX23787

SEQ ID NO: 187760 - RNA, 1755 nt, Artificial Sequence; identical to SEQ ID NO: 186486
  derived and/or modified CDS sequence (opt4) from hemagglutinin__InfluenzaB__AGX23798

SEQ ID NO: 187761 - RNA, 1755 nt, Artificial Sequence; identical to SEQ ID NO: 186486
  derived and/or modified CDS sequence (opt4) from hemagglutinin__InfluenzaB__AGX23809

SEQ ID NO: 187762 - RNA, 1755 nt, Artificial Sequence; identical to SEQ ID NO: 186486
  derived and/or modified CDS sequence (opt4) from hemagglutinin__InfluenzaB__AGX23820

SEQ ID NO: 187763 - RNA, 1755 nt, Artificial Sequence; identical to SEQ ID NO: 186791
  derived and/or modified CDS sequence (opt4) from hemagglutinin__InfluenzaB__AGX23831

SEQ ID NO: 187764 - RNA, 1755 nt, Artificial Sequence; identical to SEQ ID NO: 186486
  derived and/or modified CDS sequence (opt4) from hemagglutinin__InfluenzaB__AGX23842

SEQ ID NO: 187765 - RNA, 1755 nt, Artificial Sequence
  derived and/or modified CDS sequence (opt4) from hemagglutinin__InfluenzaB__AGX23853
augaaggccaucaucgugcugcugaugguggugaccagcaacgccgacagaaucugcaccggcaucaccagcagcaacagcccccacguggugaagaccgccacccagggcgaggugaacgugaccggcgugaucccccugaccaccacccccaccaagagcuacuucgccaaccugaagggcaccagaaccagaggcaagcugugccccgacugccugaacugcaccgaccuggacguggcccugggcagacccaugugcgugggcaccacccccagcgccaaggccagcauccugcacgaggugagacccgugaccagcggcugcuuccccaucaugcacgacagaaccaagaucagacagcuggccaaccugcugagaggcuacgagaacaucagacugagcauccagaacgugaucgacgccgagaaggcccccggcggccccuacagacugggcaccagcggcagcugccccaacgccaccagcaagagcggcuucuucgccaccauggccugggccgugcccaaggacaacaacaagaacgccaccaacccccugaccguggaggugcccuacaucugcaccgagggcgaggaccagaucaccguguggggcuuccacagcgacaacaagacccagaugaagaaccuguacggcgacagcaacccccagaaguucaccagcagcgccaacggcgugaccacccacuacgugagccagaucggcggcuuccccgaccagaccgaggacggcggccugccccagagcggcagaaucgugguggacuacaugaugcagaagagcggcaagaccggcaccaucguguaccagagaggcgugcugcugccccagaagguguggugcgccagcggcagaagcaaggugaucaagggcagccugccccugaucggcgaggccgacugccugcacgagaaguacggcggccugaacaagagcaagcccuacuacaccggcgagcacgccaaggccaucggcaacugccccaucugggugaagaccccccugaagcuggccaacggcaccaaguacagaccccccgccaagcugcugaaggagagaggcuucuucggcgccaucgccggcuuccuggagggcggcugggagggcaugaucgccggcuggcacggcuacaccagccacggcgcccacggcguggccguggccgccgaccugaagagcacccaggaggccaucaacaagaucaccaagaaccugaacagccugagcgagcuggaggugaagaaccugcagagacugagcggcgccauggacgagcugcacaacgagauccuggagcuggacgagaagguggacgaccugagagccgacaccaucagcagccagaucgagcuggccgugcugcugagcaacgagggcaucaucaacagcgaggacgagcaccugcuggcccuggagagaaagcugaagaagaugcugggccccagcgccguggacaucggcaacggcugcuucgagaccaagcacaagugcaaccagaccugccuggacagaaucgccgccggcaccuucaacgccggcgaguucagccugcccaccuucgacagccugaacaucaccgccgccagccugaacgacgacggccuggacaaccacaccauccugcuguacuacagcaccgccgccagcagccuggccgugacccugaugcuggccaucuucaucguguacauggugagcagagacaacgugagcugcagcaucugccuguga

SEQ ID NO: 187766 - RNA, 1755 nt, Artificial Sequence; identical to SEQ ID NO: 186486
  derived and/or modified CDS sequence (opt4) from hemagglutinin__InfluenzaB__AGX23864

SEQ ID NO: 187767 - RNA, 1755 nt, Artificial Sequence; identical to SEQ ID NO: 186791
  derived and/or modified CDS sequence (opt4) from hemagglutinin__InfluenzaB__AGX23875

SEQ ID NO: 187768 - RNA, 1755 nt, Artificial Sequence; identical to SEQ ID NO: 186486
  derived and/or modified CDS sequence (opt4) from hemagglutinin__InfluenzaB__AGX23886

SEQ ID NO: 187769 - RNA, 1755 nt, Artificial Sequence
  derived and/or modified CDS sequence (opt4) from hemagglutinin__InfluenzaB__AGX23897
augaaggccaucaucgugcugcugaugguggugaccagcaacgccgacagaaucugcaccggcaucaccagcagcaacagcccccacguggugaagaccgccacccagggcgaggugaacgugaccggcgugaucccccugaccaccacccccaccaagagcuacuucgccaaccugaagggcaccagaaccagaggcaagcugugccccgacugccugaacugcaccgaccuggacguggcccugggcagacccaugugcgugggcaccacccccagcgccaaggccagcauccugcacgaggugagacccgugaccagcggcugcuuccccaucaugcacgacagaaccaagaucagacagcuggccaaccugcugagaggcuacgagaacaucagacugagcacccagaacgugaucgacgccgagaaggcccccggcggccccuacagacugggcaccagcggcagcugccccaacgccaccagcaagagcggcuucuucgccaccauggccugggccgugcccaaggacaacaacaagaacgccaccaacccccugaccguggaggugcccuacaucugcaccgagggcgaggaccagaucaccguguggggcuuccacagcgacaacaagacccagaugaagaaccuguacggcgacagcaacccccagaaguucaccagcagcgccaacggcgugaccacccacuacgugagccagaucggcggcuuccccgaccagaccgaggacggcggccugccccagagcggcagaaucgugguggacuacaugaugcagaagagcggcaagaccggcaccaucguguaccagagaggcgugcugcugccccagaagguguggugcgccagcggcagaagcaaggugaucaagggcagccugccccugaucggcgaggccgacugccugcacgagaaguacggcggccugaacaagagcaagcccuacuacaccggcgagcacgccaaggccaucggcaacugccccaucugggugaagaccccccugaagcuggccaacggcaccaaguacagaccccccgccaagcugcugaaggagagaggcuucuucggcgccaucgccggcuuccuggagggcggcugggagggcaugaucgccggcuggcacggcuacaccagccacggcgcccacggcguggccguggccgccgaccugaagagcacccaggaggccaucaacaagaucaccaagaaccugaacagccugagcgagcuggaggugaagaaccugcagagacugagcggcgccauggacgagcugcacaacgagauccuggagcuggacgagaagguggacgaccugagagccgacaccaucagcagccagaucgagcuggccgugcugcugagcaacgagggcaucaucaacagcgaggacgagcaccugcuggcccuggagagaaagcugaagaagaugcugggccccagcgccguggacaucggcaacggcugcuucgagaccaagcacaagugcaaccagaccugccuggacagaaucgccgccggcaccuucaacgccggcgaguucagccugcccaccuucgacagccugaacaucaccgccgccagccugaacgacgacggccuggacaaccacaccauccugcuguacuacagcaccgccgccagcagccuggccgugacccugaugcuggccaucuucaucguguacauggugagcagagacaacgugagcugcagcaucugccuguga

SEQ ID NO: 187770 - RNA, 1755 nt, Artificial Sequence
  derived and/or modified CDS sequence (opt4) from hemagglutinin__InfluenzaB__AGX23908
augaaggccaucaucgugcugcugaugguggugaccagcaacgccgacagaaucugcaccggcaucaccagcagcaacagcccccacguggugaagaccgccacccagggcgaggugaacgugaccggcgugaucccccugaccaccacccccaccaagagcuacuucgccaaccugaagggcaccagaaccagaggcaagcugugccccgacugccugaacugcaccgaccuggacguggcccugggcagacccaugugcgugggcaccacccccagcgccaaggccagcauccugcacgaggugagacccgugaccagcggcugcuuccccaucaugcacgacagaaccaagaucagacagcuggccaaccugcugagaggcuacgagaacaucagacugagcacccagaacgugaucgacgccgagaaggcccccggcggccccuacagacugggcaccagcggcagcugccccaacgccaccagcaagagcggcuucuucgugaccauggccugggccgugcccaaggacaacaacaagaacgccaccaacccccugaccguggaggugcccuacaucugcaccgagggcgaggaccagaucaccguguggggcuuccacagcgacaacaagacccagaugaagaaccuguacggcgacagcaacccccagaaguucaccagcagcgccaacggcgugaccacccacuacgugagccagaucggcggcuuccccgaccagaccgaggacggcggccugccccagagcggcagaaucgugguggacuacaugaugcagaagcccggcaagaccggcaccaucguguaccagagaggcgugcugcugccccagaagguguggugcgccagcggcagaagcaaggugaucaagggcagccugccccugaucggcgaggccgacugccugcacgagaaguacggcggccugaacaagagcaagcccuacuacaccggcgagcacgccaaggccaucggcaacugccccaucugggugaagaccccccugaagcuggccaacggcaccaaguacagaccccccgccaagcugcugaaggagagaggcuucuucggcgccaucgccggcuuccuggagggcggcugggagggcaugaucgccggcuggcacggcuacaccagccacggcgcccacggcguggccguggccgccgaccugaagagcacccaggaggccaucaacaagaucaccaagaaccugaacagccugagcgagcuggaggugaagaaccugcagagacugagcggcgccauggacgagcugcacaacgagauccuggagcuggacgagaagguggacgaccugagagccgacaccaucagcagccagaucgagcuggccgugcugcugagcaacgagggcaucaucaacagcgaggacgagcaccugcuggcccuggagagaaagcugaagaagaugcugggccccagcgccguggacaucggcaacggcugcuucgagaccaagcacaagugcaaccagaccugccuggacagaaucgccgccggcaccuucaacgccggcgaguucagccugcccaccuucgacagccugaacaucaccgccgccagccugaacgacgacggccuggacaaccacaccauccugcuguacuacagcaccgccgccagcagccuggccgugacccugaugcuggccaucuucaucguguacauggugagcagagacaacgugagcugcagcaucugccuguga

SEQ ID NO: 187771 - RNA, 1755 nt, Artificial Sequence; identical to SEQ ID NO: 186627
  derived and/or modified CDS sequence (opt4) from hemagglutinin__InfluenzaB__AGX23919

SEQ ID NO: 187772 - RNA, 1755 nt, Artificial Sequence; identical to SEQ ID NO: 187107
  derived and/or modified CDS sequence (opt4) from hemagglutinin__InfluenzaB__AGX23930

SEQ ID NO: 187773 - RNA, 1755 nt, Artificial Sequence; identical to SEQ ID NO: 186486
  derived and/or modified CDS sequence (opt4) from hemagglutinin__InfluenzaB__AGX23941

SEQ ID NO: 187774 - RNA, 1755 nt, Artificial Sequence; identical to SEQ ID NO: 186791
  derived and/or modified CDS sequence (opt4) from hemagglutinin__InfluenzaB__AGX23952

SEQ ID NO: 187775 - RNA, 1755 nt, Artificial Sequence; identical to SEQ ID NO: 186791
  derived and/or modified CDS sequence (opt4) from hemagglutinin__InfluenzaB__AGX23963

SEQ ID NO: 187776 - RNA, 1755 nt, Artificial Sequence; identical to SEQ ID NO: 187107
  derived and/or modified CDS sequence (opt4) from hemagglutinin__InfluenzaB__AGX23974

SEQ ID NO: 187777 - RNA, 1755 nt, Artificial Sequence; identical to SEQ ID NO: 186627
  derived and/or modified CDS sequence (opt4) from hemagglutinin__InfluenzaB__AGX23985

SEQ ID NO: 187778 - RNA, 1755 nt, Artificial Sequence
  derived and/or modified CDS sequence (opt4) from hemagglutinin__InfluenzaB__AGX23996
augaaggccaucaucgugcugcugaugguggugaccagcaacgccgacagaaucugcaccggcaucaccagcagcaacagcccccacguggugaagaccgccacccagggcgaggugaacgugaccggcgugaucccccugaccaccacccccaccaagagcuacuucgccaaccugaagggcaccagaaccagaggcaagcugugccccgacugccugaacugcaccgaccuggacguggcccugggcagacccaugugcgugggcaccacccccagcgccaaggccagcauccugcacgaggugagacccaucaccagcggcugcuuccccaucaugcacgacagaaccaagaucagacagcuggccaaccugcugagaggcuacgagaacaucagacugagcacccagaacgugaucgacgccgagaaggcccccggcggccccuacagacugggcaccagcggcagcugccccaacgccaccagcaagagcggcuucuucgccaccauggccugggccgugcccaaggacaacaacaagaacgccaccaacccccugaccguggaggugcccuacaucugcaccgagggcgaggaccagaucaccguguggggcuuccacagcgacaacaagacccagaugaagaaccuguacggcgacagcaacccccagaaguucaccagcagcgccaacggcgugaccacccacuacgugagccagaucggcggcuuccccgaccagaccgaggacggcggccugccccagagcggcagaaucgugguggacuacaugaugcagaagcccggcaagaccggcaccaucguguaccagagaggcgugcugcugccccagaagguguggugcgccagcggcagaagcaaggugaucaagggcagccugccccugaucggcgaggccgacugccugcacgagaaguacggcggccugaacaagagcaagcccuacuacaccggcgagcacgccaaggccaucggcaacugccccaucugggugaagaccccccugaagcuggccaacggcaccaaguacagaccccccgccaagcugcugaaggagagaggcuucuucggcgccaucgccggcuuccuggagggcggcugggagggcaugaucgccggcuggcacggcuacaccagccacggcgcccacggcguggccguggccgccgaccugaagagcacccaggaggccaucaacaagaucaccaagaaccugaacagccugagcgagcuggaggugaagaaccugcagagacugagcggcgccauggacgagcugcacaacgagauccuggagcuggacgagaagguggacgaccugagagccgacaccaucagcagccagaucgagcuggccgugcugcugagcaacgagggcaucaucaacagcgaggacgagcaccugcuggcccuggagagaaagcugaagaagaugcugggccccagcgccguggacaucggcaacggcugcuucgagaccaagcacaagugcaaccagaccugccuggacagaaucgccgccggcaccuucaacgccggcgaguucagccugcccaccuucgacagccugaacaucaccgccgccagccugaacgacgacggccuggacaaccacaccauccugcuguacuacagcaccgccgccagcagccuggccgugacccugaugcuggccaucuucaucguguacauggugagcagagacaacgugagcugcagcaucugccuguga

SEQ ID NO: 187779 - RNA, 1755 nt, Artificial Sequence; identical to SEQ ID NO: 187107
  derived and/or modified CDS sequence (opt4) from hemagglutinin__InfluenzaB__AGX24007

SEQ ID NO: 187780 - RNA, 1755 nt, Artificial Sequence; identical to SEQ ID NO: 187107
  derived and/or modified CDS sequence (opt4) from hemagglutinin__InfluenzaB__AGX24018

SEQ ID NO: 187781 - RNA, 1755 nt, Artificial Sequence
  derived and/or modified CDS sequence (opt4) from hemagglutinin__InfluenzaB__AGX24029
augaaggccaucaucgugcugcugaugguggugaccagcaacgccgacagaaucugcaccggcaucaccagcagcaacagcccccacguggugaagaccgccacccagggcgaggugaacgugaccggcgugaucccccugaccaccacccccaccaagagcuacuucgccaaccugaagggcaccagaaccagaggcaagcugugccccgacugccugaacugcaccgaccuggacguggcccugggcagacccaugugcgugggcaccacccccagcgccaaggccagcauccugcacgaggugagacccgugaccagcggcugcuuccccaucaugcacgacagaaccaagaucagacagcugcccaaccugcugagaggcuacgagaacaucagacugagcacccagaacgugaucgacgccgagaaggcccccggcggccccuacagacugggcaccagcggcagcugccccaacgccaccagcaagagcggcuucuucgccaccauggccugggccgugcccaaggacaacaacaagaacgccaccaacccccugaccguggaggugcccuacaucugcaaggagggcgaggaccagaucaccguguggggcuuccacagcgacaacaagacccagaugaagaaccuguacggcgacagcaacccccagaaguucaccagcagcgccaacggcgugaccacccacuacgugagccagaucggcagcuuccccgaccagaccgaggacggcggccugccccagagcggcagaaucgugguggacuacaugaugcagaagcccggcaagaccggcaccaucguguaccagagaggcgugcugcugccccagaagguguggugcgccagcggcagaagcaaggugaucaagggcagccugccccugaucggcgaggccgacugccugcacgagaaguacggcggccugaacaagagcaagcccuacuacaccggcgagcacgccaaggccaucggcaacugccccaucugggugaagaccccccugaagcuggccaacggcaccaaguacagaccccccgccaagcugcugaaggagagaggcuucuucggcgccaucgccggcuuccuggagggcggcugggagggcaugaucgccggcuggcacggcuacaccagccacggcgcccacggcguggccguggccgccgaccugaagagcacccaggaggccaucaacaagaucaccaagaaccugaacagccugagcgagcuggaggugaagaaccugcagagacugagcggcgccauggacgagcugcacaacgagauccuggagcuggacgagaagguggacgaccugagagccgacaccaucagcagccagaucgagcuggccgugcugcugagcaacgagggcaucaucaacagcgaggacgagcaccugcuggcccuggagagaaagcugaagaagaugcugggccccagcgccguggagaucggcaacggcugcuucgagaccaagcacaagugcaaccagaccugccugaacagaaucgccgccggcaccuucaacgccggcgaguucagccugcccaccuucgacagccugaacaucaccgccgccagccugaacgacgacggccuggacaaccacaccauccugcuguacuacagcaccgccgccagcagccuggccgugacccugaugcuggccaucuucaucguguacauggugagcagagacaacgugagcugcagcaucugccuguga

SEQ ID NO: 187782 - RNA, 1755 nt, Artificial Sequence; identical to SEQ ID NO: 187107
  derived and/or modified CDS sequence (opt4) from hemagglutinin__InfluenzaB__AGX24040

SEQ ID NO: 187783 - RNA, 1755 nt, Artificial Sequence; identical to SEQ ID NO: 186791
  derived and/or modified CDS sequence (opt4) from hemagglutinin__InfluenzaB__AGX24051

SEQ ID NO: 187784 - RNA, 1755 nt, Artificial Sequence; identical to SEQ ID NO: 186880
  derived and/or modified CDS sequence (opt4) from hemagglutinin__InfluenzaB__AGX24062

SEQ ID NO: 187785 - RNA, 1755 nt, Artificial Sequence; identical to SEQ ID NO: 186627
  derived and/or modified CDS sequence (opt4) from hemagglutinin__InfluenzaB__AGX24073

SEQ ID NO: 187786 - RNA, 1755 nt, Artificial Sequence
  derived and/or modified CDS sequence (opt4) from hemagglutinin__InfluenzaB__AGX24084
augaaggccaucaucgugcugcugaugguggugaccagcaacgccgacagaaucugcaccggcaucaccagcagcaacagcccccacguggugaagaccgccacccagggcgaggugaacgugaccggcgugaucccccugaccaccacccccaccaagagcuacuucgccaaccugaagggcaccagaaccagaggcaagcugugccccgacugccugaacugcaccgaccuggacguggcccugggcagacccaugugcgugggcaccacccccagcgccaaggccagcaucauccacgaggugagacccgugaccagcggcugcuuccccaucaugcacgacagaaccaagaucagacagcuggccaaccugcugagaggcuacgagaacaucagacugagcacccagaacgugaucgacgccgagaaggcccccggcggccccuacagacugggcaccagcggcagcugccccaacgccaccagcaagagcggcuucuucgccaccauggccugggccgugcccaaggacaacaacaagaacgccaccaacccccugaccguggaggugcccuacaucugcaccgagggcgaggaccagaucaccguguggggcuuccacagcgacaacaagacccagaugaagaaccuguacggcgacagcaacccccagaaguucaccagcagcgccaacggcgugaccacccacuacgugagccagaucggcggcuuccccgaccagaccgaggacggcggccugccccagagcggcagaaucgugguggacuacaugaugcagaagcccggcaagaccggcaccaucguguaccagagaggcgugcugcugccccagaagguguggugcgccagcggcagaagcaaggugaucaagggcagccugccccugaucggcgaggccgacugccugcacgagaaguacggcggccugaacaagagcaagcccuacuacaccggcgagcacgccaaggccaucggcaacugccccaucugggugaagaccccccugaagcuggccaacggcaccaaguacagaccccccgccaagcugcugaaggagagaggcuucuucggcgccaucgccggcuuccuggagggcggcugggagggcaugaucgccggcuggcacggcuacaccagccacggcgcccacggcguggccguggccgccgaccugaagagcacccaggaggccaucaacaagaucaccaagaaccugaacagccugagcgagcuggaggugaagaaccugcagagacugagcggcgccauggacgagcugcacaacgagauccuggagcuggacgagaagguggacgaccugagagccgacaccaucagcagccagaucgagcuggccgugcugcugagcaacgagggcaucaucaacagcgaggacgagcaccugcuggcccuggagagaaagcugaagaagaugcugggccccagcgccguggacaucggcaacggcugcuucgagaccaagcacaagugcaaccagaccugccuggacagaaucgccgccggcaccuucaacgccggcgaguucagccugcccaccuucgacagccugaacaucaccgccgccagccugaacgacgacggccuggacaaccacaccauccugcuguacuacagcaccgccgccagcagccuggccgugacccugaugcuggccaucuucaucguguacauggugagcagagacaacgugagcugcagcaucugccuguga

SEQ ID NO: 187787 - RNA, 1755 nt, Artificial Sequence; identical to SEQ ID NO: 187107
  derived and/or modified CDS sequence (opt4) from hemagglutinin__InfluenzaB__AGX24095

SEQ ID NO: 187788 - RNA, 1755 nt, Artificial Sequence
  derived and/or modified CDS sequence (opt4) from hemagglutinin__InfluenzaB__AGX24106
augaaggccaucaucgugcugcugaugguggugaccagcaacgccgacagaaucugcaccggcaucaccagcagcaacagcccccacguggugaagaccgccacccagggcgaggugaacgugaccggcgugaucccccugaccaccacccccaccaagagcuacuucgccaaccugaagggcaccagaaccagaggcaagcugugccccgacugccugaacugcaccgaccuggacguggcccugggcagacccaugugcgugggcaccacccccagcgccaaggccagcauccugcacgaggugagacccgugaccagcggcugcuuccccaucaugcacgacagaaccaagaucagacagcuggccaaccugcugagaggcuacgagaacaucagacugagcacccagaacgugaucgacgccgagaaggcccccggcggccccuacagacugggcaccagcggcagcugccccaacaccaccagcaagagcggcuucuucgccaccauggccugggccgugcccaaggacaacaacaagaacgccaccaacccccugaccguggaggugcccuacaucugcaccgagggcgaggaccagaucaccguguggggcuuccacagcgacaacaagacccagaugaagaaccuguacggcgacagcaacccccagaaguucaccagcagcgccaacggcgugaccacccacuacgugagccagaucggcggcuuccccgaccagaccgaggacggcggccugccccagagcggcagaaucgugguggacuacaugaugcagaagcccggcaagaccggcaccaucguguaccagagaggcgugcugcugccccagaagguguggugcgccagcggcagaagcaaggugaucaagggcagccugccccugaucggcgaggccgacugccugcacgagaaguacggcggccugaacaagagcaagcccuacuacaccggcgagcacgccaaggccaucggcaacugccccaucugggugaagaccccccugaagcuggccaacggcaccaaguacagaccccccgccaagcugcugaaggagagaggcuucuucggcgccaucgccggcuuccuggagggcggcugggagggcaugaucgccggcuggcacggcuacaccagccacggcgcccacggcguggccguggccgccgaccugaagagcacccaggaggccaucaacaagaucaccaagaaccugaacagccugagcgagcuggaggugaagaaccugcagagacugagcggcgccauggacgagcugcacaacgagauccuggagcuggacgagaagguggacgaccugagagccgacaccaucagcagccagaucgagcuggccgugcugcugagcaacgagggcaucaucaacagcgaggacgagcaccugcuggcccuggagagaaagcugaagaagaugcugggccccagcgccguggacaucggcaacggcugcuucgagaccaagcacaagugcaaccagaccugccuggacagaaucgccgccggcaccuucaacgccggcgaguucagccugcccaccuucgacagccugaacaucaccgccgccagccugaacgacgacggccuggacaaccacaccauccugcuguacuacagcaccgccgccagcagccuggccgugacccugaugcuggccaucuucaucguguacauggugagcagagacaacgugagcugcagcaucugccuguga

SEQ ID NO: 187789 - RNA, 1755 nt, Artificial Sequence
  derived and/or modified CDS sequence (opt4) from hemagglutinin__InfluenzaB__AGX24117
augaaggccaucaucgugcugcugaugguggugaccagcaacgccgacagaaucugcaccggcaucaccagcagcaacagcccccacguggugaagaccgccacccagggcgaggugaacgugaccggcgugaucccccugaccaccacccccaccaagagcuacuucgccaaccugaagggcaccagaaccagaggcaagcugugccccgacugccugaacugcaccgaccuggacguggcccugggcagacccaugugcgugggcaccacccccagcgccaaggccagcauccugcacgaggugagacccgugaccagcggcugcuuccccaucaugcacgacagaaccaagaucagacagcugcccaaccugcugagaggcuacgagaacaucagacugagcacccagaacgugaucgacgccgagaaggcccccggcggccccuacagacugggcaccagcggcagcugccccaacaccaccagcaagagcggcuucuucgccaccauggccugggccgugcccaaggacaacaacaagaacgccaccaacccccugaccguggaggugcccuacaucugcaccgagggcgaggaccagaucaccguguggggcuuccacagcgacaacaagacccagaugaagaaccuguacggcgacagcaacccccagaaguucaccagcagcgccaacggcgugaccacccacuacgugagccagaucggcagcuuccccgaccagaccgaggacggcggccugccccagagcggcagaaucgugguggacuacaugaugcagaagcccggcaagaccggcaccaucguguaccagagaggcauccugcugccccagaagguguggugcgccagcggcagaagcaaggugaucaagggcagccugccccugaucggcgaggccgacugccugcacgagaaguacggcggccugaacaagagcaagcccuacuacaccggcgagcacgccaaggccaucggcaacugccccaucugggugaagaccccccugaagcuggccaacggcaccaaguacagaccccccgccaagcugcugaaggagagaggcuucuucggcgccaucgccggcuuccuggagggcggcugggagggcaugaucgccggcuggcacggcuacaccagccacggcgcccacggcguggccguggccgccgaccugaagagcacccaggaggccaucaacaagaucaccaagaaccugaacagccugagcgagcuggaggugaagaaccugcagagacugagcggcgccauggacgagcugcacaacgagauccuggagcuggacgagaagguggacgaccugagagccgacaccaucagcagccagaucgagcuggccgugcugcugagcaacgagggcaucaucaacagcgaggacgagcaccugcuggcccuggagagaaagcugaagaagaugcugggccccagcgccguggagaucggcaacggcugcuucgagaccaagcacaagugcaaccagaccugccuggacagaaucgccgccggcaccuucaacgccggcgaguucagccugcccaccuucgacagccugaacaucaccgccgccagccugaacgacgacggccuggacaaccacaccauccugcuguacuacagcaccgccgccagcagccuggccgugacccugaugcuggccaucuucaucguguacauggugagcagagacaacgugagcugcagcaucugccuguga

SEQ ID NO: 187790 - RNA, 1755 nt, Artificial Sequence
  derived and/or modified CDS sequence (opt4) from hemagglutinin__InfluenzaB__AGX24128
augaaggccaucaucgugcugcugaugguggugaccagcaacgccgacagaaucugcaccggcaucaccagcagcaacagcccccacguggugaagaccgccacccagggcgaggugaacgugaccggcgugaucccccugaccaccacccccaccaagagcuacuucgccaaccugaagggcaccagaaccagaggcaagcugugccccgacugccugaacugcaccgaccuggacguggcccugggcagacccaugugcgugggcaccacccccagcgccaaggccagcauccugcacgaggugagacccgugaccagcggcugcuuccccaucaugcacgacagaaccaagaucagacagcugcccaaccugcugagaggcuacgagaacaucagacugagcacccagaacgugaucgacgccgagaaggcccccggcggccccuacagacugggcaccagcggcagcugccccaacgccaccagcaagaucggcuucuucgccaccauggccugggccgugcccaaggacaacuacaagaacgccaccaacccccugaccguggaggugcccuacaucugcaccgagggcgaggaccagaucaccguguggggcuuccacagcgacaacaagacccagaugaagaaccuguacggcgacagcaacccccagaaguucaccagcagcgccaacggcgugaccacccacuacgugagccagaucggcgacuuccccgaccagaccgaggacggcggccugccccagagcggcagaaucgugguggacuacaugaugcagaagcccggcaagaccggcaccaucguguaccagagaggcgugcugcugccccagaagguguggugcgccagcggcagaagcaaggugaucaagggcagccugccccugaucggcgaggccgacugcauccacgagaaguacggcggccugaacaagagcaagcccuacuacaccggcgagcacgccaaggccaucggcaacugccccaucugggugaagaccccccugaagcuggccaacggcaccaaguacagaccccccgccaagcugcugaaggagagaggcuucuucggcgccaucgccggcuuccuggagggcggcugggagggcaugaucgccggcuggcacggcuacaccagccacggcgcccacggcguggccguggccgccgaccugaagagcacccaggaggccaucaacaagaucaccaagaaccugaacagccugagcgagcuggaggugaagaaccugcagagacugagcggcgccauggacgagcugcacaacgagauccuggagcuggacgagaagguggacgaccugagagccgacaccaucagcagccagaucgagcuggccgugcugcugagcaacgagggcaucaucaacagcgaggacgagcaccugcuggcccuggagagaaagcugaagaagaugcugggccccagcgccguggacaucggcaacggcugcuucgagaccaagcacaagugcaaccagaccugccuggacagaaucgccgccggcaccuucaacgccggcgaguucagccugcccaccuucgacagccugaacaucaccgccgccagccugaacgacgacggccuggacaaccacaccauccugcuguacuacagcaccgccgccagcagccuggccgugacccugaugcuggccaucuucaucguguacauggugagcagagacaacgugagcugcagcaucugccuguga

SEQ ID NO: 187791 - RNA, 1755 nt, Artificial Sequence; identical to SEQ ID NO: 186486
  derived and/or modified CDS sequence (opt4) from hemagglutinin__InfluenzaB__AGX24139

SEQ ID NO: 187792 - RNA, 1755 nt, Artificial Sequence
  derived and/or modified CDS sequence (opt4) from hemagglutinin__InfluenzaB__AGX24150
augaaggccaucaucgugcugcugaugguggugaccagcaacgccgacagaaucugcaccggcaucaccagcagcaacagcccccacguggugaagaccgccacccagggcgaggugaacgugaccggcgugaucccccugaccaccacccccaccaagagcuacuucgccaaccugaagggcaccagaaccagaggcaagcugugccccuacugccugaacugcaccgaccuggacguggcccugggcagacccaugugcgugggcaccacccccagcgccaaggccagcauccugcacgaggugagacccgugaccagcggcugcuuccccaucaugcacgacagaaccaagaucagacagcugcccaaccugcugagaggcuacgagaacaucagacugagcacccagaacgugaucgacgccgagaaggcccccggcggccccuacagacugggcaccagcggcagcugccccaacgccaccagcaagagcggcuucuucgccaccauggccugggccgugcccaaggacaacaacaagaacgccaccaacccccugaccguggaggugcccuacaucugcaccgagggcgaggaccagaucaccguguggggcuuccacagcgacaacaagacccagaugaagaaccuguacggcgacagcaacccccagaaguucaccagcagcgccaacggcgugaccacccacuacgugagccagaucggcagcuuccccgaccagaccgaggacggcggccugccccagagcggcagaaucgugguggacuacaugaugcagaagcccggcaagaccggcaccaucguguaccagagaggcauccugcugccccagaagguguggugcgccagcggcagaagcaaggugaucaagggcagccugccccugaucggcgaggccgacugccugcacgagaaguacggcggccugaacaagagcaagcccuacuacaccggcgagcacgccaaggccaucggcaacugccccaucugggugaagaccccccugaagcuggccaacggcaccaaguacagaccccccgccaagcugcugaaggagagaggcuucuucggcgccaucgccggcuuccuggagggcggcugggagggcaugaucgccggcuggcacggcuacaccagccacggcgcccacggcguggccguggccgccgaccugaagagcacccaggaggccaucaacaagaucaccaagaaccugaacagccugagcgagcuggaggugaagaaccugcagagacugagcggcgccauggacgagcugcacaacgagauccuggagcuggacgagaagguggacgaccugagagccgacaccaucagcagccagaucgagcuggccgugcugcugagcaacgagggcaucaucaacagcgaggacgagcaccugcuggcccuggagagaaagcugaagaagaugcugggccccagcgccguggagaucggcaacggcugcuucgagaccaagcacaagugcaaccagaccugccuggacagaaucgccgccggcaccuucaacgccggcgaguucagccugcccaccuucgacagccugaacaucaccgccgccagccugaacgacgacggccuggacaaccacaccauccugcuguacuacagcaccgccgccagcagccuggccgugacccugaugcuggccaucuucaucguguacauggugagcagagacaacgugagcugcagcaucugccuguga

SEQ ID NO: 187793 - RNA, 1755 nt, Artificial Sequence; identical to SEQ ID NO: 187107
  derived and/or modified CDS sequence (opt4) from hemagglutinin__InfluenzaB__AGX24161

SEQ ID NO: 187794 - RNA, 1755 nt, Artificial Sequence; identical to SEQ ID NO: 186880
  derived and/or modified CDS sequence (opt4) from hemagglutinin__InfluenzaB__AGX24172

SEQ ID NO: 187795 - RNA, 1755 nt, Artificial Sequence; identical to SEQ ID NO: 186880
  derived and/or modified CDS sequence (opt4) from hemagglutinin__InfluenzaB__AGX24183

SEQ ID NO: 187796 - RNA, 1755 nt, Artificial Sequence; identical to SEQ ID NO: 186880
  derived and/or modified CDS sequence (opt4) from hemagglutinin__InfluenzaB__AGX24194

SEQ ID NO: 187797 - RNA, 1755 nt, Artificial Sequence; identical to SEQ ID NO: 186627
  derived and/or modified CDS sequence (opt4) from hemagglutinin__InfluenzaB__AGX24205

SEQ ID NO: 187798 - RNA, 1755 nt, Artificial Sequence; identical to SEQ ID NO: 186791
  derived and/or modified CDS sequence (opt4) from hemagglutinin__InfluenzaB__AGX24227

SEQ ID NO: 187799 - RNA, 1755 nt, Artificial Sequence; identical to SEQ ID NO: 186880
  derived and/or modified CDS sequence (opt4) from hemagglutinin__InfluenzaB__AGX24238

SEQ ID NO: 187800 - RNA, 1755 nt, Artificial Sequence
  derived and/or modified CDS sequence (opt4) from hemagglutinin__InfluenzaB__AGX24249
augaaggccaucaucgugcugcugaugguggugaccagcaacgccgacagaaucugcaccggcaucaccagcagcaagagcccccacguggugaagaccgccacccagggcgaggugaacgugaccggcgugaucccccugaccaccacccccaccaagagcuacuucgccaaccugaagggcaccagaaccagaggcaagcugugccccgacugccugaacugcaccgaccuggacguggcccugggcagacccaugugcgugggcaccacccccagcgccaaggccagcauccugcacgaggugagacccgugaccagcggcugcuuccccaucaugcacgacagaaccaagaucagacagcugcccaaccugcugagaggcuacgagaacaucagacugagcacccagaacgugaucgacgccgagaaggcccccggcggccccuacagacugggcaccagcggcagcugccccaacgccaccagcaagaucggcuucuucgccaccauggccugggccgugcccaaggacaacuacaagaacgccaccaacccccugaccguggaggugcccuacaucugcaccgagggcgaggaccagaucaccguguggggcuuccacagcgacaacaagacccagaugaagaaccuguacggcgacagcaacccccagaaguucaccagcagcgccaacggcgugaccacccacuacgugagccagaucggcgacuuccccgaccagaccgaggacggcggccugccccagagcggcagaaucgugguggacuacaugaugcagaagcccggcaagaccggcaccaucguguaccagagaggcgugcugcugccccagaagguguggugcgccagcggcagaagcaaggugaucaagggcagccugccccugaucggcgaggccgacugccugcacgagaaguacggcggccugaacaagagcaagcccuacuacaccggcgagcacgccaaggccaucggcaacugccccaucugggugaagaccccccugaagcuggccaacggcaccaaguacagaccccccgccaagcugcugaaggagagaggcuucuucggcgccaucgccggcuuccuggagggcggcugggagggcaugaucgccggcuggcacggcuacaccagccacggcgcccacggcguggccguggccgccgaccugaagagcacccaggaggccaucaacaagaucaccaagaaccugaacagccugagcgagcuggaggugaagaaccugcagagacugagcggcgccauggacgagcugcacaacgagauccuggagcuggacgagaagguggacgaccugagagccgacaccaucagcagccagaucgagcuggccgugcugcugagcaacgagggcaucaucaacagcgaggacgagcaccugcuggcccuggagagaaagcugaagaagaugcugggccccagcgccguggacaucggcaacggcugcuucgagaccaagcacaagugcaaccagaccugccuggacagaaucgccgccggcaccuucaacgccggcgaguucagccugcccaccuucgacagccugaacaucaccgccgccagccugaacgacgacggccuggacaaccacaccauccugcuguacuacagcaccgccgccagcagccuggccgugacccugaugcuggccaucuucaucguguacauggugagcagagacaacgugagcugcagcaucugccuguga

SEQ ID NO: 187801 - RNA, 1755 nt, Artificial Sequence; identical to SEQ ID NO: 186627
  derived and/or modified CDS sequence (opt4) from hemagglutinin__InfluenzaB__AGX24260

SEQ ID NO: 187802 - RNA, 1755 nt, Artificial Sequence; identical to SEQ ID NO: 187116
  derived and/or modified CDS sequence (opt4) from hemagglutinin__InfluenzaB__AGX24271

SEQ ID NO: 187803 - RNA, 1755 nt, Artificial Sequence
  derived and/or modified CDS sequence (opt4) from hemagglutinin__InfluenzaB__AGX24282
augaaggccaucaucgugcugcugaugguggugaccagcaacgccgacagaaucugcaccggcaucaccagcagcaacagcccccacguggugaagaccgccacccagggcgaggugaacgugaccggcgugaucccccugaccaccacccccaccaagagcuacuucgccaaccugaagggcaccagaaccagaggcaagcugugccccgacugccugaacugcaccgaccuggacguggcccugggcagacccaugugcgugggcaccacccccagcgccaaggccagcauccugcacgaggugagacccgugaccagcggcugcuuccccaucaugcacgacagaaccaagaucagacagcugcccaaccugcugagaggcuacgagaacaucagacugagcacccagaacgugaucgacgccgagaaggcccccggcggccccuacagacugggcaccagcggcagcugccccaacgccaccagcaagagcggcuucuucgccaccauggccugggccgugcccaaggacaacaacaagaacgccaccaacccccugaccguggaggugcccuacaucugcaccaagggcgaggaccagaucaccguguggggcuuccacagcgacaacaagacccagaugaagaaccuguacggcgacagcaacccccagaaguucaccagcagcgccaacggcgugaccacccacuacgugagccagaucggcagcuuccccgaccagaccgaggacggcggccugccccagagcggcagaaucgugguggacuacaugaugcagaagcccggcaagaccggcaccaucguguaccagagaggcgugcugcugccccagagaguguggugcgccagcggcagaagcaaggugaucaagggcagccugccccugaucggcgaggccgacugccugcacgagaaguacggcggccugaacaagagcaagcccuacuacaccggcgagcacgccaaggccaucggcaacugccccaucugggugaagaccccccugaagcuggccaacggcaccaaguacagaccccccgccaagcugcugaaggagagaggcuucuucggcgccaucgccggcuuccuggagggcggcugggagggcaugaucgccggcuggcacggcuacaccagccacggcgcccacggcguggccguggccgccgaccugaagagcacccaggaggccaucaacaagaucaccaagaaccugaacagccugagcgagcuggaggugaagaaccugcagagacugagcggcgccauggacgagcugcacaacgagauccuggagcuggacgagaagguggacgaccugagagccgacaccaucagcagccagaucgagcuggccgugcugcugagcaacgagggcaucaucaacagcgaggacgagcaccugcuggcccuggagagaaagcugaagaagaugcugggccccagcgccguggagaucggcaacggcugcuucgagaccaagcacaagugcaaccagaccugccuggacagaaucgccgccggcaccuucaacgccggcgaguucagccugcccaccuucgacagccugaacaucaccgccgccagccugaacgacgacggccuggacaaccacaccauccugcuguacuacagcaccgccgccagcagccuggccgugacccugaugcuggccaucuucaucguguacauggugagcagagacaacgugagcugcagcaucugccuguga

SEQ ID NO: 187804 - RNA, 1755 nt, Artificial Sequence; identical to SEQ ID NO: 186627
  derived and/or modified CDS sequence (opt4) from hemagglutinin__InfluenzaB__AGX24293

SEQ ID NO: 187805 - RNA, 1755 nt, Artificial Sequence; identical to SEQ ID NO: 186627
  derived and/or modified CDS sequence (opt4) from hemagglutinin__InfluenzaB__AGX24304

SEQ ID NO: 187806 - RNA, 1755 nt, Artificial Sequence; identical to SEQ ID NO: 187116
  derived and/or modified CDS sequence (opt4) from hemagglutinin__InfluenzaB__AGX24315

SEQ ID NO: 187807 - RNA, 1755 nt, Artificial Sequence
  derived and/or modified CDS sequence (opt4) from hemagglutinin__InfluenzaB__AGX24326
augaaggccaucaucgugcugcugaugguggugaccagcaacgccgacagaaucugcaccggcaucaccagcagcaacagcccccacguggugaagaccgccacccagggcgaggugaacgugaccggcgugaucccccugaccaccacccccaccaagagcuacuucgccaaccugaagggcaccagaaccagaggcaagcugugccccgacugccugaacugcaccgaccuggacguggcccugggcagacccaccugcgugggcaccacccccagcgccaaggccagcauccugcacgaggugagacccgugaccagcggcugcuuccccaucaugcacgacagaaccaagaucagacagcugcccaaccugcugagaggcuacgagaacaucagacugagcacccagaacgugaucgacgccgagaaggcccccggcggccccuacagacugggcaccagcggcagcugccccaacgccaccagcaagagcggcuucuucgccaccauggccugggccgugcccaaggacaacaacaagaacgccaccaacccccugaccguggaggugcccuacaucugcaccgagggcgaggaccagaucaccguguggggcuuccacagcgacaacaagacccagaugaagaaccuguacggcgacagcaacccccagaaguucaccagcagcgccaacggcgugaccacccacuacgugagccagaucggcagcuuccccgaccagaccgaggacggcggccugccccagagcggcagaaucgugguggacuacaugaugcagaagcccggcaagaccggcaccaucguguaccagagaggcauccugcugccccagaagguguggugcgccagcggcagaagcaaggugaucaagggcagccugccccugaucggcgaggccgacugccugcacgagaaguacggcggccugaacaagagcaagcccuacuacaccggcgagcacgccaaggccaucggcaacugccccaucugggugaagaccccccugaagcuggccaacggcaccaaguacagaccccccgccaagcugcugaaggagagaggcuucuucggcgccaucgccggcuuccuggagggcggcugggagggcaugaucgccggcuggcacggcuacaccagccacggcgcccacggcguggccguggccgccgaccugaagagcacccaggaggccaucaacaagaucaccaagaaccugaacagccugagcgagcuggaggugaagaaccugcagagacugagcggcgccauggacgagcugcacaacgagauccuggagcuggacgagaagguggacgaccugagagccgacaccaucagcagccagaucgagcuggccgugcugcugagcaacgagggcaucaucaacagcgaggacgagcaccugcuggcccuggagagaaagcugaagaagaugcugggccccagcgccguggagaucggcaacggcugcuucgagaccaagcacaagugcaaccagaccugccuggacagaaucgccgccggcaccuucaacgccggcgaguucagccugcccaccuucgacagccugaacaucaccgccgccagccugaacgacgacggccuggacaaccacaccauccugcuguacuacagcaccgccgccagcagccuggccgugacccugaugcuggccaucuucaucguguacauggugagcagagacaacgugagcugcagcaucugccuguga

SEQ ID NO: 187808 - RNA, 1755 nt, Artificial Sequence
  derived and/or modified CDS sequence (opt4) from hemagglutinin__InfluenzaB__AGX24337
augaaggccaucaucgugcugcugaugguggugaccagcaacgccgacagaaucugcaccggcaucaccagcagcaacagcccccacguggugaagaccgccacccagggcgaggugaacgugaccggcgugaucccccugaccaccacccccaccaagagcuacuucgccaaccugaagggcaccagaaccagaggcaagcugugccccgacugccugaacugcaccgaccuggacguggcccugggcaugcccaugugcgugggcaccacccccagcgccaaggccagcauccugcacgaggugagacccgugaccagcggcugcuuccccaucaugcacgacagaaccaagaucagacagcugcccaaccugcugagaggcuacgagaacaucagacugagcacccagaacgugaucgacgccgagaaggcccccggcggccccuacagacugggcaccagcggcagcugccccaacgccaccagcaagaucggcuucuucgccaccauggccugggccgugcccaaggacaacuacaagaacgccaccaacccccugaccguggaggugcccuacaucugcaccgagggcgaggaccagaucaccguguggggcuuccacagcgacaacaagacccagaugaagaaccuguacggcgacagcaacccccagaaguucaccagcagcgccaacggcgugaccacccacuacgugagccagaucggcgacuuccccgaccagaccgaggacggcggccugccccagagcggcagaaucgugguggacuacaugaugcagaagcccggcaagaccggcaccaucguguaccagagaggcgugcugcugccccagaagguguggugcgccagcggcagaagcaaggugaucaagggcagccugccccugaucggcgaggccgacugccugcacgagaaguacggcggccugaacaagagcaagcccuacuacaccggcgagcacgccaaggccaucggcaacugccccaucugggugaagaccccccugaagcuggccaacggcaccaaguacagaccccccgccaagcugcugaaggagagaggcuucuucggcgccaucgccggcuuccuggagggcggcugggagggcaugaucgccggcuggcacggcuacaccagccacggcgcccacggcguggccguggccgccgaccugaagagcacccaggaggccaucaacaagaucaccaagaaccugaacagccugagcgagcuggaggugaagaaccugcagagacugagcggcgccauggacgagcugcacaacgagauccuggagcuggacgagaagguggacgaccugagagccgacaccaucagcagccagaucgagcuggccgugcugcugagcaacgagggcaucaucaacagcgaggacgagcaccugcuggcccuggagagaaagcugaagaagaugcugggccccagcgccguggacaucggcaacggcugcuucgagaccaagcacaagugcaaccagaccugccuggacagaaucgccgccggcaccuucaacgccggcgaguucagccugcccaccuucgacagccugaacaucaccgccgccagccugaacgacgacggccuggacaaccacaccauccugcuguacuacagcaccgccgccagcagccuggccgugacccugaugcuggccaucuucaucguguacauggugagcagagacaacgugagcugcagcaucugccuguga

SEQ ID NO: 187809 - RNA, 1755 nt, Artificial Sequence; identical to SEQ ID NO: 186880
  derived and/or modified CDS sequence (opt4) from hemagglutinin__InfluenzaB__AGX24348

SEQ ID NO: 187810 - RNA, 1755 nt, Artificial Sequence; identical to SEQ ID NO: 186627
  derived and/or modified CDS sequence (opt4) from hemagglutinin__InfluenzaB__AGX24359

SEQ ID NO: 187811 - RNA, 1755 nt, Artificial Sequence; identical to SEQ ID NO: 186880
  derived and/or modified CDS sequence (opt4) from hemagglutinin__InfluenzaB__AGX24381

SEQ ID NO: 187812 - RNA, 1755 nt, Artificial Sequence
  derived and/or modified CDS sequence (opt4) from hemagglutinin__InfluenzaB__AGX24392
augaaggccaucaucgugcugcugaugguggugaccagcaacgccgacagaaucugcaccggcaucaccagcagcaacagcccccacguggugaagaccgccacccagggcgaggugaacgugaccggcgugaucccccugaccaccacccccaccaagagcuacuucgccaaccugaagggcaccagaaccagaggcaagcugugccccgacugccugaacugcaccgaccuggacguggcccugggcagacccaugugcgugggcaccacccccagcgccaaggccagcauccugcacgaggugagacccgugaccagcggcugcuuccccaucaugcacgacagaaccaagaucagacagcugcccaaccugcugagaggcuacgagaacaucagacugagcacccagaacgugaucgacgccgagaaggcccccggcggccccuacagacugggcaccagcggcagcugccccaacgccaccagcaagagcggcuucuucgccaccauggccugggccgugcccaaggacaacaacaagaacgccaccaacccccugaccguggagauccccuacaucugcaccgagggcgaggaccagaucaccguguggggcuuccacagcgacaacaagacccagaugaagaaccuguacggcgacagcaacccccagaaguucaccagcagcgccaacggcgugaccacccacuacgugagccagaucggcagcuuccccgaccagaccgaggacggcggccugccccagagcggcagaaucgugguggacuacaugaugcagaagcccggcaagaccggcaccaucguguaccagagaggcgugcugcugccccagaagguguggugcgccagcggcagaagcaaggugaucaagggcagccugccccugaucggcgaggccgacugccugcacgagaaguacggcggccugaacaagagcaagcccuacuacaccggcgagcacgccaaggccaucggcaacugccccaucugggugaagaccccccugaagcuggccaacggcaccaaguacagaccccccgccaagcugcugaaggagagaggcuucuucggcgccaucgccggcuuccuggagggcggcugggagggcaugaucgccggcuggcacggcuacaccagccacggcgcccacggcguggccguggccgccgaccugaagagcacccaggaggccaucaacaagaucaccaagaaccugaacagccugagcgagcuggaggugaagaaccugcagagacugagcggcgccauggacgagcugcacaacgagauccuggagcuggacgagaagguggacgaccugagagccgacaccaucagcagccagaucgagcuggccgugcugcugagcaacgagggcaucaucaacagcgaggacgagcaccugcuggcccuggagagaaagcugaagaagaugcugggccccagcgccguggagaucggcaacggcugcuucgagaccaagcacaagugcaaccagaccugccuggacagaaucgccgccggcaccuucaacgccggcgaguucagccugcccaccuucgacagccugaacaucaccgccgccagccugaacgacgacggccuggacaaccacaccauccugcuguacuacagcaccgccgccagcagccuggccgugacccugaugcuggccaucuucaucguguacauggugagcagagacaacgugagcugcagcaucugccuguga

SEQ ID NO: 187813 - RNA, 1755 nt, Artificial Sequence; identical to SEQ ID NO: 186627
  derived and/or modified CDS sequence (opt4) from hemagglutinin__InfluenzaB__AGX24403

SEQ ID NO: 187814 - RNA, 1755 nt, Artificial Sequence; identical to SEQ ID NO: 186880
  derived and/or modified CDS sequence (opt4) from hemagglutinin__InfluenzaB__AGX24414

SEQ ID NO: 187815 - RNA, 1755 nt, Artificial Sequence; identical to SEQ ID NO: 186627
  derived and/or modified CDS sequence (opt4) from hemagglutinin__InfluenzaB__AGX24425

SEQ ID NO: 187816 - RNA, 1755 nt, Artificial Sequence; identical to SEQ ID NO: 186627
  derived and/or modified CDS sequence (opt4) from hemagglutinin__InfluenzaB__AGX24436

SEQ ID NO: 187817 - RNA, 1755 nt, Artificial Sequence; identical to SEQ ID NO: 187116
  derived and/or modified CDS sequence (opt4) from hemagglutinin__InfluenzaB__AGX24447

SEQ ID NO: 187818 - RNA, 1755 nt, Artificial Sequence; identical to SEQ ID NO: 187807
  derived and/or modified CDS sequence (opt4) from hemagglutinin__InfluenzaB__AGX24458

SEQ ID NO: 187819 - RNA, 1755 nt, Artificial Sequence
  derived and/or modified CDS sequence (opt4) from hemagglutinin__InfluenzaB__AGX24469
augaaggccaucaucgugcugcugaugguggugaccagcaacgccgacagaaucugcaccggcaucaccagcagcaacagcccccacguggugaagaccgccacccagggcgaggugaacgugaccggcgugaucccccugaccaccacccccaccaagagcuacuucgccaaccugaagggcaccagaaccagaggcaagcugugccccgacugccugaacugcaccgaccuggacguggcccugggcagacccaccugcgugggcaccacccccagcgccaaggccagcauccugcacgaggugagacccgugaccagcggcugcuuccccaucaugcacgacagaaccaagaucagacagcugcccaaccugcugagaggcuacgagaacaucagacugagcacccagaacgugaucgacgccgagaaggcccccggcggccccuacagacugggcaccagcggcagcugccccaacgccaccagcaagagcggcuucuucgccaccauggccugggccgugcccaaggacaacaacaagaacgccaccaacccccugaccguggaggugcccuacaucugcaccgagggcgaggaccagaucaccguguggggcuuccacagcgacaacaagacccagaugaagaaccuguacggcgacagcaacccccagaaguucaccagcagcgccaacggcgugaccacccacuacgugagccagaucggcagcuuccccgaccagaccgaggacggcggccugccccagagcggcagaaucgugguggacuacaugaugcagaagcccggcaagaccggcaccaucguguaccagagaggcauccugcugccccagaagguguggugcgccagcggcagaagcaaggugaucaagggcagccugccccugaucggcgaggccgacugccugcacgagaaguacggcggccugaacaagagcaagcccuacuacaccggcgagcacgccaaggccaucggcaacugccccaucugggugaagaccccccugaagcuggccaacggcaccaaguacagaccccccgccaagcugcugaaggagagaggcuucuucggcgccaucgccggcuuccuggagggcggcugggagggcaugguggccggcuggcacggcuacaccagccacggcgcccacggcguggccguggccgccgaccugaagagcacccaggaggccaucaacaagaucaccaagaaccugaacagccugagcgagcuggaggugaagaaccugcagagacugagcggcgccauggacgagcugcacaacgagauccuggagcuggacgagaagguggacgaccugagagccgacaccaucagcagccagaucgagcuggccgugcugcugagcaacgagggcaucaucaacagcgaggacgagcaccugcuggcccuggagagaaagcugaagaagaugcugggccccagcgccguggagaucggcaacggcugcuucgagaccaagcacaagugcaaccagaccugccuggacagaaucgccgccggcaccuucaacgccggcgaguucagccugcccaccuucgacagccugaacaucaccgccgccagccugaacgacgacggccuggacaaccacaccauccugcuguacuacagcaccgccgccagcagccuggccgugacccugaugcuggccaucuucaucguguacauggugagcagagacaacgugagcugcagcaucugccuguga

SEQ ID NO: 187820 - RNA, 1755 nt, Artificial Sequence; identical to SEQ ID NO: 187116
  derived and/or modified CDS sequence (opt4) from hemagglutinin__InfluenzaB__AGX24480

SEQ ID NO: 187821 - RNA, 1755 nt, Artificial Sequence; identical to SEQ ID NO: 187116
  derived and/or modified CDS sequence (opt4) from hemagglutinin__InfluenzaB__AGX24491

SEQ ID NO: 187822 - RNA, 1755 nt, Artificial Sequence
  derived and/or modified CDS sequence (opt4) from hemagglutinin__InfluenzaB__AGX24502
augaaggccaucaucgugcugcugaugguggugaccagcaacgccgacagaaucugcaccggcaucaccagcagcaacagcccccacguggugaagaccgccacccagggcgaggugaacgugaccggcgugaucccccugaccaccacccccaccaagagcuacuucgccaaccugaagggcaccagaaccagaggcaagcugugccccgacugccugaacugcaccgaccuggacguggcccugggcagacccaugugcgugggcaccacccccagcgccaaggccagcauccugcacgaggugagacccgugaccagcggcugcuuccccaucaugcacgacagaaccaagaucagacagcugcccaaccugcugagaggcuacgagaacaucagacugagcacccagaacgugaucgacgccgagaaggcccccggcggccccuacagacugggcaccagcggcagcugccccaacgccaccagcaagagcggcuucuucgccaccauggccugggccgugcagaaggacaacaacaagaacgccaccaacccccugaccguggaggugcccuacaucugcaccgagggcgaggaccagaucaccguguggggcuuccacagcgacaacaagacccagaugaagaaccuguacggcgacagcaacccccagaaguucaccagcagcgccaacggcgugaccacccacuacgugagccagaucggcagcuuccccgaccagaccgaggacggcggccugccccagagcggcagaaucgugguggacuacaugaugcagaagcccggcaagaccggcaccaucguguaccagagaggcgugcugcugccccagagaguguggugcgccagcggcagaagcaaggugaucaagggcagccugccccugaucggcgaggccgacugccugcacgagaaguacggcggccugaacaagagcaagcccuacuacaccggcgagcacgccaaggccaucggcaacugccccaucugggugaagaccccccugaagcuggccaacggcaccaaguacagaccccccgccaagcugcugaaggagagaggcuucuucggcgccaucgccggcuuccuggagggcggcugggagggcaugaucgccggcuggcacggcuacaccagccacggcgcccacggcguggccguggccgccgaccugaagagcacccaggaggccaucaacaagaucaccaagaaccugaacagccugagcgagcuggaggugaagaaccugcagagacugagcggcgccauggacgagcugcacaacgagauccuggagcuggacgagaagguggacgaccugagagccgacaccaucagcagccagaucgagcuggccgugcugcugagcaacgagggcaucaucaacagcgaggacgagcaccugcuggcccuggagagaaagcugaagaagaugcugggccccagcgccguggagaucggcaacggcugcuucgagaccaagcacaagugcaaccagaccugccuggacagaaucgccgccggcaccuucaacgccggcgaguucagccugcccaccuucgacagccugaacaucaccgccgccagccugaacgacgacggccuggacaaccacaccauccugcuguacuacagcaccgccgccagcagccuggccgugacccugaugcuggccaucuucaucguguacauggugagcagagacaacgugagcugcagcaucugccuguga

SEQ ID NO: 187823 - RNA, 1755 nt, Artificial Sequence; identical to SEQ ID NO: 186791
  derived and/or modified CDS sequence (opt4) from hemagglutinin__InfluenzaB__AGX24513

SEQ ID NO: 187824 - RNA, 1755 nt, Artificial Sequence; identical to SEQ ID NO: 187116
  derived and/or modified CDS sequence (opt4) from hemagglutinin__InfluenzaB__AGX24524

SEQ ID NO: 187825 - RNA, 1755 nt, Artificial Sequence
  derived and/or modified CDS sequence (opt4) from hemagglutinin__InfluenzaB__AGX24535
augaaggccaucaucgugcugcugaugguggugaccagcaacgccgacagaaucugcaccggcaucaccagcagcaacagcccccacguggugaagaccgccacccagggcgaggugaacgugaccggcgugaucccccugaccaccacccccaccaagagcuacuucgccaaccugaagggcaccagaaccagaggcaagcugugccccgacugccugaacugcaccgaccuggacguggcccugggcagacccaugugcgugggcaccacccccagcgccaaggccagcauccugcacgaggugagacccgugaccagcggcugcuuccccaucaugcacgacagaaccaagaucagacagcugcccaaccugcugagaggcuacgagaacaucagacugagcacccagaacgugaucgacgccgagaaggcccccggcggccccuacagacugggcaccagcggcagcugccccaacgccaccagcaagaucggcuucuucgccaccauggccugggccgugcccaaggacaacuacaagaacgccaccaacccccugaccguggaggugcccuacaucugcaccgagggcgaggaccagaucaccguguggggcuuccacagcgacaacaagacccagaugaagaaccuguacggcgacagcaacccccagaaguucaccagcagcgccaacggcgugaccacccacuacgugagccagaucggcgacuuccccgaccagaccgaggacggcggccugccccagagcggcagaaucgugguggacuacaugaugcagaagcccggcaagaccggcaccaucguguaccagagaggcgugcugcugccccagaagguguggugcgccagcggcagaagcaaggugaucaagggcagccugccccugaucggcgaggccgacugccugcacgagaaguacggcggccugaacaagagcaagcccuacuacaccggcgagcacgccaaggccaucggcaacugccccaucugggugaagaccccccugaagcuggccaacggcaccaaguacagaccccccgccaagcugcugaaggagagaggcuucuucggcgccaucgccggcuuccuggagggcggcugggagggcaugaucgccggcuggcacggcuacaccagccacggcgcccacggcguggccguggccgccgaccugaagagcacccaggaggccaucaacaagaucaccaagaaccugaacagccugagcgagcuggaggugaagaaccugcagagacugagcggcgccauggacgagcugcacaacgagauccuggagcuggacgagaagguggacgaccugagagccgacaccaucagcgcccagaucgagcuggccgugcugcugagcaacgagggcaucaucaacagcgaggacgagcaccugcuggcccuggagagaaagcugaagaagaugcugggccccagcgccguggacaucggcaacggcugcuucgagaccaagcacaagugcaaccagaccugccuggacagaaucgccgccggcaccuucaacgccggcgaguucagccugcccaccuucgacagccugaacaucaccgccgccagccugaacgacgacggccuggacaaccacaccauccugcuguacuacagcaccgccgccagcagccuggccgugacccugaugcuggccaucuucaucguguacauggugagcagagacaacgugagcugcagcaucugccuguga

SEQ ID NO: 187826 - RNA, 1755 nt, Artificial Sequence; identical to SEQ ID NO: 186627
  derived and/or modified CDS sequence (opt4) from hemagglutinin__InfluenzaB__AGX24546

SEQ ID NO: 187827 - RNA, 1755 nt, Artificial Sequence
  derived and/or modified CDS sequence (opt4) from hemagglutinin__InfluenzaB__AGX24557
augaagaccaucaucgugcugcugaugguggugaccagcaacgccgacagaaucugcaccggcaucaccagcagcaacagcccccacguggugaagaccgccacccagggcgaggugaacgugaccggcgugaucccccugaccaccacccccaccaagagcuacuucgccaaccugaagggcaccagaaccagaggcaagcugugccccgacugccugaacugcaccgaccuggacguggcccugggcagacccaccugcgugggcaccacccccagcgccaaggccagcauccugcacgaggugagacccgugaccagcggcugcuuccccaucaugcacgacagaaccaagaucagacagcugcccaaccugcugagaggcuacgagaacaucagacugagcacccagaacgugaucgacgccgagaaggcccccggcggccccuacagacugggcaccagcggcagcugccccaacgccaccagcaagagcggcuucuucgccaccauggccugggccgugcccaaggacaacaacaagaacgccaccaacccccugaccguggaggugcccuacaucugcaccgagggcgaggaccagaucaccguguggggcuuccacagcgacaacaagacccagaugaagaaccuguacggcgacagcaacccccagaaguucaccagcagcgccaacggcgugaccacccacuacgugagccagaucggcagcuuccccgaccagaccgaggacggcggccugccccagagcggcagaaucgugguggacuacaugaugcagaagcccggcaagaccggcaccaucguguaccagagaggcauccugcugccccagaagguguggugcgccagcggcagaagcaaggugaucaagggcagccugccccugaucggcgaggccgacugccugcacgagaaguacggcggccugaacaagagcaagcccuacuacaccggcgagcacgccaaggccaucggcaacugccccaucugggugaagaccccccugaagcuggccaacggcaccaaguacagaccccccgccaagcugcugaaggagagaggcuucuucggcgccaucgccggcuuccuggagggcggcugggagggcaugaucgccggcuggcacggcuacaccagccacggcgcccacggcguggccguggccgccgaccugaagagcacccaggaggccaucaacaagaucaccaagaaccugaacagccugagcgagcuggaggugaagaaccugcagagacugagcggcgccauggacgagcugcacaacgagauccuggagcuggacgagaagguggacgaccugagagccgacaccaucagcagccagaucgagcuggccgugcugcugagcaacgagggcaucaucaacagcgaggacgagcaccugcuggcccuggagagaaagcugaagaagaugcugggccccagcgccguggagaucggcaacggcugcuucgagaccaagcacaagugcaaccagaccugccuggacagaaucgccgccggcaccuucaacgccggcgaguucagccugcccaccuucgacagccugaacaucaccgccgccagccugaacgacgacggccuggacaaccacaccauccugcuguacuacagcaccgccgccagcagccuggccgugacccugaugcuggccaucuucaucguguacauggugagcagagacaacgugagcugcagcaucugccuguga

SEQ ID NO: 187828 - RNA, 1755 nt, Artificial Sequence; identical to SEQ ID NO: 187116
  derived and/or modified CDS sequence (opt4) from hemagglutinin__InfluenzaB__AGX24579

SEQ ID NO: 187829 - RNA, 1755 nt, Artificial Sequence; identical to SEQ ID NO: 187116
  derived and/or modified CDS sequence (opt4) from hemagglutinin__InfluenzaB__AGX24590

SEQ ID NO: 187830 - RNA, 1755 nt, Artificial Sequence; identical to SEQ ID NO: 187116
  derived and/or modified CDS sequence (opt4) from hemagglutinin__InfluenzaB__AGX24601

SEQ ID NO: 187831 - RNA, 1755 nt, Artificial Sequence; identical to SEQ ID NO: 187116
  derived and/or modified CDS sequence (opt4) from hemagglutinin__InfluenzaB__AGX24612

SEQ ID NO: 187832 - RNA, 1755 nt, Artificial Sequence; identical to SEQ ID NO: 186627
  derived and/or modified CDS sequence (opt4) from hemagglutinin__InfluenzaB__AGX24623

SEQ ID NO: 187833 - RNA, 1755 nt, Artificial Sequence; identical to SEQ ID NO: 187116
  derived and/or modified CDS sequence (opt4) from hemagglutinin__InfluenzaB__AGX24634

SEQ ID NO: 187834 - RNA, 1755 nt, Artificial Sequence; identical to SEQ ID NO: 187825
  derived and/or modified CDS sequence (opt4) from hemagglutinin__InfluenzaB__AGX24656

SEQ ID NO: 187835 - RNA, 1755 nt, Artificial Sequence; identical to SEQ ID NO: 186627
  derived and/or modified CDS sequence (opt4) from hemagglutinin__InfluenzaB__AGX24667

SEQ ID NO: 187836 - RNA, 1755 nt, Artificial Sequence; identical to SEQ ID NO: 186880
  derived and/or modified CDS sequence (opt4) from hemagglutinin__InfluenzaB__AGX24678

SEQ ID NO: 187837 - RNA, 1755 nt, Artificial Sequence; identical to SEQ ID NO: 187116
  derived and/or modified CDS sequence (opt4) from hemagglutinin__InfluenzaB__AGX24689

SEQ ID NO: 187838 - RNA, 1755 nt, Artificial Sequence; identical to SEQ ID NO: 187116
  derived and/or modified CDS sequence (opt4) from hemagglutinin__InfluenzaB__AGX24700

SEQ ID NO: 187839 - RNA, 1755 nt, Artificial Sequence; identical to SEQ ID NO: 187116
  derived and/or modified CDS sequence (opt4) from hemagglutinin__InfluenzaB__AGX24711

SEQ ID NO: 187840 - RNA, 1755 nt, Artificial Sequence; identical to SEQ ID NO: 186627
  derived and/or modified CDS sequence (opt4) from hemagglutinin__InfluenzaB__AGX24722

SEQ ID NO: 187841 - RNA, 1755 nt, Artificial Sequence; identical to SEQ ID NO: 186627
  derived and/or modified CDS sequence (opt4) from hemagglutinin__InfluenzaB__AGX24733

SEQ ID NO: 187842 - RNA, 1755 nt, Artificial Sequence; identical to SEQ ID NO: 186627
  derived and/or modified CDS sequence (opt4) from hemagglutinin__InfluenzaB__AGX24744

SEQ ID NO: 187843 - RNA, 1755 nt, Artificial Sequence; identical to SEQ ID NO: 186627
  derived and/or modified CDS sequence (opt4) from hemagglutinin__InfluenzaB__AGX24755

SEQ ID NO: 187844 - RNA, 1755 nt, Artificial Sequence; identical to SEQ ID NO: 187116
  derived and/or modified CDS sequence (opt4) from hemagglutinin__InfluenzaB__AGX24766

SEQ ID NO: 187845 - RNA, 1755 nt, Artificial Sequence; identical to SEQ ID NO: 186627
  derived and/or modified CDS sequence (opt4) from hemagglutinin__InfluenzaB__AGX24777

SEQ ID NO: 187846 - RNA, 1755 nt, Artificial Sequence; identical to SEQ ID NO: 186627
  derived and/or modified CDS sequence (opt4) from hemagglutinin__InfluenzaB__AGX24788

SEQ ID NO: 187847 - RNA, 1755 nt, Artificial Sequence; identical to SEQ ID NO: 186627
  derived and/or modified CDS sequence (opt4) from hemagglutinin__InfluenzaB__AGX24799

SEQ ID NO: 187848 - RNA, 1755 nt, Artificial Sequence; identical to SEQ ID NO: 187116
  derived and/or modified CDS sequence (opt4) from hemagglutinin__InfluenzaB__AGX24810

SEQ ID NO: 187849 - RNA, 1755 nt, Artificial Sequence; identical to SEQ ID NO: 187116
  derived and/or modified CDS sequence (opt4) from hemagglutinin__InfluenzaB__AGX24821

SEQ ID NO: 187850 - RNA, 1755 nt, Artificial Sequence
  derived and/or modified CDS sequence (opt4) from hemagglutinin__InfluenzaB__AGX24832
augaaggccaucaucgugcugcugaugguggugaccagcaacgccgacagaaucugcaccggcaucaccagcagcaacagcccccacguggugaagaccgccacccagggcgaggugaacgugaccggcgugaucccccugaccaccacccccaccaagagcuacuucgccaaccugaagggcaccagaaccagaggcaagcugugccccgacugccugaacugcaccgaccuggacguggcccugggcagacccaugugcgugggcaccacccccagcgccaaggccagcauccugcacgaggugagacccgugaccagcggcugcuuccccaucaugcacgacagaaccaagaucagacagcugcccaaccugcugagaggcuacgagaacaucagacugagcacccagaacgugaucgacgccgagaaggcccccggcggccccuacagacugggcaccagcggcagcugccccaacgccaccagcaagagcggcuucuucgccaccauggccugggccgugcccaaggacaacaacaagaacgccaccaacccccugaccguggaggugcccuacaucugcaccgagggcgaggaccagaucaccguguggggcuuccacagcgacaacaagacccagaugaagaaccuguacggcgacagcaacccccagaaguucaccagcagcgccaacggcgugaccacccacuacgugagccagaucggcagcuuccccgaccagaccgaggacggcggccugccccagagcggcagaaucgugguggacuacaugaugcagaagcccggcaagaccggcaccaucguguaccagagaggcauccugcugccccagagaguguggugcgccagcggcagaagcaaggugaucaagggcagccugccccugaucggcgaggccgacugccugcacgagaaguacggcggccugaacaagagcaagcccuacuacaccggcgagcacgccaaggccaucggcaacugccccaucugggugaagaccccccugaagcuggccaacggcaccaaguacagaccccccgccaagcugcugaaggagagaggcuucuucggcgccaucgccggcuuccuggagggcggcugggagggcaugaucgccggcuggcacggcuacaccagccacggcgcccacggcguggccguggccgccgaccugaagagcacccaggaggccaucaacaagaucaccaagaaccugaacagccugagcgagcuggaggugaagaaccugcagagacugagcggcgccauggacgagcugcacaacgagauccuggagcuggacgagaagguggacgaccugagagccgacaccaucagcagccagaucgagcuggccgugcugcugagcaacgagggcaucaucaacagcgaggacgagcaccugcuggcccuggagagaaagcugaagaagaugcugggccccagcgccguggagaucggcaacggcugcuucgagaccaagcacaagugcaaccagaccugccuggacagaaucgccgccggcaccuucaacgccggcgaguucagccugcccaccuucgacagccugaacaucaccgccgccagccugaacgacgacggccuggacaaccacaccauccugcuguacuacagcaccgccgccagcagccuggccgugacccugaugcuggccaucuucaucguguacauggugagcagagacaacgugagcugcagcaucugccuguga

SEQ ID NO: 187851 - RNA, 1755 nt, Artificial Sequence
  derived and/or modified CDS sequence (opt4) from hemagglutinin__InfluenzaB__AGX24843
augaaggccaucaucgugcugcugaugguggugaccagcaacgccgacagaaucugcaccggcaucaccagcagcaacagcccccacguggugaagaccgccacccagggcgaggugaacgugaccggcgugaucccccugaccaccacccccaccaagagcuacuucgccaaccugaagggcaccagaaccagaggcaagcugugccccgacugccugaacugcaccgaccuggacguggcccugggcagacccaugugcgugggcaccacccccagcgccaaggccagcauccugcacgaggugagacccgugaccagcggcugcuuccccaucaugcacgacagaaccaagaucagacagcugcccaaccugcugagaggcuacgagaacaucagacugagcacccagaacgugaucgacgccgagaaggcccccggcggccccuacagacugggcaccagcggcagcugccccaacgccaccagcaagaucggcuucuucgccaccauggccugggccgugcccaaggacaacuacaagaacgccaccaacccccugaccguggaggugcccuacaucugcaccgagggcgaggaccagaucaccguguggggcuuccacagcgacaacaagacccagaugaagaaccuguacggcgacagcaacccccagaaguucaccagcagcgccaacggcgugaccacccacuacgugagccagaucggcgacuuccccgaccagaccgaggacggcggccugccccagagcggcagaaucgugguggacuacauggugcagaagcccggcaagaccggcaccaucguguaccagagaggcgugcugcugccccagagaguguggugcaccagcggcagaagcaaggugaucaagggcagccugccccugaucggcgaggccgacugccugcacgagaaguacggcggccugaacaagagcaagcccuacuacaccggcgagcacgccaaggccaucggcaacugccccaucugggugaagaccccccugaagcuggccaacggcaccaaguacagaccccccgccaagcugcugaaggagagaggcuucuucggcgccaucgccggcuuccuggagggcggcugggagggcaugaucgccggcuggcacggcuacaccagccacggcgcccacggcguggccguggccgccgaccugaagagcacccaggaggccaucaacaagaucaccaagaaccugaacagccugagcgagcuggaggugaagaaccugcagagacugagcggcgccauggacgagcugcacaacgagauccuggagcuggacgagaagguggacgaccugagagccgacaccaucagcagccagaucgagcuggccgugcugcugagcaacgagggcaucaucaacagcgaggacgagcaccugcuggcccuggagagaaagcugaagaagaugcugggccccagcgccguggacaucggcaacggcugcuucgagaccaagcacaagugcaaccagaccugccuggacagaaucgccgccggcaccuucaacgccggcgaguucagccugcccaccuucgacagccugaacaucaccgccgccagccugaacgacgacggccuggacaaccacaccauccugcuguacuacagcaccgccgccagcagccuggccgugacccugaugcuggccaucuucaucguguacauggugagcagagacaacgugagcugcagcaucugccuguga

SEQ ID NO: 187852 - RNA, 1755 nt, Artificial Sequence
  derived and/or modified CDS sequence (opt4) from hemagglutinin__InfluenzaB__AGX24854
augaaggccaucaucgugcugcugaugguggugaccagcaacgccgacagaaucugcaccggcaucaccagcagcaacagcccccacguggugaagaccgccacccagggcgaggugaacgugaccggcgugaucccccugaccaccacccccaccaagagcuacuucgccaaccugaagggcaccagaaccagaggcaagcugugccccgagugccugaacugcaccgaccuggacguggcccugggcagacccaugugcgugggcaccacccccagcgccaaggccagcauccugcacgaggugagacccgugaccagcggcugcuuccccaucaugcacgacagaaccaagaucagacagcugcccaaccugcugagaggcuacgagaacaucagacugagcacccagaacgugaucgacgccgagaaggcccccggcggccccuacagacugggcaccagcggcagcugccccaacgccaccagcaagaucggcuucuucgccaccauggccugggccgugcccaaggacaacuacaagaacgccaccaacccccugaccguggaggugcccuacaucugcgccgagggcgaggaccagaucaccguguggggcuuccacagcgacaacaagacccagaugaagaaccuguacggcgacagcaacccccagaaguucaccagcagcgccaacggcgugaccacccacuacgugagccagaucggcgacuuccccgaccagaccgaggacggcggccugccccagagcggcagaaucgugguggacuacauggugcagagacccggcaagaccggcaccaucguguaccagagaggcgugcugcugccccagaagguguggugcgccagcggcagaagcaaggugaucaagggcagccugccccugaucggcgaggccgacugccugcacgagaaguacggcggccugaacaagagcaagcccuacuacaccggcgagcacgccaaggccaucggcaacugccccaucugggugaagaccccccugaagcuggccaacggcaccaaguacagaccccccgccaagcugcugaaggagagaggcuucuucggcgccaucgccggcuuccuggagggcggcugggagggcaugaucgccggcuggcacggcuacaccagccacggcgcccacggcguggccguggccgccgaccugaagagcacccaggaggccaucaacaagaucaccaagaaccugaacagccugagcgagcuggaggugaagaaccugcagagacugagcggcgccauggacgagcugcacaacgagauccuggagcuggacgagaagguggacgaccugagagccgacaccaucagcagccagaucgagcuggccgugcugcugagcaacgagggcaucaucaacagcgaggacgagcaccugcuggcccuggagagaaagcugaagaagaugcugggccccagcgccguggacaucggcaacggcugcuucgagaccaagcacaagugcaaccagaccugccuggacagaaucgccgccggcaccuucaacgccggcgaguucagccugcccaccuucgacagccugaacaucaccgccgccagccugaacgacgacggccuggacaaccacaccauccugcuguacuacagcaccgccgccagcagccuggccgugacccugaugcuggccaucuucaucguguacauggugagcagagacaacgugagcugcagcaucugccuguga

SEQ ID NO: 187853 - RNA, 1755 nt, Artificial Sequence
  derived and/or modified CDS sequence (opt4) from hemagglutinin__InfluenzaB__AGX24865
augaaggccaucaucgugcugcugaugguggugaccagcaacgccgacagaaucugcaccggcaucaccagcagcaacagcccccacguggugaagaccgccacccagggcgaggugaacgugaccggcgugaucccccugaccaccacccccaccaagagcuacuucgccaaccugaagggcaccagaaccagaggcaagcugugccccgacugccugaacugcaccgaccuggacguggcccugggcagacccaugugcgugggcaccacccccagcgccaaggccagcauccugcacgaggugagacccgugaccagcggcugcuuccccaucaugcacgacagaaccaagaucagacagcugcccaaccugcugagaggcuacgagaacaucagacugagcacccagaacgugaucgacgccgagaaggcccccggcggccccuacagacugggcaccagcggcagcugccccaacgccaccagcaagaucggcuucuucgccaccauggccugggccgugcccaaggacaacuacaagaacgccaccaacccccugaccguggaggugcccuacaucugcgccgagggcgaggaccagaucaccguguggggcuuccacagcgacaacaagacccagaugaagaaccuguacggcgacagcaacccccagaaguucaccagcagcgccaacggcgugaccacccacuacgugagccagaucggcgacuuccccgaccagaccgaggacggcggccugccccagagcggcagaaucgugguggacuacauggugcagagacccggcaagaccggcaccaucguguaccagagaggcgugcugcugccccagaagguguggugcgccagcggcagaagcaaggugaucaagggcagccugccccugaucggcgaggccgacugccugcacgagaaguacggcggccugaacaagagcaagcccuacuacaccggcgagcacgccaaggccaucggcaacugccccaucugggugaagaccccccugaagcuggccaacggcaccaaguacagaccccccgccaagcugcugaaggagagaggcuucuucggcgccaucgccggcuuccuggagggcggcugggagggcaugaucgccggcuggcacggcuacaccagccacggcgcccacggcguggccguggccgccgaccugaagagcacccaggaggccaucaacaagaucaccaagaaccugaacagccugagcgagcuggaggugaagaaccugcagagacugagcggcgccauggacgagcugcacaacgagauccuggagcuggacgagaagguggacgaccugagagccgacaccaucagcagccagaucgagcuggccgugcugcugagcaacgagggcaucaucaacagcgaggacgagcaccugcuggcccuggagagaaagcugaagaagaugcugggccccagcgccguggacaucggcaacggcugcuucgagaccaagcacaagugcaaccagaccugccuggacagaaucgccgccggcaccuucaacgccggcgaguucagccugcccaccuucgacagccugaacaucaccgccgccagccugaacgacgacggccuggacaaccacaccauccugcuguacuacagcaccgccgccagcagccuggccgugacccugaugcuggccaucuucaucguguacauggugagcagagacaacgugagcugcagcaucugccuguga

SEQ ID NO: 187854 - RNA, 1755 nt, Artificial Sequence
  derived and/or modified CDS sequence (opt4) from hemagglutinin__InfluenzaB__AGX24876
augaaggccaucaucgugcugcugaugguggugaccagcaacgccgacagaaucugcaccggcaucaccagcagcaacagcccccacguggugaagaccgccacccagggcgaggugaacgugaccggcgugaucccccugaccaccacccccaccaagagcuacuucgccaaccugaagggcaccagaaccagaggcaagcugugccccgacugccugaacugcaccgaccuggacguggcccugggcagacccaugugcgugggcaccacccccagcgccaaggccagcauccugcacgaggugagacccgugaccagcggcugcuuccccaucaugcacgacagaaccaagaucagacagcugcccaaccugcugagaggcuacgagaacaucagacugagcacccagaacgugaucgacgccgagaaggcccccggcggccccuacagacugggcaccagcggcagcugccccaacgccaccagcaagaucggcuucuucgccaccauggccugggccgugcccaaggacaacuacaagaacgccaccaacagccugaccguggaggugcccuacaucugcaaggagggcgaggaccagaucaccguguggggcuuccacagcgacaacaagccccagaugaagaaccuguacggcgacagcaacccccagaaguucaccagcagcgccaacggcgugaccacccacuacgugagccaggugggcgacuuccccgaccagaccgaggacggcggccugccccagagcggcagaaucgugguggacuacaugaugcagaagcccggcagaaccggcaccaucguguaccagagaggcgugcugcugccccagaagguguggugcgccagcggcagaagcaaggugaucaagggcagccugccccugaucggcgaggccgacugccugcacgagaaguacggcggccugaacaagagcaagcccuacuacaccggcgagcacgccaaggccaucggcaacugccccaucugggugaagaccccccugaagcuggccaacggcaccaaguacagaccccccgccaagcugcugaaggagagaggcuucuucggcgccaucgccggcuuccuggagggcggcugggagggcaugaucgccggcuggcacggcuacaccagccacggcgcccacggcguggccguggccgccgaccugaagagcacccaggaggccaucaacaagaucaccaagaaccugaacagccugagcgagcuggaggugaagaaccugcagagacugagcggcgccauggacgagcugcacaacgagauccuggagcuggacgagaagguggacgaccugagagccgacaccaucagcagccagaucgagcuggccgugcugcugagcaacgagggcaucaucaacagcgaggacgagcaccugcuggcccuggagagaaagcugaagaagaugcugggccccagcgccguggacaucggcaacggcugcuucgagaccaagcacaagugcaaccagaccugccuggacagaaucgccgccggcaccuucaacgccggcgaguucagccugcccaccuucgacagccugaacaucaccgccgccagccugaacgacgacggccuggacaaccacaccauccugcuguacuacagcaccgccgccagcagccuggccgugacccugaugcuggccaucuucaucguguacauggugagcagagacaacgugagcugcagcaucugccuguga

SEQ ID NO: 187855 - RNA, 1755 nt, Artificial Sequence
  derived and/or modified CDS sequence (opt4) from hemagglutinin__InfluenzaB__AGX24887
augaaggccaucaucgugcugcugaugguggugaccagcaacgccgacagaaucugcaccggcaucaccagcagcaacagcccccacguggugaagaccgccacccagggcgaggugaacgugaccggcgccaucccccugaccaccacccccaccaagagcuacuucgccaaccugaagggcaccagaaccagaggcaagcugugccccgacugccugaacugcaccgaccuggacguggcccugggcagacccaugugcgugggcaccacccccagcgccaaggccagcauccugcacgaggugagacccgugaccagcggcugcuuccccaucaugcacgacagaaccaagaucagacagcugcccaaccugcugagaggcuacgagaacaucagacugagcacccagaacgugaucgacgccgagaaggcccccggcggccccuacagacugggcaccagcggcagcugccccaacgccaccagcaagaucggcuucuucgccaccauggccugggccgugcccaaggacaacuacaagaacgccaccaacccccagaccguggaggugcccuacaucugcaccgagggcgaggaccagaucaccguguggggcuuccacagcgacaacaagacccagaugaagaaccuguacggcgacagcaacccccagaaguucaccagcagcgccaacggcgugaccacccacuacgugagccagaucggcgacuuccccgaccagaccgaggacggcggccugccccagagcggcagaaucgugguggacuacauggugcagaagcccggcaagaccggcaccaucguguaccagagaggcgugcugcugccccagaagguguggugcgccagcggcagaagcaaggugaucaagggcagccugccccugaucggcgaggccgacugccugcacgagaaguacggcggccugaacaagagcaagcccuacuacaccggcgagcacgccaaggccaucggcaacugccccaucugggugaagaccccccugaagcuggccaacggcaccaaguacagaccccccgccaagcugcugaaggagagaggcuucuucggcgccaucgccggcuuccuggagggcggcugggagggcaugaucgccggcuggcacggcuacaccagccacggcgcccacggcguggccguggccgccgaccugaagagcacccaggaggccaucaacaagaucaccaagaaccugaacagccugagcgagcuggaggugaagaaccugcagagacugagcggcgccauggacgagcugcacaacgagauccuggagcuggacgagaagguggacgaccugagagccgacaccaugagcagccagaucgagcuggccgugcugcugagcaacgagggcaucaucaacagcgaggacgagcaccugcuggcccuggagagaaagcugaagaagaugcugggccccagcgccguggacaucggcaacggcugcuucgagaccaagcacaagugcaaccagaccugccuggacagaaucgccgccggcaccuucaacgccggcgaguucagccugcccaccuucgacagccugaacaucaccgccgccagccugaacgacgacggccuggacaaccacaccauccugcuguacuacagcaccgccgccagcagccuggccgugacccugaugcuggccaucuucaucguguacauggugagcagagacaacgugagcugcagcaucugccuguga

SEQ ID NO: 187856 - RNA, 1755 nt, Artificial Sequence
  derived and/or modified CDS sequence (opt4) from hemagglutinin__InfluenzaB__AGX24898
augaaggccaucaucgugcugcugaugguggugaccagcaacgccgacagaaucugcaccggcaucaccagcagcaacagcccccacguggugaagaccgccacccagggcgaggugaacgugaccggcgugaucccccugaccaccacccccaccaagagcuacuucgccaaccugaagggcaccagaaccagaggcaagcugugccccgacugccugaacugcaccgaccuggacguggcccugggcagacccaugugcgugggcaccacccccagcgccaaggccagcauccugcacgaggugagacccgugaccagcggcugcuuccccaucaugcacgacagaaccaagaucagacagcugcccaaccugcugagaggcuacgagaagaucagacugagcacccagaacgugaucgacgccgagaaggcccccggcggccccuacagacugggcaccagcggcagcugccccaacgccaccagcaagaucggcuucuucgccaccauggccugggccgugcccaaggacaacuacaagaacgccaccaacccccugaccguggaggugcccuacaucugcaccggcggcgaggaccagaucaccguguggggcuuccacagcgacaacaagacccagaugaagagccuguacggcgacagcaacccccagaaguucaccagcagcgccaacggcgugaccacccacuacgugagccagaucggcgacuuccccgaccagaccgaggacggcggccugccccagagcggcagaaucgugguggacuacaugaugcagaagcccggcaagaccggcaccaucguguaccagagaggcgugcugcugccccagaagguguggugcgccagcggcagaagcaaggugaucaagggcagccugccccugaucggcgaggccgacugccugcacgagaaguacggcggccugaacaagagcaagcccuacuacaccggcgagcacgccaaggccaucggcaacugccccaucugggugaagaccccccugaagcuggccaacggcaccaaguacagaccccccgccaagcugcugaaggagagaggcuucuucggcgccaucgccggcuuccuggagggcggcugggagggcaugaucgccggcuggcacggcuacaccagccacggcgcccacggcguggccguggccgccgaccugaagagcacccaggaggccaucaacaagaucaccaagaaccugaacagccugagcgagcuggaggugaagaaccugcagagacugagcggcgccauggacgagcugcacaacgagauccuggagcuggacgagaagguggacgaccugagagccgacaccaucagcagccagaucgagcuggccgugcugcugagcaacgagggcaucaucaacagcgaggacgagcaccugcuggcccuggagagaaagcugaagaagaugcugggccccagcgccguggacaucggcaacggcugcuucgagaccaagcacaagugcaaccagaccugccuggacagaaucgccgccggcaccuucaacgccggcgaguucagccugcccaccuucgacagccugaacaucaccgccgccagccugaacgacgacggccuggacaaccacaccauccugcuguacuacagcaccgccgccagcagccuggccgugacccugaugcuggccaucuucaucguguacauggugagcagagacaacgugagcugcagcaucugccuguga

SEQ ID NO: 187857 - RNA, 1758 nt, Artificial Sequence; identical to SEQ ID NO: 186743
  derived and/or modified CDS sequence (opt4) from hemagglutinin__InfluenzaB__AGX84854

SEQ ID NO: 187858 - RNA, 1758 nt, Artificial Sequence
  derived and/or modified CDS sequence (opt4) from hemagglutinin__InfluenzaB__AGX84865
augaaggccaucaucgugcugcugaugguggugaccagcaacgccgacagaaucugcaccggcaucaccagcagcaacagcccccacaucgugaagaccgccacccagggcgaggugaacgugaccggcgugaucccccugaccaccacccccaccaagagccacuucgccaaccugaagggcaccgagaccagaggcaagcugugccccaagugccccaacugcaccgaccuggacguggcccugggcagacccaagugcaccggcaagauccccagcgccagagugagcauccugcacgaggugagacccgugaccagcggcugcuuccccaucaugcacgacagaaccaagaucagacagcugcccaaccugcugagaggcuacgagcacaucagacugagcacccacaacgugaucaacgccgagaacgcccccggcggccccuacaagaucggcaccagcggcagcugccccaacgugaccaacggcaacggcuucuucgccaccauggccugggccgugcccaagaacgacaagaacaagaccgccaccaacccccugaccaucgaggugcccuacaucugcaccgagggcgaggaccagaucaccguguggggcuuccacagcgacaacgagacccagauggccaagcuguacggcgacagcaagccccagaaguucaccagcagcgccaacggcgugaccacccacuacgugagccagaucggcggcuuccccaaccagaccgaggacggcggccugccccagagcggcagaaucgugguggacuacauggugcagaagagcggcaagaccggcaccaucaccuaccagagaggcauccugcugccccagaagguguggugcgccagcggcagaagcaaggugaucaagggcagccugccccugaucggcgaggccgacugccugcacgagaaguacggcggccugaacaagagcaagcccuacuacaccggcgagcacgccaaggccaucggcaacugccccaucugggugaagaccccccugaagcuggccaacggcaccaaguacagaccccccgccaagcugcugaaggagagaggcuucuucggcgccaucgccggcuuccuggagggcggcugggagggcaugaucgccggcuggcacggcuacaccagccacggcgcccacggcguggccguggccgccgaccugaagagcacccaggaggccaucaacaagaucaccaagaaccugaacagccugagcgagcuggaggugaagaaccugcagagacugagcggcgccauggacgagcugcacaacgagauccuggagcuggacgagaagguggacgaccugagagccgacaccaucagcagccagaucgagcuggccgugcugcugagcaacgagggcaucaucaacagcgaggacgagcaccugcuggcccuggagagaaagcugaagaagaugcugggccccagcgccguggagaucggcaacggcugcuucgagaccaagcacaagugcaaccagaccugccuggacagaaucgccgccggcaccuucgacgccggcgaguucagccugcccaccuucgacagccugaacaucaccgccgccagccugaacgacgacggccuggacaaccacaccauccugcuguacuacagcaccgccgccagcagccuggccgugacccugaugaucgccaucuucgugguguacauggugagcagagacaacgugagcugcagcaucugccuguga

SEQ ID NO: 187859 - RNA, 1758 nt, Artificial Sequence; identical to SEQ ID NO: 187858
  derived and/or modified CDS sequence (opt4) from hemagglutinin__InfluenzaB__AGX84876

SEQ ID NO: 187860 - RNA, 1758 nt, Artificial Sequence; identical to SEQ ID NO: 187858
  derived and/or modified CDS sequence (opt4) from hemagglutinin__InfluenzaB__AGX84887

SEQ ID NO: 187861 - RNA, 1758 nt, Artificial Sequence; identical to SEQ ID NO: 186743
  derived and/or modified CDS sequence (opt4) from hemagglutinin__InfluenzaB__AGX84898

SEQ ID NO: 187862 - RNA, 1758 nt, Artificial Sequence
  derived and/or modified CDS sequence (opt4) from hemagglutinin__InfluenzaB__AGX84920
augaaggccaucaucgugcugcugaugguggugaccagcaacgccgacagaaucugcaccggcaucaccagcagcaacagcccccacguggugaagaccgccacccagggcgaggugaacgugaccggcgugaucccccugaccaccacccccaccaagagccacuucgccaaccugaagggcaccgagaccagaggcaagcugugccccaagugccccaacugcaccgaccuggacguggcccugggcagacccaagugcaccggcaagauccccagcgccggcgugagcauccugcacgaggugagacccgugaccagcggcugcuuccccaucaugcacgacagaaccaagaucagacagcugcccaaccugcugagaggcuacgagcacaucagacugagcacccacaacgugaucaacgccgagaacgcccccggcggccccuacaagaucggcaccagcggcagcugccccaacgugaccaacggcaacggcuucuucgccaccauggccugggccgugcccaagaacgacaagaacaagaccgccaccaacccccugaccaucgaggugcccuacaucugcaccgagggcgaggaccagaucaccguguggggcuuccacagcgacaacgagacccagauggccaagcuguacggcgacagcaagccccagaaguucaccagcagcgccaacggcgugaccacccacuacgugagccagaucggcggcuuccccaaccagaccgaggacggcggccugccccagagcggcagaaucgugguggacuacauggugcagaagagcggcaagaccggcaccaucaccuaccagagaggcauccugcugccccagaagguguggugcgccagcggcagaagcaaggugaucaagggcagccugccccugaucggcgaggccgacugccugcacgagaaguacggcggccugaacaagagcaagcccuacuacaccggcgagcacgccaaggccaucggcaacugccccaucugggugaagaccccccugaagcuggccaacggcaccaaguacagaccccccgccaagcugcugaaggagagaggcuucuucggcgccaucgccggcuuccuggagggcggcugggagggcaugaucgccggcuggcacggcuacaccagccacggcgcccacggcguggccguggccgccgaccugaagagcacccaggaggccaucaacaagaucaccaagaaccugaacagccugagcgagcuggaggugaagaaccugcagagacugagcggcgccauggacgagcugcacaacgagauccuggagcuggacgagaagguggacgaccugagagccgacaccaucagcagccagaucgagcuggccgugcugcugagcaacgagggcaucaucaacagcgaggacgagcaccugcuggcccuggagagaaagcugaagaagaugcugggccccagcgccguggagaucggcaacggcugcuucgagaccaagcacaagugcaaccagaccugccuggacagaaucgccgccggcaccuucgacgccggcgaguucagccugcccaccuucgacagccugaacaucaccgccgccagccugaacgacgacggccuggacaaccacaccauccugcuguacuacagcaccgccgccagcagccuggccgugacccugaugaucgccaucuucgugguguacauggugagcagagacaacgugagcugcagcaucugccuguga

SEQ ID NO: 187863 - RNA, 1758 nt, Artificial Sequence
  derived and/or modified CDS sequence (opt4) from hemagglutinin__InfluenzaB__AGZ59821
augaaggccaucaucgugcugcugaugguggugaccagcaacgccgacagaaucugcaccggcaucaccagcagcaacagcccccacguggugaagaccgccacccagggcgaggugaacgugaccggcgugaucccccugaccaccacccccaccaagagccacuucgccaaccugaagggcaccaagaccagaggcaagcugugccccaagugcuucaacugcaccgaccuggacguggcccugggcagacccaagugcaccggcaacauccccagcgccaaggugagcauccugcacgaggugagacccgugaccagcggcugcuuccccaucaugcacgacagaaccaaggugagacagcugcccaaccugcugagaggcuacgagcacaucagacugagcacccacaacgugaucaacgccgagaaggcccccggcggccccuacaagaucggcaccagcggcagcugccccaacgugaccaacggcaacggcuucuucgccaccauggccugggccgugcccaagaacgacaacaacaagaccgccaccaacagccugaccaucgaggugcccuacaucugcaccgagggcgaggaccagaucaccguguggggcuuccacagcgacaacgagacccagauggccaagcuguacggcgacagcaagccccagaaguucaccagcagcgccaacggcgugaccacccacuacgugagccagaucggcggcuuccccaaccagaccgaggacggcggccugccccagagcggcagaaucgugguggacuacauggugcagaagagcggcaagaccggcaccaucaccuaccagagaggcauccugcugccccagaagguguggugcgccagcggcagaagcaaggugaucaagggcagccugccccugaucggcgaggccgacugccugcacgagaaguacggcggccugaacaagagcaagcccuacuacaccggcgagcacgccaaggccaucggcaacugccccaucugggugaagaccccccugaagcuggccaacggcaccaaguacagaccccccgccaagcugcugaaggagagaggcuucuucggcgccaucgccggcuuccuggagggcggcugggagggcaugaucgccggcuggcacggcuacaccagccacggcgcccacggcguggccguggccgccgaccugaagagcacccaggaggccaucaacaagaucaccaagaaccugaacagccugagcgagcuggaggugaagaaccugcagagacugagcggcgccauggacgagcugcacaacgagauccuggagcuggacgagaagguggacgaccugagagccgacaccaucagcagccagaucgagcuggccgugcugcugagcaacgagggcaucaucaacagcgaggacgagcaccugcuggcccuggagagaaagcugaagaagaugcugggccccagcgccguggagaucggcaacggcugcuucgagaccaagcacaagugcaaccagaccugccuggacagaaucgccgccggcaccuucgacgccggcgaguucagccugcccaccuucgacagccugaacaucaccgccgccagccugaacgacgacggccuggacaaccacaccauccugcuguacuacagcaccgccgccagcagccuggccgugacccugaugaucgccaucuucgugguguacauggugagcagagacaacgugagcugcagcaucugccuguga

SEQ ID NO: 187864 - RNA, 1758 nt, Artificial Sequence
  derived and/or modified CDS sequence (opt4) from hemagglutinin__InfluenzaB__AGZ59832
augaaggccaucaucgugcugcugaugguggugaccagcaacgccgacagaaucugcaccggcaucaccagcagcaacagcccccacguggugaagaccgccacccagggcgaggugaacgugaccggcgugaucccccugaccaccacccccaccaagagccacuucgccaaccugaagggcaccaagaccagaggcaagcugugccccaagugccugaacugcaccgaccuggacguggcccugggcagacccaagugcaccggcaacauccccagcgccaaggugagcauccugcacgaggugagacccgugaccagcggcugcuuccccaucaugcacgacagaaccaagaucagacagcugcccaaccugcugagaggcuacgagcacaucagacugagcacccacaacgugaucaacgccgagaaggcccccggcggccccuacaagaucggcaccagcggcagcugccccaacgugaccaacggcaacggcuucuucgccaccauggccugggccgugcccaagaacgacaacaacaagaccgccaccaacagccugaccaucgaggugcccuacaucugcaccgagggcgaggaccagaucaccguguggggcuuccacagcgacaacgagacccagauggccaagcuguacggcgacagcaagccccagaaguucaccagcagcgccaacggcgugaccacccacuacgugagccagaucggcggcuuccccaaccagaccgaggacggcggccugccccagagcggcagaaucgugguggacuacauggugcagaagagcggcaagaccggcaccaucaccuaccagagaggcauccugcugccccagaagguguggugcgccagcggcaagagcaaggugaucaagggcagccugccccugaucggcgaggccgacugccugcacgagaaguacggcggccugaacaagagcaagcccuacuacaccggcgagcacgccaaggccaucggcaacugccccaucugggugaagaccccccugaagcuggccaacggcaccaaguacagaccccccgccaagcugcugaaggagagaggcuucuucggcgccaucgccggcuuccuggagggcggcugggagggcaugaucgccggcuggcacggcuacaccagccacggcgcccacggcguggccguggccgccgaccugaagagcacccaggaggccaucaacaagaucaccaagaaccugaacagccugagcgagcuggaggugaagaaccugcagagacugagcggcgccauggacgagcugcacaacgagauccuggagcuggacgagaagguggacgaccugagagccgacaccaucagcagccagaucgagcuggccgugcugcugagcaacgagggcaucaucaacagcgaggacgagcaccugcuggcccuggagagaaagcugaagaagaugcugggccccagcgccguggagaucggcaacggcugcuucgagaccaagcacaagugcaaccagaccugccuggacagaaucgccgccggcaccuucgacgccggcgaguucagccugcccaccuucgacagccugaacaucaccgccgccagccugaacgaggacggccuggacaaccacaccauccugcuguacuacagcaccgccgccagcagccuggccgugacccugaugaucgccaucuucgugguguacauggugagcagagacaacgugagcugcagcaucugccuguga

SEQ ID NO: 187865 - RNA, 1758 nt, Artificial Sequence
  derived and/or modified CDS sequence (opt4) from hemagglutinin__InfluenzaB__AGZ59843
augaaggccaucaucgugcugcugaugguggugaccagcaacgccgacagaaucugcaccggcaucaccagcagcaacagcccccacguggugaagaccgccacccagggcgaggugaacgugaccggcgugaucccccugaccaccacccccaccaagagccacuucgccaaccugaagggcaccgagaccagaggcaagcugugccccaagugccugaacugcaccgaccuggacguggcccugggcagacccaagugcaccggcaacauccccagcgccagagugagcauccugcacgaggugagacccgugaccagcggcugcuuccccaucaugcacgacagaaccaagaucagacagcugcccaaccugcugagaggcuacgagcacaucagacugagcacccacaacgugaucaacgccgagaacgcccccggcggccccuacaagaucggcaccagcggcagcugccccaacgugaccaacggcaacggcuucuucgccaccauggccugggccgugcccaagaacgacaacaacaagaccgccaccaacagccugaccaucgaggugcccuacaucugcaccgagggcgaggaccagaucaccguguggggcuuccacagcgacaacgagacccagauggccaagcuguacggcgacagcaagccccagaaguucaccagcagcgccaacggcgugaccacccacuacgugagccagaucggcggcuuccccaaccagaccgaggacggcggccugccccagagcggcagaaucgugguggacuacauggugcagaagagcggcaagaccggcaccaucaccuaccagagaggcauccugcugccccagaagguguggugcgccagcggcagaagcaaggugaucaagggcagccugccccugaucggcgaggccgacugccugcacgagaaguacggcggccugaacaagagcaagcccuacuacaccggcgagcacgccaaggccaucggcaacugccccaucugggugaagaccccccugaagcuggccaacggcaccaaguacagaccccccgccaagcugcugaaggagagaggcuucuucggcgccaucgccggcuuccuggagggcggcugggagggcaugaucgccggcuggcacggcuacaccagccacggcgcccacggcguggccguggccgccgaccugaagagcacccaggaggccaucaacaagaucaccaagaaccugaacagccugagcgagcuggaggugaagaaccugcagagacugagcggcgccauggacgagcugcacaacgagauccuggagcuggacgagaagguggacgaccugagagccgacaccaucagcagccagaucgagcuggccgugcugcugagcaacgagggcaucaucaacagcgaggacgagcaccugcuggcccuggagagaaagcugaagaagaugcugggccccagcgccguggagaucggcaacggcugcuucgagaccaagcacaagugcaaccagaccugccuggacagaaucgccgccggcaccuucgacgccggcgaguucagccugcccaccuucgacagccugaacaucaccgccgccagccugaacgacgacggccuggacaaccacaccauccugcuguacuacagcaccgccgccagcagccuggccgugacccugaugaucgccaucuucaucguguacauggugagcagagacaacgugagcugcagcaucugccuguga

SEQ ID NO: 187866 - RNA, 1758 nt, Artificial Sequence; identical to SEQ ID NO: 187212
  derived and/or modified CDS sequence (opt4) from hemagglutinin__InfluenzaB__AGZ59854

SEQ ID NO: 187867 - RNA, 1758 nt, Artificial Sequence; identical to SEQ ID NO: 186574
  derived and/or modified CDS sequence (opt4) from hemagglutinin__InfluenzaB__AGZ59865

SEQ ID NO: 187868 - RNA, 1758 nt, Artificial Sequence
  derived and/or modified CDS sequence (opt4) from hemagglutinin__InfluenzaB__AGZ59876
augaaggccaucaucgugcugcugaugguggugaccagcaacgccgacagaaucugcaccggcaucaccagcagcaacagcccccacguggugaagaccgccacccagggcgaggugaacgugaccggcgugaucccccugaccaccacccccaccaagagccacuucgccaaccugaagggcaccgagaccagaggcaagcugugccccaagugccugaacugcaccgaccuggacguggcccugggcagacccaagugcaccggcaacauccccagcgccagagugagcauccugcacgaggugagacccgugaccagcggcugcuuccccaucaugcacgacagaaccaagaucagacagcugcccaaccugcugagaggcuacgagcacaucagacugagcacccacaacgugaucaacgccgagaacgcccccggcggccccuacaagaucggcaccagcggcagcugccccaacgugaccaacggcaacggcuucuucgccaccauggccugggccgugcccaagaacgacaagaacaagaccgccaccaacagccugaccaucgaggugcccuacaucugcaccgagggcgaggaccagaucaccguguggggcuuccacagcgacaacgagacccagauggccaagcuguacggcgacagcaagccccagaaguucaccagcagcgccaacggcgugaccacccacuacgugagccagaucggcggcuuccccaaccagaccgaggacggcggccugccccagagcggcagaaucgugguggacuacauggugcagaagagcggcaagaccggcaccaucaccuaccagagaggcauccugcugccccagaagguguggugcaccagcggcagaagcaaggugaucaagggcagccugccccugaucggcgaggccgacugccugcacgagaaguacggcggccugaacaagagcaagcccuacuacaccggcgagcacgccaaggccaucggcaacugccccaucugggugaagaccccccugaagcuggccaacggcaccaaguacagaccccccgccaagcugcugaaggagagaggcuucuucggcgccaucgccggcuuccuggagggcggcugggagggcaugaucgccggcuggcacggcuacaccagccacggcgcccacggcguggccguggccgccgaccugaagagcacccaggaggccaucaacaagaucaccaagaaccugaacagccugagcgagcuggaggugaagaaccugcagagacugagcggcgccauggacgagcugcacaacgagauccuggagcuggacgagaagguggacgaccugagagccgacaccaucagcagccagaucgagcuggccgugcugcugagcaacgagggcaucaucaacagcgaggacgagcaccugcuggcccuggagagaaagcugaagaagaugcugggccccagcgccguggagaucggcaacggcugcuucgagaccaagcacaagugcaaccagaccugccuggacagaaucgccgccggcaccuucgacgccggcgaguucagccugcccaccuucgacagccugaacaucaccgccgccagccugaacgacgacggccuggacaaccacaccauccugcuguacuacagcaccgccgccagcagccuggccgugacccugaugaucgccaucuucgugguguacauggugagcagagacaacgugagcugcagcaucugccuguga

SEQ ID NO: 187869 - RNA, 1755 nt, Artificial Sequence; identical to SEQ ID NO: 186627
  derived and/or modified CDS sequence (opt4) from hemagglutinin__InfluenzaB__AGZ59887

SEQ ID NO: 187870 - RNA, 1758 nt, Artificial Sequence; identical to SEQ ID NO: 187049
  derived and/or modified CDS sequence (opt4) from hemagglutinin__InfluenzaB__AGZ59898

SEQ ID NO: 187871 - RNA, 1758 nt, Artificial Sequence; identical to SEQ ID NO: 187415
  derived and/or modified CDS sequence (opt4) from hemagglutinin__InfluenzaB__AGZ59909

SEQ ID NO: 187872 - RNA, 1758 nt, Artificial Sequence; identical to SEQ ID NO: 187049
  derived and/or modified CDS sequence (opt4) from hemagglutinin__InfluenzaB__AGZ59920

SEQ ID NO: 187873 - RNA, 1758 nt, Artificial Sequence; identical to SEQ ID NO: 187049
  derived and/or modified CDS sequence (opt4) from hemagglutinin__InfluenzaB__AGZ59931

SEQ ID NO: 187874 - RNA, 1758 nt, Artificial Sequence; identical to SEQ ID NO: 187049
  derived and/or modified CDS sequence (opt4) from hemagglutinin__InfluenzaB__AGZ59942

SEQ ID NO: 187875 - RNA, 1758 nt, Artificial Sequence; identical to SEQ ID NO: 187049
  derived and/or modified CDS sequence (opt4) from hemagglutinin__InfluenzaB__AGZ59953

SEQ ID NO: 187876 - RNA, 1758 nt, Artificial Sequence
  derived and/or modified CDS sequence (opt4) from hemagglutinin__InfluenzaB__AGZ59965
augaaggccaucaucgugcugcugaugguggugaccagcaacgccgacagaaucugcaccggcaucaccagcagcaacagcccccacguggugaagaccgccacccagggcgaggugaacgugaccggcgugaucccccugaccaccacccccaccaagagccacuucgccaaccugaagggcaccgagaccagaggcaagcugugccccaagugccugaacugcaccgaccuggacguggcccugggcagacccaagugcaccggcaagauccccagcgccagagugagcauccugcacgaggugagacccgugaccagcggcugcuuccccaucaugcacgacagaaccaagaucagacagcugcccaaccugcugagaggcuacgagcacaucagacugagcacccacaacgugaucaacgccgagaacgcccccggcggccccuacaagaucggcaccagcggcagcugccccaacaucaccaacggcaacggcuucuucgccaccauggccugggccgugcccaagaacgacaagaacaagaccgccaccaacccccugaccaucgaggugcccuacaucugcaccgagggcgaggaccagaucaccguguggggcuuccacagcgacaacgagacccagauggccaagcuguacggcgacagcaagccccagaaguucaccagcagcgccaacggcgugaccacccacuacgugagccagaucggcggcuuccccaaccagaccgaggacggcggccugccccagagcggcagaguggugguggacuacaugaugcagaagagcggcaagaccggcaccaucaccuaccagagaggcauccugcugccccagaagguguggugcgccagcggcagaagcaaggugaucaagggcagccugccccugaucggcgaggccgacugccugcacgagaaguacggcggccugaacaagagcaagcccuacuacaccggcgagcacgccaaggccaucggcaacugccccaucugggugaagaccccccugaagcuggccaacggcaccaaguacagaccccccgccaagcugcugaaggagagaggcuucuucggcgccaucgccggcuuccuggagggcggcugggagggcaugaucgccggcuggcacggcuacaccagccacggcgcccacggcguggccguggccgccgaccugaagagcacccaggaggccaucaacaagaucaccaagaaccugaacagccugagcgagcuggaggugaagaaccugcagagacugagcggcgccauggacgagcugcacaacgagauccuggagcuggacgagaagguggacgaccugagagccgacaccaucagcagccagaucgagcuggccgugcugcugagcaacgagggcaucaucaacagcgaggacgagcaccugcuggcccuggagagaaagcugaagaagaugcugggccccagcgccguggagaucggcaacggcugcuucgagaccaagcacaagugcaaccagaccugccuggacagaaucgccgccggcaccuucgacgccggcgaguucagccugcccaccuucgacagccugaacaucaccgccgccagccugaacgacgacggccuggacaaccacaccauccugcuguacuacagcaccgccgccagcagccuggccgugacccugaugaucgccaucuucgugguguacauggugagcagagacaacgugagcugcagcaucugccuguga

SEQ ID NO: 187877 - RNA, 1758 nt, Artificial Sequence; identical to SEQ ID NO: 187049
  derived and/or modified CDS sequence (opt4) from hemagglutinin__InfluenzaB__AGZ59976

SEQ ID NO: 187878 - RNA, 1758 nt, Artificial Sequence; identical to SEQ ID NO: 187049
  derived and/or modified CDS sequence (opt4) from hemagglutinin__InfluenzaB__AGZ59987

SEQ ID NO: 187879 - RNA, 1758 nt, Artificial Sequence; identical to SEQ ID NO: 187049
  derived and/or modified CDS sequence (opt4) from hemagglutinin__InfluenzaB__AGZ59999

SEQ ID NO: 187880 - RNA, 1758 nt, Artificial Sequence; identical to SEQ ID NO: 186668
  derived and/or modified CDS sequence (opt4) from hemagglutinin__InfluenzaB__AGZ60010

SEQ ID NO: 187881 - RNA, 1758 nt, Artificial Sequence; identical to SEQ ID NO: 186668
  derived and/or modified CDS sequence (opt4) from hemagglutinin__InfluenzaB__AGZ60021

SEQ ID NO: 187882 - RNA, 1758 nt, Artificial Sequence; identical to SEQ ID NO: 186668
  derived and/or modified CDS sequence (opt4) from hemagglutinin__InfluenzaB__AGZ60033

SEQ ID NO: 187883 - RNA, 1755 nt, Artificial Sequence
  derived and/or modified CDS sequence (opt4) from hemagglutinin__InfluenzaB__AGZ60044
augaaggccaucaucgugcugcugaugguggugaccagcaacgccgacagaaucugcaccggcaucaccagcagcaacagcccccacguggugaagaccgccacccagggcgaggugaacgugaccggcgugaucccccugaccaccacccccaccaagagcuacuucgccaaccugaagggcaccagaaccagaggcaagcugugccccgacugccugaacugcaccgaccuggacguggcccugggcagacccaugugcgugggcaccacccccagcgccaaggccagcauccugcacgaggugagacccgugaccagcggcugcuuccccaucaugcacgacagaaccaagaucagacagcugcccaaccugcugagaggcuacgagaacaucagacugagcacccagaacgugaucgacgccgagaacgcccccggcggccccuacagacugggcaccagcggcagcugccccaacgccaccagcaagagcggcuucuucgccaccauggccugggccgugcccaaggacaacaacaagaacgccaccaacccccugaccguggaggugcccuacgugugcaccgagggcgaggaccagaucaccguguggggcuuccacagcgacaacaagacccagaugaagaaccuguacggcgacagcaacccccagaaguucaccagcagcgccaacggcgugaccacccacuacgugagccagaucggcggcuuccccgcccagaccgaggacggcggccugccccagagcggcagaaucgugguggacuacauggugcagaagcccagaaagaccggcaccaucguguaccagagaggcgugcugcugccccagaagguguggugcgccagcggcagaagcaaggugaucaagggcagccugccccugaucggcgaggccgacugccugcacgagaaguacggcggccugaacaagagcaagcccuacuacaccggcgagcacgccaaggccaucggcaacugccccaucugggugaagaccccccugaagcuggccaacggcaccaaguacagaccccccgccaagcugcugaaggagagaggcuucuucggcgccaucgccggcuuccuggagggcggcugggagggcaugaucgccggcuggcacggcuacaccagccacggcgcccacggcguggccguggccgccgaccugaagagcacccaggaggccaucaacaagaucaccaagaaccugaacagccugagcgagcuggaggugaagaaccugcagagacugagcggcgccauggacgagcugcacaacgagauccuggagcuggacgagaagguggacgaccugagagccgacaccaucagcagccagaucgagcuggccgugcugcugagcaacgagggcaucaucaacagcgaggacgagcaccugcuggcccuggagagaaagcugaagaagaugcugggccccagcgccguggacaucggcaacggcugcuucgagaccaagcacaagugcaaccagaccugccuggacagaaucgccgccggcaccuucaacgccggcgaguucagccugcccaccuucgacagccugaacaucaccgccgccagccugaacgacgacggccuggacaaccacaccauccugcuguacuacagcaccgccgccagcagccuggccgugacccugaugcuggccaucuucaucguguacauggugagcagagacaacgugagcugcagcaucugccuguga

SEQ ID NO: 187884 - RNA, 1755 nt, Artificial Sequence; identical to SEQ ID NO: 187086
  derived and/or modified CDS sequence (opt4) from hemagglutinin__InfluenzaB__AGZ60055

SEQ ID NO: 187885 - RNA, 1755 nt, Artificial Sequence
  derived and/or modified CDS sequence (opt4) from hemagglutinin__InfluenzaB__AGZ60066
augaaggccaucaucgugcugcugaugguggugaccagcaacgccgacagaaucugcaccggcaucaccagcagcaacagcccccacguggugaagaccgccacccagggcgaggugaacgugaccggcgugaucccccugaccaccacccccaccaagagccacuucgccaaccugaagggcaccagaaccagaggcaagcugugccccgacugccugaacugcaccgaccuggacguggcccugggcagacccaugugcgugggcaccacccccagcgccaaggccagcauccugcacgaggugagacccgugaccagcggcugcuuccccaucaugcacgacagaaccaagaucagacagcugcccaaccugcugagaggcuacgagaacaucagacugagcacccagaacgugaucgacgccgagaaggcccugggcggccccuacagacugggcaccagcggcagcugccccaacgccaccagcaagagcggcuucuucgccaccauggccugggccgugcccaaggacaacaacaagaacgccaccaacccccugaccguggaggugcccuacaucugcaccgagggcgaggaccagaucaccguguggggcuuccacagcgacaacaagacccagaugaagaaccuguacggcgacagcaacccccagaaguucaccagcagcgccaacggcgugaccacccacuacgugagccagaucggcggcuuccccgaccagaccgaggacggcggccugccccagagcggcagaaucgugguggacuacauggugcagaagcccggcaagaccggcaccaucguguaccagagaggcgugcugcugccccagaagguguggugcgccagcggcagaagcaaggugaucaagggcagccugccccugaucggcgaggccgacugccugcacgagaaguacggcggccugaacaagagcaagcccuacuacaccggcgagcacgccaaggccaucggcaacugccccaucugggugaagaccccccugaagcuggccaacggcaccaaguacagaccccccgccaagcugcugaaggagagaggcuucuucggcgccaucgccggcuuccuggagggcggcugggagggcaugaucgccggcuggcacggcuacaccagccacggcgcccacggcguggccguggccgccgaccugaagagcacccaggaggccaucaacaagaucaccaagaaccugaacagccugagcgagcuggaggugaagaaccugcagagacugagcggcgccauggacgagcugcacaacgagauccuggagcuggacgagaagguggacgaccugagagccgacaccaucagcagccagaucgagcuggccgugcugcugagcaacgagggcaucaucaacagcgaggacgagcaccugcuggcccuggagagaaagcugaagaagaugcugggccccagcgccguggacaucggcaacggcugcuucgagaccaagcacaagugcaaccagaccugccuggacagaaucgccgccggcaccuucaacgccggcgaguucagccugcccaccuucgacagccugaacaucaccgccgccagccugaacgacgacggccuggacaaccacaccauccugcuguacuacagcaccgccgccagcagccuggccgugacccugaugcuggccaucuucaucguguacauggugagcagagacaacgugagcugcagcaucugccuguga

SEQ ID NO: 187886 - RNA, 1755 nt, Artificial Sequence
  derived and/or modified CDS sequence (opt4) from hemagglutinin__InfluenzaB__AGZ60077
augaaggccaucaucgugcugcugaugguggugaccagcaacgccgacagaaucugcaccggcaucaccagcagcaacagcccccacguggugaagaccgccacccagggcgaggugaacgugaccggcgugaucccccugaccaccacccccaccaagagcuacuucgccaaccugaagggcaccagaaccagaggcaagcugugccccgacugccugaacugcaccgaccuggacguggcccugggcagccccaugugcgugggcaccacccccagcgccaaggccagcauccugcacgaggugagacccgugaccagcggcugcuuccccaucaugcacgacagaaccaagaucagacagcuggccaaccugcugagaggcuacgagaacaucagacugagcacccagaacgugaucgacgccgagaaggcccccggcggccccuacagacugggcaccagcggcagcugccccaacgccaccagcaagagcggcuucuucgccaccauggccugggccgugcccaaggacaacaacaagaacgccaccaacccccugaccguggaggugcccuacaucugcaccgagggcgaggaccagaucaccguguggggcuuccacagcgacaacaagacccagaugaagaaccuguacggcgacagcaacccccagaaguucaccagcagcgccaacggcgugaccacccacuacgugagccagaucggcggcuuccccgaccagaccgaggacggcggccugccccagagcggcagaaucgugguggacuacaugaugcagaagagcggcaagaccggcaccaucguguaccagagaggcgugcugcugccccagaagguguggugcgccagcggcagaagcaaggugaucaagggcagccugccccugaucggcgaggccgacugccugcacgagaaguacggcggccugaacaagagcaagcccuacuacaccggcgagcacgccaaggccaucggcaacugccccaucugggugaagaccccccugaagcuggccaacggcaccaaguacagaccccccgccaagcugcugaaggagagaggcuucuucggcgccaucgccggcuuccuggagggcggcugggagggcaugaucgccggcuggcacggcuacaccagccacggcgcccacggcguggccguggccgccgaccugaagagcacccaggaggccaucaacaagaucaccaagaaccugaacagccugagcgagcuggaggugaagaaccugcagagacugagcggcgccauggacgagcugcacagcgagauccuggagcuggacgagaagguggacgaccugagagccgacaccaucagcagccagaucgagcuggccgugcugcugagcaacgagggcaucaucaacagcgaggacgagcaccugcuggcccuggagagaaagcugaagaagaugcugggccccagcgccguggacaucggcaacggcugcuucgagaccaagcacaagugcaaccagaccugccuggacagaaucgccgccggcaccuucaacgccggcgaguucagccugcccaccuucgacagccugaacaucaccgccgccagccugaacgacgacggccuggacaaccacaccauccugcuguacuacagcaccgccgccagcagccuggccgugacccugaugcuggccaucuucaucguguacauggugagcagagacaacgugagcugcagcaucugccuguga

SEQ ID NO: 187887 - RNA, 1755 nt, Artificial Sequence; identical to SEQ ID NO: 186791
  derived and/or modified CDS sequence (opt4) from hemagglutinin__InfluenzaB__AGZ60088

SEQ ID NO: 187888 - RNA, 1755 nt, Artificial Sequence; identical to SEQ ID NO: 186486
  derived and/or modified CDS sequence (opt4) from hemagglutinin__InfluenzaB__AGZ60099

SEQ ID NO: 187889 - RNA, 1755 nt, Artificial Sequence
  derived and/or modified CDS sequence (opt4) from hemagglutinin__InfluenzaB__AGZ60131
augaaggccaucaucgugcugcugaugguggugaccagcaacgccgacagaaucugcaccggcaucaccagcagcaacagcccccacguggugaagaccgccacccagggcgaggugaacgugaccggcgugaucccccugaccaccacccccaccaagagcuacuucgccaaccugaagggcaccagaaccagaggcaagcugugccccgacugccugaacugcaccgaccuggacguggcccugggcagacccaugugcgugggcaccacccccagcgccaaggccagcauccugcacgaggugagacccaucaccagcggcugcuuccccaucaugcacgacagaaccaagaucagacagcugcccaaccugcugagaggcuacgagaacaucagacugagcacccagaacgugaucgacgccgagaaggcccccggcggccccuacagacugggcaccagcggcagcugccccaacgccaccagcaagagcggcuucuucgccaccauggccugggccgugcccaaggacaacaacaagaacgccaccaacccccugaccguggaggugcccuacaucugcaccgagggcgaggaccagaucaccguguggggcuuccacagcgacaacaagacccagaugaagaaccuguacggcgacagcaacccccagaaguucaccagcagcgccaacggcgugaccacccacuacgugagccagaucggcagcuuccccgaccagaccgaggacggcggccugccccagagcggcagaaucgugguggacuacaugaugcagaagcccggcaagaccggcaccaucguguaccagagaggcgugcugcugccccagaagguguggugcgccagcggcagaagcaaggugaucaagggcagccugccccugaucggcgaggccgacugccugcacgagaaguacggcggccugaacaagagcaagcccuacuacaccggcgagcacgccaaggccaucggcaacugccccaucugggugaagaccccccugaagcuggccaacggcaccaaguacagaccccccgccaagcugcugaaggagagaggcuucuucggcgccaucgccggcuuccuggagggcggcugggagggcaugaucgccggcuggcacggcuacaccagccacggcgcccacggcguggccguggccgccgaccugaagagcacccaggaggccaucaacaagaucaccaagaaccugaacagccugagcgagcuggaggugaagaaccugcagagacugagcggcgccauggacgagcugcacaacgagauccuggagcuggacgagaagguggacgaccugagagccgacaccaucagcagccagaucgagcuggccgugcugcugagcaacgagggcaucaucaacagcgaggacgagcaccugcuggcccuggagagaaagcugaagaagaugcugggccccagcgccguggagaucggcaacggcugcuucgagaccaagcacaagugcaaccagaccugccuggacagaaucgccgccggcaccuucaacgccggcgaguucagccugcccaccuucgacagccugaacaucaccgccgccagccugaacgacgacggccuggacaaccacaccauccugcuguacuacagcaccgccgccagcagccuggccgugacccugaugcuggccaucuucaucguguacauggugagcagagacaacgugagcugcagcaucugccuguga

SEQ ID NO: 187890 - RNA, 1755 nt, Artificial Sequence; identical to SEQ ID NO: 186791
  derived and/or modified CDS sequence (opt4) from hemagglutinin__InfluenzaB__AGZ60142

SEQ ID NO: 187891 - RNA, 1755 nt, Artificial Sequence; identical to SEQ ID NO: 186791
  derived and/or modified CDS sequence (opt4) from hemagglutinin__InfluenzaB__AGZ60160

SEQ ID NO: 187892 - RNA, 1755 nt, Artificial Sequence; identical to SEQ ID NO: 186880
  derived and/or modified CDS sequence (opt4) from hemagglutinin__InfluenzaB__AGZ60172

SEQ ID NO: 187893 - RNA, 1755 nt, Artificial Sequence; identical to SEQ ID NO: 186880
  derived and/or modified CDS sequence (opt4) from hemagglutinin__InfluenzaB__AGZ60183

SEQ ID NO: 187894 - RNA, 1755 nt, Artificial Sequence
  derived and/or modified CDS sequence (opt4) from hemagglutinin__InfluenzaB__AGZ60194
augaaggccaucaucgugcugcugaugguggugaccagcaacgccgacagaaucugcaccggcaucaccagcagcaacagcccccacguggugaagaccgccacccagggcgaggugaacgugaccggcgugaucccccugaccaccacccccaccaagagcuacuucgccaaccugaagggcaccagaaccagaggcaagcugugccccgacugccugaacugcaccgaccuggacguggcccugggcagacccaugugcgugggcaccacccccagcgccaaggccagcauccugcacgaggugagacccgugaccagcggcugcuuccccaucaugcacgacagaaccaagaucagacagcugcccaaccugcugagaggcuacgagaacaucagacugagcacccagaacgugaucgacgccgagaaggcccccggcggccccuacagacugggcaccagcggcagcugccccaacgccaccagcaagaucggcuucuucgccaccauggccugggccgugcccaaggacaacuacaagaacgccaccaacccccugaccguggaggugcccuacaucugcaccgagggcgaggaccagaucaccguguggggcuuccacagcgacaacaagacccagaugaagaaccuguacggcgacagcaacccccagaaguucaccagcagcgccaacggcgugaccacccacuacgugagccagaucggcgacuuccccgaccagaccgaggacggcggccugccccagagcggcagaaucgugguggacuacaugaugcagaagaccggcaagaccggcaccaucguguaccagagaggcgugcugcugccccagaagguguggugcgccagcggcagaagcaaggugaucaagggcagccugccccugaucggcgaggccgacugccugcacgagaaguacggcggccugaacaagagcaagcccuacuacaccggcgagcacgccaaggccaucggcaacugccccaucugggugaagaccccccugaagcuggccaacggcaccaaguacagaccccccgccaagcugcugaaggagagaggcuucuucggcgccaucgccggcuuccuggagggcggcugggagggcaugaucgccggcuggcacggcuacaccagccacggcgcccacggcguggccguggccgccgaccugaagagcacccaggaggccaucaacaagaucaccaagaaccugaacagccugagcgagcuggaggugaagaaccugcagagacugagcggcgccauggacgagcugcacaacgagauccuggagcuggacgagaagguggacgaccugagagccgacaccaucagcagccagaucgagcuggccgugcugcugagcaacgagggcaucaucaacagcgaggacgagcaccugcuggcccuggagagaaagcugaagaagaugcugggccccagcgccguggacaucggcaacggcugcuucgagaccaagcacaagugcaaccagaccugccuggacagaaucgccgccggcaccuucaacgccggcgaguucagccugcccaccuucgacagccugaacaucaccgccgccagccugaacgacgacggccuggacaaccacaccauccugcuguacuacagcaccgccgccagcagccuggccgugacccugaugcuggccaucuucaucguguacauggugagcagagacaacgugagcugcagcaucugccuguga

SEQ ID NO: 187895 - RNA, 1755 nt, Artificial Sequence
  derived and/or modified CDS sequence (opt4) from hemagglutinin__InfluenzaB__AGZ60206
augaaggccaucaucgugcugcugaugguggugaccagcaacgccgacagaaucugcaccggcaucaccagcagcaacagcccccacguggugaagaccgccacccagggcgaggugaacgugaccggcgugaucccccugaccaccacccccaucaagagcuacuucgccaaccugaagggcaccagaaccagaggcaagcugugccccgacugccugaacugcaccgaccuggacguggcccugggcagacccaugugcgugggcaccacccccagcgccaaggccagcauccugcacgaggugagacccgugaccagcggcugcuuccccaucaugcacgacagaaccaagaucagacagcugcccaaccugcugagaggcuacgagaacaucagacugagcacccagaacgugaucgacgccgagaaggcccccggcggccccuacagacugggcaccagcggcagcugccccaacgccaccagcaagaucggcuucuucgccaccauggccugggccgugcccaaggacaacuacaagaacgccaccaacccccugaccguggaggugcccuacaucugcaccgagggcgaggaccagaucaccguguggggcuuccacagcgacaacaagacccagaugaagaaccuguacggcgacagcaacccccagaaguucaccagcagcgccaacggcgugaccacccacuacgugagccagaucggcgacuuccccgaccagaccgaggacggcggccugccccagagcggcagaaucgugguggacuacaugaugcagaagcccggcaagaccggcaccaucguguaccagagaggcgugcugcugccccagaagguguggugcgccagcggcagaagcaaggugaucaagggcagccugccccugaucggcgaggccgacugccugcacgagaaguacggcggccugaacaagagcaagcccuacuacaccggcgagcacgccaaggccaucggcaacugccccaucugggugaagaccccccugaagcuggccaacggcaccaaguacagaccccccgccaagcugcugaaggagagaggcuucuucggcgccaucgccggcuuccuggagggcggcugggagggcaugaucgccggcuggcacggcuacaccagccacggcgcccacggcguggccguggccgccgaccugaagagcacccaggaggccaucaacaagaucaccaagaaccugaacagccugagcgagcuggaggugaagaaccugcagagacugagcggcgccauggacgagcugcacaacgagauccuggagcuggacgagaagguggacgaccugagagccgacaccaucagcagccagaucgagcuggccgugcugcugagcaacgagggcaucaucaacagcgaggacgagcaccugcuggcccuggagagaaagcugaagaagaugcugggccccagcgccguggacaucggcaacggcugcuucgagaccaagcacaagugcaaccagaccugccuggacagaaucgccgccggcaccuucaacgccggcgaguucagccugcccaccuucgacagccugaacaucaccgccgccagccugaacgacgacggccuggacaaccacaccauccugcuguacuacagcaccgccgccagcagccuggccgugacccugaugcuggccaucuucaucguguacauggugagcagagacaacgugagcugcagcaucugccuguga

SEQ ID NO: 187896 - RNA, 1755 nt, Artificial Sequence; identical to SEQ ID NO: 187825
  derived and/or modified CDS sequence (opt4) from hemagglutinin__InfluenzaB__AGZ60217

SEQ ID NO: 187897 - RNA, 1755 nt, Artificial Sequence
  derived and/or modified CDS sequence (opt4) from hemagglutinin__InfluenzaB__AGZ60268
augaaggccaucaucgugcugcugaugguggugaccagcaacgccgacagaaucugcaccggcaucaccagcagcaacagcccccacguggugaagaccgccacccagggcgaggugaacgugaccggcgugaucccccugaccaccacccccaccaagagcuacuucgccaaccugaagggcaccagaaccagaggcaagcugugccccgacugccugaacugcaccgaccuggacguggcccugggcagacccaugugcgugggcaccacccccagcgccaaggccagcauccugcacgaggugagacccgugaccagcggcugcuuccccaucaugcacgacagaaccaagaucagacagcuggccaaccugcugagaggcuacgagaacaucagacugagcacccagaacgugaucgacgccgagaaggcccccggcggccccuacagacugggcaccagcggcagcugccccaacgccaccagcaagagcggcuucuucgccaccauggccugggccgugcccaaggacaacaacaagaacgccaccaacccccugaccguggaggugcccuacaucugcaccgagggcgaggaccagaucaccguguggggcuuccacagcgacaacaagacccagaugaagaaccuguacggcgacagcaacccccagaaguucaccagcagcgccaacggcgugaccacccacuacgugagccagaucggcggcuuccccgaccagaccgaggacggcggccugccccagagcggcagaaucgugguggacuacaugaugcagaagcccggcaagaccggcaccaucguguaccagagaggcgugcugcugccccagaagguguggugcgccagcggcagaagcaaggugaucaagggcagccugccccugaucggcgaggccgacugccugcacgagaaguacggcggccugaacaagagcaagcccuacuacaccggcgagcacgccaaggccaucggcaacugccccaucugggugaagaccccccugaagcuggccaacggcaccaaguacagaccccccgccaagcugcugaaggagagaggcuucuucggcgccaucgccggcuuccuggagggcggcugggagggcaugaucgccggcuggcacggcuacaccagccacggcgcccacggcguggccguggccgccgaccugaagagcacccaggaggccaucaacaagaucaccaagaaccugaacagccugagcgagcuggaggugaagaaccugcagagacugagcggcgccauggacgagcugcacaacgagauccuggagcuggacgagaagguggacgaccugagagccgacaccaucagcagccagaucgagcuggccgugcugcugagcaacgagggcaucaucaacagcgaggacgagcaccugcuggcccuggagagaaagcugaagaagaugcugggccccagcgccaucgacaucggcaacggcugcuucgagaccaagcacaagugcaaccagaccugccuggacagaaucgccgccggcaccuucaacgccggcgaguucagccugcccaccuucgacagccugaacaucaccgccgccagccugaacgacgacggccuggacaaccacaccauccugcuguacuacagcaccgccgccagcagccuggccgugacccugaugcuggccaucuucaucguguacauggugagcagagacaacgugagcugcagcaucugccuguga

SEQ ID NO: 187898 - RNA, 1755 nt, Artificial Sequence; identical to SEQ ID NO: 186914
  derived and/or modified CDS sequence (opt4) from hemagglutinin__InfluenzaB__AHE37993

SEQ ID NO: 187899 - RNA, 1755 nt, Artificial Sequence; identical to SEQ ID NO: 186959
  derived and/or modified CDS sequence (opt4) from hemagglutinin__InfluenzaB__AHE37994

SEQ ID NO: 187900 - RNA, 1755 nt, Artificial Sequence; identical to SEQ ID NO: 186914
  derived and/or modified CDS sequence (opt4) from hemagglutinin__InfluenzaB__AHE37995

SEQ ID NO: 187901 - RNA, 1755 nt, Artificial Sequence; identical to SEQ ID NO: 186914
  derived and/or modified CDS sequence (opt4) from hemagglutinin__InfluenzaB__AHE37996

SEQ ID NO: 187902 - RNA, 1755 nt, Artificial Sequence; identical to SEQ ID NO: 186959
  derived and/or modified CDS sequence (opt4) from hemagglutinin__InfluenzaB__AHE37997

SEQ ID NO: 187903 - RNA, 1755 nt, Artificial Sequence; identical to SEQ ID NO: 186959
  derived and/or modified CDS sequence (opt4) from hemagglutinin__InfluenzaB__AHE37998

SEQ ID NO: 187904 - RNA, 1755 nt, Artificial Sequence; identical to SEQ ID NO: 186959
  derived and/or modified CDS sequence (opt4) from hemagglutinin__InfluenzaB__AHE37999

SEQ ID NO: 187905 - RNA, 1755 nt, Artificial Sequence; identical to SEQ ID NO: 186914
  derived and/or modified CDS sequence (opt4) from hemagglutinin__InfluenzaB__AHE38000

SEQ ID NO: 187906 - RNA, 1755 nt, Artificial Sequence; identical to SEQ ID NO: 186914
  derived and/or modified CDS sequence (opt4) from hemagglutinin__InfluenzaB__AHE38001

SEQ ID NO: 187907 - RNA, 1755 nt, Artificial Sequence
  derived and/or modified CDS sequence (opt4) from hemagglutinin__InfluenzaB__AHE38002
augaaggccaucaucgugcugcugaugguggugaccagcaacgccgacagaaucugcaccggcaucaccagcagcaacagcccccacguggugaagaccgccacccagggcgaggugaacgugaccggcgugaucccccugaccaccacccccaccaagagcuacuucgccaaccugaagggcaccaagaccagaggcaagcugugccccgacugccugaacugcaccgaccuggacguggcccugggcagacccaugugcgugggcaccacccccagcgccaaggccagcauccugcacgaggugagacccgugaccagcggcugcuuccccaucaugcacgacagaaccaagaucagacagcuggccaaccugcugagaggcuacgagaacaucagacugagcacccagaacgugaucgacgccaagaaggcccccggcggccccuacagacugggcaccagcggcagcugccccaacgccaccagcaagagcggcuucuucgccaccauggccugggccgugcccaaggacaacaacaagaacgccaccaacccccugaccguggaggugcccuacaucugcgccgagggcgaggaccagaucaccguguggggcuuccacagcgacaacaagacccagaugaagaaccuguacggcgacagcaacccccagaaguucaccagcagcgccaacggcgugaccacccacuacgugagccagaucggcggcuuccccgaccagaccgaggacggcggccugccccagagcggcagaaucgugguggacuacaugaugcagaagcccggcaagaccggcaccaucguguaccagagaggcgugcugcugccccagaagguguggugcgccagcggcagaagcaaggugaucaagggcagccugccccugaucggcgaggccgacugccugcacgagaaguacggcggccugaacaagagcaagcccuacuacaccggcgagcacgccaaggccaucggcaacugccccaucugggugaagaccccccugaagcuggccaacggcaccaaguacagaccccccgccaagcugcugaaggagagaggcuucuucggcgccaucgccggcuuccuggagggcggcugggagggcaugaucgccggcuggcacggcuacaccagccacggcgcccacggcguggccguggccgccgaccugaagagcacccaggaggccaucaacaagaucaccaagaaccugaacagccugagcgagcuggaggugaagaaccugcagagacugagcggcgccauggacgagcugcacaacgagauccuggagcuggacgagaagguggacgaccugagagccgacaccaucagcagccagaucgagcuggccgugcugcugagcaacgagggcaucaucaacagcgaggacgagcaccugcuggcccuggagagaaagcugaagaagaugcugggccccagcgccguggacaucggcaacggcugcuucgagaccaagcacaagugcaaccagaccugccuggacagaaucgccgccggcaccuucaacgccggcgaguucagccugcccaccuucgacagccugaacaucaccgccgccagccugaacgacgacggccuggacaaccacaccauccugcuguacuacagcaccgccgccagcagccuggccgugacccugaugcuggccaucuucaucguguacauggugagcagagacaacgugagcugcagcaucugccuguga

SEQ ID NO: 187908 - RNA, 1755 nt, Artificial Sequence; identical to SEQ ID NO: 186914
  derived and/or modified CDS sequence (opt4) from hemagglutinin__InfluenzaB__AHE38003

SEQ ID NO: 187909 - RNA, 1755 nt, Artificial Sequence; identical to SEQ ID NO: 186914
  derived and/or modified CDS sequence (opt4) from hemagglutinin__InfluenzaB__AHE38004

SEQ ID NO: 187910 - RNA, 1755 nt, Artificial Sequence; identical to SEQ ID NO: 186914
  derived and/or modified CDS sequence (opt4) from hemagglutinin__InfluenzaB__AHE38005

SEQ ID NO: 187911 - RNA, 1755 nt, Artificial Sequence
  derived and/or modified CDS sequence (opt4) from hemagglutinin__InfluenzaB__AHE38006
augaaggccaucaucgugcugcugaugguggugaccagcaacgccgacagaaucugcaccggcaucaccagcagcaacagcccccacguggugaagaccgccacccagggcgaggugaacgugaccggcgugaucccccugaccaccacccccaccaagagcuacuucgccaaccugaagggcaccaagaccagaggcaagcugugccccgacugccugaacugcaccgaccuggacguggcccugggcagacccaugugcgugggcgccacccccagcgccaaggccagcauccugcacgaggugagacccgugaccagcggcugcuuccccaucaugcacgacagaaccaagaucagacagcuggccaaccugcugagaggcuacgagaacaucagacugagcacccagaacgugaucgacgccgagaaggcccccggcggccccuacagacugggcaccagcggcagcugccccaacgccaccagcaagagcggcuucuucgccaccauggccugggccgugcccaaggacaacaacaagaacgccaccaacccccugaccguggaggugcccuacaucugcgccgagggcgaggaccagaucaccguguggggcuuccacagcgacaacaagacccagaugaagaaccuguacggcgacagcaacccccagaaguucaccagcagcgccaacggcgugaccacccacuacgugagccagaucggcggcuuccccgaccagaccgaggacggcggccugccccagagcggcagaaucgugguggacuacaugaugcagaagcccggcaagaccggcaccaucguguaccagagaggcgugcugcugccccagaagguguggugcgccagcggcagaagcaaggugaucaagggcagccugccccugaucggcgaggccgacugccugcacgagaaguacggcggccugaacaagagcaagcccuacuacaccggcgagcacgccaaggccaucggcaacugccccaucugggugaagaccccccugaagcuggccaacggcaccaaguacagaccccccgccaagcugcugaaggagagaggcuucuucggcgccaucgccggcuuccuggagggcggcugggagggcaugaucgccggcuggcacggcuacaccagccacggcgcccacggcguggccguggccgccgaccugaagagcacccaggaggccaucaacaagaucaccaagaaccugaacagccugagcgagcuggaggugaagaaccugcagagacugagcggcgccguggacgagcugcacaacgagauccuggagcuggacgagaagguggacgaccugagagccgacaccaucagcagccagaucgagcuggccgugcugcugagcaacgagggcaucaucaacagcgaggacgagcaccugcuggcccuggagagaaagcugaagaagaugcugggccccagcgccguggacaucggcaacggcugcuucgagaccaagcacaagugcaaccagaccugccuggacagaaucgccgccggcaccuucaacgccggcgaguucagccugcccaccuucgacagccugaacaucaccgccgccagccugaacgacgacggccuggacaaccacaccauccugcuguacuacagcaccgccgccagcagccuggccgugacccugaugcuggccaucuucaucguguacauggugagcagagacaacgugagcugcagcaucugccuguga

SEQ ID NO: 187912 - RNA, 1755 nt, Artificial Sequence; identical to SEQ ID NO: 186914
  derived and/or modified CDS sequence (opt4) from hemagglutinin__InfluenzaB__AHE38007

SEQ ID NO: 187913 - RNA, 1755 nt, Artificial Sequence
  derived and/or modified CDS sequence (opt4) from hemagglutinin__InfluenzaB__AHE38008
augaaggccaucaucgcccugcugaugguggugaccagcaacgccgacagaaucugcaccggcaucaccagcagcaacagcccccacguggugaagaccgccacccagggcgaggugaacgugaccggcgugaucccccugaccaccacccccaccaagagcuacuucgccaaccugaagggcaccaagaccagaggcaagcugugccccgacugccugaacugcaccgaccuggacguggcccugggcagacccaugugcgugggcaccacccccagcgccaaggccagcauccugcacgaggugagacccgugaccagcggcugcuuccccaucaugcacgacagaaccaagaucagacagcuggccaaccugcugagaggcuacgagaacaucagacugagcacccagaacgugaucgacgccgagaaggcccccggcggccccuacagacugggcaccagcggcagcugccccaacgccaccagcaagagcggcuucuucgccaccauggccugggccgugcccaaggacaacaacaagaacgccaccaacccccugaccguggaggugcccuacaucugcgccgagggcgaggaccagaucgccguguggggcuuccacagcgacaacaagacccagaugaagaaccuguacggcgacagcaacccccagaaguucaccagcagcgccaacggcgugaccacccacuacgugagccagaucggcggcuuccccgaccagaccgaggacggcggccugccccagagcggcagaaucgugguggacuacaugaugcagaagcccggcaagaccggcaccaucguguaccagagaggcgugcugcugccccagaagguguggugcgccagcggcagaagcaaggugaucaagggcagccugccccugaucggcgaggccgacugccugcacgagaaguacggcggccugaacaagagcaagcccuacuacaccggcgagcacgccaaggccaucggcaacugccccaucugggugaagaccccccugaagcuggccaacggcaccaaguacagaccccccgccaagcugcugaaggagagaggcuucuucggcgccaucgccggcuuccuggagggcggcugggagggcaugaucgccggcuggcacggcuacaccagccacggcgcccacggcguggccguggccgccgaccugaagagcacccaggaggccaucaacaagaucaccaagaaccugaacagccugagcgagcuggaggugaagaaccugcagagacugagcggcgccauggacgagcugcacaacgagauccuggagcuggacgagaagguggacgaccugagagccgacaccaucagcagccagaucgagcuggccgugcugcugagcaacgagggcaucaucaacagcgaggacgagcaccugcuggcccuggagagaaagcugaagaagaugcugggccccagcgccguggacaucggcaacggcugcuucgagaccaagcacaagugcaaccagaccugccuggacagaaucgccgccggcaccuucaacgccggcgaguucagccugcccaccuucgacagccugaacaucaccgccgccagccugaacgacgacggccuggacaaccacaccauccugcuguacuacagcaccgccgccagcagccuggccgugacccugaugcuggccaucuucaucguguacauggugagcagagacaacgugagcugcagcaucugccuguga

SEQ ID NO: 187914 - RNA, 1755 nt, Artificial Sequence; identical to SEQ ID NO: 186959
  derived and/or modified CDS sequence (opt4) from hemagglutinin__InfluenzaB__AHE38009

SEQ ID NO: 187915 - RNA, 1755 nt, Artificial Sequence; identical to SEQ ID NO: 186959
  derived and/or modified CDS sequence (opt4) from hemagglutinin__InfluenzaB__AHE38010

SEQ ID NO: 187916 - RNA, 1755 nt, Artificial Sequence; identical to SEQ ID NO: 186914
  derived and/or modified CDS sequence (opt4) from hemagglutinin__InfluenzaB__AHE38012

SEQ ID NO: 187917 - RNA, 1755 nt, Artificial Sequence
  derived and/or modified CDS sequence (opt4) from hemagglutinin__InfluenzaB__AHE38013
augaaggccaucaucgugcugcugaugguggugaccagcaacgccgacagaaucugcaccggcaucaccagcagcaacagcccccacguggugaagaccgccacccagggcgaggugaacgugaccggcgugaucccccugaccaccacccccaccaagagcuacuucgccaaccugaagggcaccaagaccagaggcaagcugugccccgacugccugaacugcaccgaccuggacguggcccugggcagacccaugugcgugggcaccacccccagcgccaaggccagcauccugcacgaggugagacccgugaccagcggcugcuuccccaucaugcacgacagaaccaagaucagacagcuggccaaccugcugagaggcuacgagaacaucagacugagcacccagaacgugaucgacgccgagaaggcccccggcggccccuacagacugggcaccagcggcagcugccccaacgccaccagcaagagcggcuucuucgccaccauggccugggccgugcccaaggacaacaacaagaacgccaccaacccccugaccguggaggugcccuacaucugcgccgagggcgaggaccagaucaccguguggggcuuccacagcgacaacaagacccagaugaagaaccuguacggcgacagcaacccccagaaguucaccagcagcgccaacggcgugaccacccacuacgugagccagaucggcggcuuccccgaccagaccgaggacggcggccugccccagagcggcagaaucgugguggacuacaugaugcagaagcccggcaagaccggcaccaucguguaccagagaggcgugcugcugccccagaagguguggugcgugagcggcagaagcaaggugaucaagggcagccugccccugaucggcgaggccgacugccugcacgagaaguacggcggccugaacaagagcaagcccuacuacaccggcgagcacgccaaggccaucggcaacugccccaucugggugaagaccccccugaagcuggccaacggcaccaaguacagaccccccgccaagcugcugaaggagagaggcuucuucggcgccaucgccggcuuccuggagggcggcugggagggcaugaucgccggcuggcacggcuacaccagccacggcgcccacggcauggccguggccgccgaccugaagagcacccaggaggccaucaacaagaucaccaagaaccugaacagccugagcgagcuggaggugaagaaccugcagagacugagcggcgccauggacgagcugcacaacgagauccuggagcuggacgagaagguggacgaccugagagccgacaccaucagcagccagaucgagcuggccgugcugcugagcaacgagggcaucaucaacagcgaggacgagcaccugcuggcccuggagagaaagcugaagaagaugcugggccccagcgccguggacaucggcaacggcugcuucgagaccaagcacaagugcaaccagaccugccuggacagaaucgccgccggcaccuucaacgccggcgaguucagccugcccaccuucgacagccugaacaucaccgccgccagccugaacgacgacggccuggacaaccacaccauccugcuguacuacagcaccgccgccagcagccuggccgugacccugaugcuggccaucuucaucguguacauggugagcagagacaacgugagcugcagcaucugccuguga

SEQ ID NO: 187918 - RNA, 1755 nt, Artificial Sequence; identical to SEQ ID NO: 186914
  derived and/or modified CDS sequence (opt4) from hemagglutinin__InfluenzaB__AHE38014

SEQ ID NO: 187919 - RNA, 1758 nt, Artificial Sequence; identical to SEQ ID NO: 186705
  derived and/or modified CDS sequence (opt4) from hemagglutinin__InfluenzaB__AHE38015

SEQ ID NO: 187920 - RNA, 1758 nt, Artificial Sequence
  derived and/or modified CDS sequence (opt4) from hemagglutinin__InfluenzaB__AHE38016
augaaggccaucaucgugcugcugaugguggugaccagcaacgccgacagaaucugcaccggcaucaccagcagcaacagcccccacguggugaagaccgccacccagggcgaggugaacgugaccggcgugaucccccugaccaccacccccaccaagagccacuucgccaaccugaagggcaccgagaccagaggcaagcugugccccaagugccugaacugcaccgaccuggacguggcccugggcagacccaagugcaccggcaagauccccagcgccagagugagcauccugcacgaggugagacccgugaccagcggcugcuuccccaucaugcacgacagaaccaagaucagacagcugcccaaccugcugagaggcuacgagcacaucagacugagcacccacaacgugaucaacgccgagaacgcccccggcggccccuacaagaucggcaccagcggcagcugccccaacgugaccaacggcaacggcuucuucgccaccauggccugggccgugcccaagaacgacaagaacaagaccgccaccaacccccugaccaucgaggugcccuacaucugcaccgagggcgaggaccagaucaccguguggggcuuccacagcgacaacgagacccagauggccaagcuguacggcgacagcaagccccagaaguucaccagcagcgccaacggcgugaccacccacuacgugagccagaucggcggcuuccccaaccagaccgaggacggcggccugccccagagcggcagaaucgugguggacuacauggugcagaagagcggcaagaccggcaccaucaccuaccagagaggcauccugcugccccagaagguguggugcgccagcggcaagagcaaggugaucaagggcagccugccccugaucggcgaggccgacugccugcacgagaaguacggcggccugaacaagagcaagcccuacuacaccggcgagcacgccaaggccaucggcaacugccccaucugggugaagaccccccugaagcuggccaacggcaccaaguacagaccccccgccaagcugcugaaggagagaggcuucuucggcgccaucgccggcuuccuggagggcggcugggagggcaugaucgccggcuggcacggcuacaccagccacggcgcccacggcguggccguggccgccgaccugaagagcacccaggaggccaucaacaagaucaccaagaaccugaacagccugagcgagcuggaggugaagaaccugcagagacugagcggcgccauggacgagcugcacaacgagauccuggagcuggacgagaagguggacgaccugagagccgacaccaucagcagccagaucgagcuggccgugcugcugagcaacgagggcaucaucaacagcgaggacgagcaccugcuggcccuggagagaaagcugaagaagaugcugggccccagcgccguggagaucggcaacggcugcuucgagaccaagcacaagugcaaccagaccugccuggacagaaucgccgccggcaccuucgacgccggcgaguucagccugcccaccuucgacagccugaacaucaccgccgccagccugaacgacgacggccuggacaaccacaucauccugcuguacuacagcaccgccgccagcagccuggccgugacccugaugaucgccaucuucgugguguacauggugagcagagacaacgugagcugcagcaucugccuguga

SEQ ID NO: 187921 - RNA, 1758 nt, Artificial Sequence; identical to SEQ ID NO: 187024
  derived and/or modified CDS sequence (opt4) from hemagglutinin__InfluenzaB__AHE38017

SEQ ID NO: 187922 - RNA, 1758 nt, Artificial Sequence; identical to SEQ ID NO: 186947
  derived and/or modified CDS sequence (opt4) from hemagglutinin__InfluenzaB__AHE38018

SEQ ID NO: 187923 - RNA, 1758 nt, Artificial Sequence; identical to SEQ ID NO: 186932
  derived and/or modified CDS sequence (opt4) from hemagglutinin__InfluenzaB__AHE38019

SEQ ID NO: 187924 - RNA, 1758 nt, Artificial Sequence
  derived and/or modified CDS sequence (opt4) from hemagglutinin__InfluenzaB__AHE38020
augaaggccaucaucgugcugcugaugguggugaccagcaacgccgacagaaucugcaccggcaucaccagcagcaacagcccccacguggugaagaccgccacccagggcgaggugaacgugaccggcgugaucccccugaccaucacccccaccaagagccacuucgccaaccugaagggcaccgagaccagaggcaagcugugccccaagugccugaacugcaccgaccuggacguggcccugggcagacccaagugcaccggcaagauccccagcgccagagugagcauccugcacgaggugagacccgugaccagcggcugcuuccccaucaugcacgacagaaccaagaucagacagcugcccaaccugcugagaggcuacgagcacaucagacugagcacccacaacgugaucaacgccgaggacgcccccggcggccccuacaagaucggcaccagcggcagcugccccaacgugaccaacggcaacggcuucuucgccaccauggccugggccgugcccaagaacgacaagaacaagaccgccaccaacccccugaccaucgaggugcccuacaucugcaccgagggcgaggaccagaucaccguguggggcuuccacagcgacaacgagacccagauggccaagcuguacggcgacagcaagccccagaaguucaccagcagcgccaacggcgugaccacccacuacgugagccagaucggcggcuuccccaaccagaccgaggacggcggccugccccagagcggcagaaucgugguggacuacauggugcagaagagcggcaagaccggcaccaucaccuaccagagaggcauccugcugccccagaagguguggugcgccagcggcagaagcaaggugaucaagggcagccugccccugaucggcgaggccgacugccugcacgagaaguacggcggccugaacaagagcaagcccuacuacaccggcgagcacgccaaggccaucggcaacugccccaucugggugaagaccccccugaagcuggccaacggcaccaaguacagaccccccgccaagcugcugaaggagagaggcuucuucggcgccaucgccggcuuccuggagggcggcugggagggcaugaucgccggcuggcacggcuacaccagccacggcgcccacggcguggccguggccgccgaccugaagagcacccaggaggccaucaacaagaucaccaagaaccugaacagccugagcgagcuggaggugaagaaccugcagagacugagcggcgccauggacgagcugcacaacgagauccuggagcuggacgagaagguggacgaccugagagccgacaccaucagcagccagaucgagcuggccgugcugcugagcaacgagggcaucaucaacagcgaggacgagcaccugcuggcccuggagagaaagcugaagaagaugcugggccccagcgccguggagaucggcaacggcugcuucgagaccaagcacaagugcaaccagaccugccuggacagaaucgccgccggcaccuucgacgccggcgaguucagccugcccaccuucgacagccugaacaucaccgccgccagccugaacgacgacggccuggacaaccacaccauccugcuguacuacagcaccgccgccagcagccuggccgugacccugaugaucgccaucuucgugguguacauggugagcagagacaacgugagcugcagcaucugccuguga

SEQ ID NO: 187925 - RNA, 1758 nt, Artificial Sequence
  derived and/or modified CDS sequence (opt4) from hemagglutinin__InfluenzaB__AHE38021
augaaggccaucaucgugcugcugaugguggugaccagcaacgccgacagaaucugcaccggcaucaccagcagcaacagcccccacguggugaagaccgccacccagggcgaggugaacgugaccggcgugaucccccugaccaccacccccaccaagagccacuucgccaaccugaagggcaccgagaccagaggcaagcugugccccaagugccugaacugcaccgaccuggacguggcccugggcagacccaagugcaccggcaagauccccagcgccagagugagcauccugcacgaggugagacccgugaccagcggcugcuuccccaucaugcacgacagaaccaagaucagacagcugcccaaccugcugagaggcuacgagcacaucagacugagcacccacaacgugaucaacgccgagaacgcccccggcggccccuacaagaucggcaccagcggcagcugccccaacgugaccaacggcaacggcuucuucgccaccauggccugggccgugcccaagaacgacaagaacaagaccgccaccaacccccugaccaucgaggugcccuacaucugcaccgagggcgaggaccagaucaccguguggggcuuccacagcgacaacgagacccagauggccaagcuguacggcgacagcaacccccagaaguucaccagcagcgccaacggcgugaccacccacuacgugagccagaucggcggcuuccccaaccagaccgaggacggcggccugccccagagcggcagaaucgugguggacuacauggugcagaagagcggcaagaccggcaccaucaccuaccagagaggcauccugcugccccagaagguguggugcgccagcggcagaagcaaggugaucaagggcagccugccccugaucggcgaggccgacugccugcacgagaaguacggcggccugaacaagagcaagcccuacuacaccggcgagcacgccaaggccaucggcaacugccccaucugggugaagaccccccugaagcuggccaacggcaccaaguacagaccccccgccaagcugcugaaggagagaggcuucuucggcgccaucgccggcuuccuggagggcggcugggagggcaugaucgccggcuggcacggcuacaccagccacggcgcccacggcguggccguggccgccgaccugaagagcacccaggaggccaucaacaagaucaccaagaaccugaacagccugagcgagcuggaggugaagaaccugcagagacugagcggcgccauggacgagcugcacaacgagauccuggagcuggacgagaagguggacgaccugagagccgacaccaucagcagccagaucgagcuggccgugcugcugagcaacgagggcaucaucaacagcgaggacgagcaccugcuggcccuggagagaaagcugaagaagaugcugggccccagcgccguggagaucggcaacggcugcuucgagaccaagcacaagugcaaccagaccugccuggacagaaucgccgccggcaccuucgacgccggcgaguucagccugcccaccuucgacagccugaacaucaccgccgccagccugaacgacgacggccuggacaaccacaccauccugcuguacuacagcaccgccgccagcagccuggccgugacccugaugaucgccaucuucgugguguacauggugagcagagacaacgugagcugcagcaucugccuguga

SEQ ID NO: 187926 - RNA, 1758 nt, Artificial Sequence; identical to SEQ ID NO: 186947
  derived and/or modified CDS sequence (opt4) from hemagglutinin__InfluenzaB__AHE38022

SEQ ID NO: 187927 - RNA, 1752 nt, Artificial Sequence
  derived and/or modified CDS sequence (opt4) from hemagglutinin__InfluenzaB__AHL91189
augaaggccaucaucgugcugcugaugguggccaccagcaacgccgacagaaucugcaccggcaucaccagcagcaacagcccccacguggugaagaccgccacccagggcgaggugaacgugaccggcgugaucagccugaccaccacccccaccaagagccacuucgccaaccugaagggcaccaagaccagaggcaagcugugccccaacugccugaacugcaccgaccuggacguggcccugggcagacccaucugcaucggcaccauccccagcgccaaggccagcauccugcacgaggugagacccgugaccagcggcugcuuccccaucaugcacgacagaaccaagaucagacagcugcccaaccugcugagaggcuacgagcacaucagacugagcacccacaacgugaucaacgccgagagagcccccggcggccccuacagacugggcaccagcggcagcugccccaacgugaccagcagaagcggcuucuucgccaccauggccugggccgugcccagagacaacaagaccgccaccaacccccugaccguggaggugcccuacaucugcaccaagggcgaggaccagaucaccguguggggcuuccacagcgacaacaagacccagaugaagaaccuguacggcgacagcaacccccagaaguucaccagcagcgccaacggcgugaccacccacuacgugagccagaucggcggcuuccccaaccagaccgaggacggcggccugccccagagcggcagaaucgugguggacuacauggugcagaagcccggcaagaccggcaccaucguguaccagagaggcgugcugcugccccagaagguguggugcgccagcggcagaagcaaggugaucaagggcagccugccccugaucggcgaggccgacugccugcacgagaaguacggcggccugaacaagagcaagcccuacuacaccggcgagcacgccaaggccaucggcaacugccccaucugggugaagaccccccugaagcuggccaacggcaccaaguacagaccccccgccaagcugcugaaggagagaggcuucuucggcgccaucgccggcuuccuggagggcggcugggagggcaugaucgccggcuggcacggcuacaccagccacggcgcccacggcguggccguggccgccgaccugaagagcacccaggaggccaucaacaagaucaccaagaaccugaacagccugagcgagcuggaggugaagaaccugcagagacugagcggcgccauggacgagcugcacaacgagauccuggagcuggacgagaagguggacgaccugagagccgacaccaucagcagccagaucgagcuggccgugcugcugagcaacgagggcaucaucaacagcgaggacgagcaccugcuggcccuggagagaaagcugaagaagaugcugggccccagcgccguggacaucggcaacggcugcuucgagaccaagcacaagugcaaccagaccugccuggacagaaucgccgccggcaccuucaacgccggcgaguucagccugcccaccuucgacagccugaacaucaccgccgccagccugaacgacgacggccuggacaaccacaccauccugcuguacuacagcaccgccgccagcagccuggccgugacccugaugaucgccaucuucaucguguacauggugagcagagacaacgugagcugcagcaucugccuguga

SEQ ID NO: 187928 - RNA, 1752 nt, Artificial Sequence
  derived and/or modified CDS sequence (opt4) from hemagglutinin__InfluenzaB__AHL91200
augaaggccaucaucgugcugcugaugguggugaccagcaacgccgacagaaucugcaccggcaucaccagcagcaacagcccccacguggugaagaccgccacccagggcgaggugaacgugaccggcgugaucccccugaccaccacccccaccaagagccacuucgccaaccugaagggcaccaagaccagaggcaagcugugccccaacugccugaacugcaccgaccuggacguggcccugggcagacccaugugcaucggcaccauccccagcgccaaggccagcauccugcacgaggugagacccgugaccagcggcugcuuccccaucaugcacgacagaaccaagaucagacagcugcccaaccugcugagaggcuacgagcacaucagacugagcacccacaacgugaucaacgccgagagagcccccggcggccccuacagacugggcaccagcggcagcugccccaacgugaccagcagaagcggcuucuucgccaccauggccugggccgugcccagagacaacaagaccgccaccaacccccugaccguggaggugcccuacaucugcaccaagggcgaggaccagaucaccguguggggcuuccacagcgacaacaagacccagaugaagaaccuguacggcgacagcaacccccagaaguucaccagcagcgccaacggcgugaccacccacuacgugagccagaucggcgacuuccccaaccagaccgaggacggcggccugccccagagcggcagaaucgugguggacuacauggugcagaagcccggcaagaccggcaccaucguguaccagagaggcgugcugcugccccagaagguguggugcgccagcggcagaagcaaggugaucaagggcagccugccccugaucggcgaggccgacugccugcacgagaaguacggcggccugaacaagagcaagcccuacuacaccggcgagcacgccaaggccaucggcaacugccccaucugggugaagaccccccugaagcuggccaacggcaccaaguacagaccccccgccaagcugcugaaggagagaggcuucuucggcgccaucgccggcuuccuggagggcggcugggagggcaugaucgccggcuggcacggcuacaccagccacggcgcccacggcguggccguggccgccgaccugaagagcacccaggaggccaucaacaagaucaccaagaaccugaacagccugagcgagcuggaggugaagaaccugcagagacugagcggcgccauggacgagcugcacaacgagauccuggagcuggacgagaagguggacgaccugagagccgacaccaucagcagccagaucgagcuggccgugcugcugagcaacgagggcaucaucaacagcgaggacgagcaccugcuggcccuggagagaaagcugaagaagaugcugggccccagcgccguggacaucggcaacggcugcuucgagaccaagcacaagugcaaccagaccugccuggacagaaucgccgccggcaccuucaacgccggcgaguucagccugcccaccuucgacagccugaacaucaccgccgccagccugaacgacgacggccuggacaaccacaccauccugcuguacuacagcaccgccgccagcagccuggccgugacccugaugaucgccaucuucaucguguacauggugagcagagacaacgugagcugcagcaucugccuguga

SEQ ID NO: 187929 - RNA, 1752 nt, Artificial Sequence
  derived and/or modified CDS sequence (opt4) from hemagglutinin__InfluenzaB__AHL91211
augaaggccaucaucgugcugcugaugguggccaccagcaacgccgacagaaucugcaccggcaucaccagcagcaacagcccccacguggugaagaccgccacccagggcgaggugaacgugaccggcgugaucagccugaccaccacccccaccaagagccacuucgccaaccugaagggcaccaagaccagaggcaagcugugccccaacugccugaacugcaccgaccuggacguggcccugggcagacccaugugcaucggcaccauccccagcgccaaggccagcauccugcacgaggugagacccgugaccagcggcugcuuccccaucaugcacgacagaaccaagaucagacagcugcccaaccugcugagaggcuacgagcacaucagacugagcacccacaacgugaucaacgccgagagagcccccggcggccccuacagacugggcaccagcggcagcugccccaacgugaccagcagaagcggcuucuucgccaccauggccugggccgugcccagagacaacaagaccgccaccaacccccugaccguggaggugcccuacaucugcaccaagggcgaggaccagaucaccguguggggcuuccacagcgacaacaagacccagaugaagaaccuguacggcgacagcaacccccagaaguucaccagcagcgccaacggcgugaccacccacuacgugagccagaucggcggcuuccccaaccagaccgaggacggcggccugccccagagcggcagaaucgugguggacuacauggugcagaagcccggcaagaccggcaccaucguguaccagagaggcgugcugcugccccagaagguguggugcgccagcggcagaagcaaggugaucaagggcagccugccccugaucggcgaggccgacugccugcacgagaaguacggcggccugaacaagagcaagcccuacuacaccggcgagcacgccaaggccaucggcaacugccccaucugggugaagaccccccugaagcuggccaacggcaccaaguacagaccccccgccaagcugcugaaggagagaggcuucuucggcgccaucgccggcuuccuggagggcggcugggagggcaugaucgccggcuggcacggcuacaccagccacggcgcccacggcguggccguggccgccgaccugaagagcacccaggaggccaucaacaagaucaccaagaaccugaacagccugagcgagcuggaggugaagaaccugcagagacugagcggcgccauggacgagcugcacaacgagauccuggagcuggacgagaagguggacgaccugagagccgacaccaucagcagccagaucgagcuggccgugcugcugagcaacgagggcaucaucaacagcgaggacgagcaccugcuggcccuggagagaaagcugaagaagaugcugggccccagcgccguggacaucggcaacggcugcuucgagaccaagcacaagugcaaccagaccugccuggacagaaucgccgccggcaccuucaacgccggcgaguucagccugcccaccuucgacagccugaacaucaccgccgccagccugaacgacgacggccuggacaaccacaccauccugcuguacuacagcaccgccgccagcagccuggccgugacccugaugaucgccaucuucaucguguacauggugagcagagacaacgugagcugcagcaucugccuguga

SEQ ID NO: 187930 - RNA, 1755 nt, Artificial Sequence
  derived and/or modified CDS sequence (opt4) from hemagglutinin__InfluenzaB__AHL91222
augaaggccaucaucgugcugcugaugguggugaccagcaacgccgacagaaucugcaccggcaucaccagcagcaacagcccccacguggugaagaccgccacccagggcgaggugaacgugaccggcgugaucccccugaccaccacccccaccaagagccacuucgccaaccugaagggcaccaagaccagaggcaagcugugccccaacugccugaacugcaccgaccuggacguggcccugggcagacccaugugcgugggcaccacccccagcgccaaggccagcauccugcacgaggugagacccgugaccagcggcugcuuccccaucaugcacgacagaaccaagaucagacagcugcccaaccugcugagaggcuacgagaacaucagacugagcacccagaacgugaucaacgccgagaaggcccccggcggccccuacagacugggcaccagcggcagcugccccaacgccaccagcagaagcggcuucuucgccaccauggccugggccgugcccagagacaacaacaagaccgccaccaacccccugaccguggaggugcccuacgugugcaccgagggcgaggaccagaucaccguguggggcuuccacagcgacaacaagacccagaugaagaaccuguacggcgacagcaacccccagaaguucaccagcagcgccaacggcgugaccacccacuacgugagccagaucggcggcuuccccgaccagaccgaggacggcggccugccccagagcggcagaaucgugguggacuacauggugcagaagcccggcaagaccggcaccaucguguaccagagaggcgugcugcugccccagaagguguggugcgccagcggcagaagcaaggugaucaagggcagccugccccugaucggcgaggccgacugccugcacgagaaguacggcggccugaacaagagcaagcccuacuacaccggcgagcacgccaaggccaucggcaacugccccaucugggugaagaccccccugaagcuggccaacggcaccaaguacagaccccccgccaagcugcugaaggagagaggcuucuucggcgccaucgccggcuuccuggagggcggcugggagggcaugaucgccggcuggcacggcuacaccagccacggcgcccacggcguggccguggccgccgaccugaagagcacccaggaggccaucaacaagaucaccaagaaccugaacagccugagcgagcuggaggugaagaaccugcagagacugagcggcgccauggacgagcugcacaacgagauccuggagcuggacgagaagguggacgaccugagagccgacaccaucagcagccagaucgagcuggccgugcugcugagcaacgagggcaucaucaacagcgaggacgagcaccugcuggcccuggagagaaagcugaagaagaugcugggccccagcgccguggacaucggcaacggcugcuucgagaccaagcacaagugcaaccagaccugccuggacagaaucgccgccggcaccuucaacgccggcgaguucagccugcccaccuucgacagccugaacaucaccgccgccagccugaacgacgacggccuggacaaccacaccauccugcuguacuacagcaccgccgccagcagccuggccgugacccugaugaucgccaucuucaucguguacauggugagcagagacaacaucagcugcagcaucugccuguga

SEQ ID NO: 187931 - RNA, 1755 nt, Artificial Sequence
  derived and/or modified CDS sequence (opt4) from hemagglutinin__InfluenzaB__AHL91244
augaaggccaucaucgugcugcugaugguggugaccagcaacgccgacagaaucugcaccggcaucaccagcagcaacagcccccacguggugaagaccgccacccagggcgaggugaacgugaccggcgugaucccccugaccaccacccccaccaagagccacuucgccaaccugaagggcaccaagaccagaggcaagcugugccccaccugccugaacugcaccgaccuggacguggcccugggcagacccaugugcgugggcaccacccccagcgccaaggccagcauccugcacgaggugagacccgugaccagcggcugcuuccccaucaugcacgacagaaccaagaucagacagcugcccaaccugcugagaggcuacgagaagaucagacugagcacccagaacgugaucaacgccgagaaggcccccggcggccccuacagacugggcaccagcggcagcugccccaacgccaccagcagaagcggcuucuucgccaccauggccugggccgugcccagagacaacaacaagaccgccaccaacccccugaccguggaggugcccuacaucugcaccaaggaggaggaccagaucaccguguggggcuuccacagcgacaacaagacccagaugaagaaccuguacggcgacagcaacccccagaaguucaccagcagcgccaacggcgugaccacccacuacgugagccagaucggcggcuuccccgaccagaccgaggacggcggccugccccagagcggcagaaucgugguggacuacauggugcagaagcccggcaagaccggcaccaucguguaccagagaggcgugcugcugccccagaagguguggugcgccagcggcagaagcaaggugaucaagggcagccugccccugaucggcgaggccgacugccugcacgagaaguacggcggccugaacaagagcaagcccuacuacaccggcgagcacgccaaggccaucggcaacugccccaucugggugaagaccccccugaagcuggccaacggcaccaaguacagaccccccgccaagcugcugaaggagagaggcuucuucggcgccaucgccggcuuccuggagggcggcugggagggcaugaucgccggcuggcacggcuacaccagccacggcgcccacggcguggccguggccgccgaccugaagagcacccaggaggccaucaacaagaucaccaagaaccugaacagccugagcgagcuggaggugaagaaccugcagagacugagcggcgccauggacgagcugcacaacgagauccuggagcuggacgagaagguggacgaccugagagccgacaccaucagcagccagaucgagcuggccgugcugcugagcaacgagggcaucaucaacagcgaggacgagcaccugcuggcccuggagagaaagcugaagaagaugcugggccccagcgccguggacaucggcaacggcugcuucgagaccaagcacaagugcaaccagaccugccuggacagaaucgccgccggcaccuucaacgccggcgaguucagccugcccaccuucgacagccugaacaucaccgccgccagccugaacgacgacggccuggacaaccacaccauccugcuguacuacagcaccgccgccagcagccuggccgugacccugaugaucgccaucuucaucguguacauggugagcagagacaacgugagcugcagcaucugccuguga

SEQ ID NO: 187932 - RNA, 1755 nt, Artificial Sequence; identical to SEQ ID NO: 186561
  derived and/or modified CDS sequence (opt4) from hemagglutinin__InfluenzaB__AHL91255

SEQ ID NO: 187933 - RNA, 1755 nt, Artificial Sequence; identical to SEQ ID NO: 186561
  derived and/or modified CDS sequence (opt4) from hemagglutinin__InfluenzaB__AHL91266

SEQ ID NO: 187934 - RNA, 1752 nt, Artificial Sequence
  derived and/or modified CDS sequence (opt4) from hemagglutinin__InfluenzaB__AHL91277
augaaggccaucaucgugcugcugaugguggugaccagcaacgccgacagaaucugcaccggcaucaccagcagcaacagcccccacguggugaagaccgccacccagggcgaggugaacgugaccggcgugaucccccugaccaccacccccaccaagagccacuucgccaaccugaagggcaccaagaccagaggcaagcugugccccaacugccugaacugcaccgaccuggacguggcccugggcagacccaugugcaucggcaucacccccagcgccaaggccagcauccugcacgaggugagacccgugaccagcggcugcuuccccaucaugcacgacagaaccaagaucagacagcugcccaaccugcugagaggcuacgagcacaucagacugagcacccacaacgugaucaacgccgagagagcccccggcggccccuacagacugggcaccagcggcagcugccccaacgugaccagcagaagcggcuucuucgccaccauggccugggccgugcccagagacaacaagaccgccaccaacccccugaccguggaggugcccuacaucugcaccaagggcgaggaccagaucaccguguggggcuuccacagcgacaacaagacccagaugaagaaccuguacggcgacagcaacccccagaaguucaccagcagcgccaacggcaucaccacccacuacgugagccagaucggcggcuuccccaaccagaccgaggacggcggccugccccagagcggcagaaucgugguggacuacauggugcagaagcccggcaagaccggcaccaucguguaccagagaggcgugcugcugccccagaagguguggugcgccagcggcagaagcaaggugaucaagggcagccugccccugaucggcgaggccgacugccugcacgagaaguacggcggccugaacaagagcaagcccuacuacaccggcgagcacgccaaggccaucggcaacugccccaucugggugaagaccccccugaagcuggccaacggcaccaaguacagaccccccgccaagcugcugaaggagagaggcuucuucggcgccaucgccggcuuccuggagggcggcugggagggcaugaucgccggcuggcacggcuacaccagccacggcgcccacggcguggccguggccgccgaccugaagagcacccaggaggccaucaacaagaucaccaagaaccugaacagccugagcgagcuggaggugaagaaccugcagagacugagcggcgccauggacgagcugcacaacgagauccuggagcuggacgagaagguggacgaccugagagccgacaccaucagcagccagaucgagcuggccgugcugcugagcaacgagggcaucaucaacagcgaggacgagcaccugcuggcccuggagagaaagcugaagaagaugcugggccccagcgccguggacaucggcaacggcugcuucgagaccaagcacaagugcaaccagaccugccuggacagaaucgccgccggcaccuucaacgccggcgaguucagccugcccaccuucgacagccugaacaucaccgccgccagccugaacgacgacggccuggacaaccacaccauccugcuguacuacagcaccgccgccagcagccuggccgugacccugaugaucgccaucuucaucguguacauggugagcagagacaacgugagcugcagcaucugccuguga

SEQ ID NO: 187935 - RNA, 1755 nt, Artificial Sequence
  derived and/or modified CDS sequence (opt4) from hemagglutinin__InfluenzaB__AHL91299
augaaggccaucaucgugcugcugaugguggugaccagcaacgccgacagaaucugcaccggcaucaccagcagcaacagcccccacguggugaagaccgccacccagggcgaggugaacgugaccggcgugaucccccugaccaccacccccaccagaagccacuucgccaaccugaagggcaccaagaccagaggcaagcugugccccaccugccugaacugcaccgaccuggacguggcccugggcagacccaugugcgugggcaccacccccagcgccaaggccagcauccugcacgaggugagacccgugaccagcggcugcuuccccaucaugcacgacagaaccaagaucagacagcugcccaaccugcugagaggcuacgagaagaucagacugagcacccagaacgugaucaacgccgagaaggcccccggcggccccuacagacugggcaccagcggcagcugccccaacgccaccagcagaagcggcuucuucgccaccauggccugggccgugcccagagacaacaacaagaccgccaccaacccccugaccguggaggugcccuacaucugcaccaaggaggaggaccagaucaccguguggggcuuccacagcgacaacaagacccagaugaagaaccuguacggcgacagcaacccccagaaguucaccagcagcgccaacggcgugaccacccacuacgugagccagaucggcggcuuccccgaccagaccgaggacggcggccugccccagagcggcagaaucgugguggacuacauggugcagaagcccggcaagaccggcaccaucguguaccagagaggcauccugcugccccagaagguguggugcgccagcggcagaagcaaggugaucaagggcagccugccccugaucggcgaggccgacugccugcacgagaaguacggcggccugaacaagagcaagcccuacuacaccggcgagcacgccaaggccaucggcaacugccccaucugggugaagaccccccugaagcuggccaacggcaccaaguacagaccccccgccaagcugcugaaggagagaggcuucuucggcgccaucgccggcuuccuggagggcggcugggagggcaugaucgccggcuggcacggcuacaccagccacggcgcccacggcguggccguggccgccgaccugaagagcacccaggaggccaucaacaagaucaccaagaaccugaacagccugagcgagcuggaggugaagaaccugcagagacugagcggcgccauggacgagcugcacaacgagauccuggagcuggacgagaagguggacgaccugagagccgacaccaucagcagccagaucgagcuggccgugcugcugagcaacgagggcaucaucaacagcgaggacgagcaccugcuggcccuggagagaaagcugaagaagaugcugggccccagcgccguggacaucggcaacggcugcuucgagaccaagcacaagugcaaccagaccugccuggacagaaucgccgccggcaccuucaacgccggcgaguucagccugcccaccuucgacagccugaacaucaccgccgccagccugaacgacgacggccuggacaaccacaccauccugcuguacuacagcaccgccgccagcagccuggccgugacccugaugaucgccaucuucaucguguacaugaucagcagagacaacgugagcugcagcaucugccuguga

SEQ ID NO: 187936 - RNA, 1755 nt, Artificial Sequence
  derived and/or modified CDS sequence (opt4) from hemagglutinin__InfluenzaB__AHL91310
augaaggccaucaucgugcugcugaugguggugaccagcaacgccgacagaaucugcaccggcaucaccagcagcaacagcccccacguggugaagaccgccacccagggcgaggugaacgugaccggcgugaucccccugaccaccacccccaccaagagccacuucgccaaccugaagggcaccaagaccagaggcaagcugugccccaccugccugaacugcaccgaccuggacguggcccugggcagacccaugugcgugggcaccacccccagcgccaaggccagcauccugcacgaggugagacccgugaccagcggcugcuuccccaucaugcacgacagaaccaagaucagacagcugcccaaccugcugagaggcuacgagaagaucagacugagcacccagaacgugaucaacgccgagaaggcccccggcggccccuacagacugggcaccagcggcagcugccccaacgccaccagcagaagcggcuucuucgccaccauggccugggccgugcccagagacaacaacaagaccgccaccaacccccugaccguggaggugcccuacaucugcaccaaggaggaggaccagaucaccguguggggcuuccacagcgacaacaagacccagaugaagaaccuguacggcgacagcaacccccagaaguucaccagcagcgccaacggcgugaccacccacuacgugagccagaucggcggcuuccccgaccagaccgaggacggcggccugccccagagcggcagaaucgugguggacuacauggugcagaagcccggcaagaccggcaccaucguguaccagagaggcauccugcugccccagaagguguggugcgccagcggcagaagcaaggugaucaagggcagccugccccugaucggcgaggccgacugccugcacgagaaguacggcggccugaacaagagcaagcccuacuacaccggcgagcacgccaaggccaucggcaacugccccaucugggugaagaccccccugaagcuggccaacggcaccaaguacagaccccccgccaagcugcugaaggagagaggcuucuucggcgccaucgccggcuuccuggagggcggcugggagggcaugaucgccggcuggcacggcuacaccagccacggcgcccacggcguggccguggccgccgaccugaagagcacccaggaggccaucaacaagaucaccaagaaccugaacagccugagcgagcuggaggugaagaaccugcagagacugagcggcgccauggacgagcugcacaacgagauccuggagcuggacgagaagguggacgaccugagagccgacaccaucagcagccagaucgagcuggccgugcugcugagcaacgagggcaucaucaacagcgaggacgagcaccugcuggcccuggagagaaagcugaagaagaugcugggccccagcgccguggacaucggcaacggcugcuucgagaccaagcacaagugcaaccagaccugccuggacagaaucgccgccggcaccuucaacgccggcgaguucagccugcccaccuucgacagccugaacaucaccgccgccagccugaacgacgacggccuggacaaccacaccauccugcuguacuacagcaccgccgccagcagccuggccgugacccugaugaucgccaucuucaucguguacaugaucagcagagacaacgugagcugcagcaucugccuguga

SEQ ID NO: 187937 - RNA, 1755 nt, Artificial Sequence
  derived and/or modified CDS sequence (opt4) from hemagglutinin__InfluenzaB__AHL91321
augaaggccaucaucgugcugcugaugguggugaccagcaacgccgacagaaucugcaccggcaucaccagcagcaacagcccccacguggugaagaccgccacccagggcgaggugaacgugaccggcgugaucccccugaccaccacccccaccaagagccacuucgccaaccugaagggcaccaagaccagaggcaagcugugccccaccugccugaacugcaccgaccuggacguggcccugggcagacccaugugcgugggcaccacccccagcgccaaggccagcauccugcacgaggugagacccgugaccagcggcugcuuccccaucaugcacgacagaaccaagaucagacagcugcccaaccugcugagaggcuacgagaagaucagacugagcacccagaacgugaucaacgccgagaaggcccccggcggccccuacagacugggcaccagcggcagcugccccaacgccaccagcagaagcggcuucuucgccaccauggccugggccgugcccagagacaacaacaagaccgccaccaacccccugaccguggaggugcccuacaucugcaccaaggaggaggaccagaucaccguguggggcuuccacagcgacaacaagacccagaugaagaaccuguacggcgacagcaacccccagaaguucaccagcagcgccaacggcgugaccacccacuacgugagccagaucggcggcuuccccgaccagaccgaggacggcggccugccccagagcggcagaaucgugguggacuacauggugcagaagcccggcaagaccggcaccaucguguaccagagaggcgugcugcugccccagaagguguggugcgccagcggcagaagcaaggugaucaagggcagccugccccugaucggcgaggccgacugccugcacgagaaguacggcggccugaacaagagcaagcccuacuacaccggcgagcacgccaaggccaucggcaacugccccaucugggugaagaccccccugaagcuggccaacggcaccaaguacagaccccccgccaagcugcugaaggagaagggcuucuucggcgccaucgccggcuuccuggagggcggcugggagggcaugaucgccggcuggcacggcuacaccagccacggcgcccacggcguggccguggccgccgaccugaagagcacccaggaggccaucaacaagaucaccaagaaccugaacagccugagcgagcuggaggugaagaaccugcagagacugagcggcgccauggacgagcugcacaacgagauccuggagcuggacgagaagguggacgaccugagagccgacaccaucagcagccagaucgagcuggccgugcugcugagcaacgagggcaucaucaacagcgaggacgagcaccugcuggcccuggagagaaagcugaagaagaugcugggccccagcgccguggacaucggcaacggcugcuucgagaccaagcacaagugcaaccagaccugccuggacagaaucgccgccggcaccuucaacgccggcgaguucagccugcccaccuucgacagccugaacaucaccgccgccagccugaacgacgacggccuggacaaccacaccauccugcuguacuacagcaccgccgccagcagccuggccgugacccugaugaucgccaucuucaucguguacauggugagcagagacaacgugagcugcagcaucugccuguga

SEQ ID NO: 187938 - RNA, 1755 nt, Artificial Sequence; identical to SEQ ID NO: 187936
  derived and/or modified CDS sequence (opt4) from hemagglutinin__InfluenzaB__AHL91332

SEQ ID NO: 187939 - RNA, 1755 nt, Artificial Sequence; identical to SEQ ID NO: 187936
  derived and/or modified CDS sequence (opt4) from hemagglutinin__InfluenzaB__AHL91343

SEQ ID NO: 187940 - RNA, 1755 nt, Artificial Sequence; identical to SEQ ID NO: 187936
  derived and/or modified CDS sequence (opt4) from hemagglutinin__InfluenzaB__AHL91354

SEQ ID NO: 187941 - RNA, 1755 nt, Artificial Sequence; identical to SEQ ID NO: 186539
  derived and/or modified CDS sequence (opt4) from hemagglutinin__InfluenzaB__AHL91365

SEQ ID NO: 187942 - RNA, 1755 nt, Artificial Sequence
  derived and/or modified CDS sequence (opt4) from hemagglutinin__InfluenzaB__AHL91376
augaaggccaucaucgugcugcugaugguggugaccagcaacgccgacagaaucugcaccggcaucaccagcagcaacagcccccacguggugaagaccgccacccagggcgaggugaacgugaccggcgugaucccccugaccgccacccccaccaagagccacuucgccaaccugaagggcaccaagaccagaggcaagcugugccccaccugccugaacugcaccgaccuggacguggcccugggcagacccaugugcgugggcgugacccccagcgccaaggccagcauccugcacgaggugagacccgugaccagcggcugcuuccccaucaugcacgacagaaccaagaucagacagcugcccaaccugcugagaggcuacgagaagaucagacugagcacccagaacgugaucaacgccgagaaggcccccggcggccccuacagacugggcaccagcggcagcugccccaacgccaccagcagaagcggcuucuucgccaccauggccugggccgugcccagagacaacaacaagaccgccaccaacccccugaccguggaggugccccacaucugcaccaaggaggaggaccagaucaccguguggggcuuccacagcgacaacaagacccagaugaagaaccuguacggcgacagcaacccccagaaguucaccagcagcgccaacggcgugaccacccacuacgugagccagaucggcggcuuccccgaccagaccgaggacggcggccugccccagagcggcagaaucgugguggacuacauggugcagaagcccggcaagaccggcaccaucguguaccagagaggcauccugcugccccagaagguguggugcgccagcggcagaagcaaggugaucaagggcagccugccccugaucggcgaggccgacugccugcacgagaaguacggcggccugaacaagagcaagcccuacuacaccggcgagcacgccaaggccaucggcaacugccccaucugggugaagaccccccugaagcuggccaacggcaccaaguacagaccccccgccaagcugcugaaggagagaggcuucuucggcgccaucgccggcuuccuggagggcggcugggagggcaugaucgccggcuggcacggcuacaccagccacggcgcccacggcguggccguggccgccgaccugaagagcacccaggaggccaucaacaagaucaccaagaaccugaacagccugagcgagcuggaggugaagaaccugcagagacugagcggcgccauggacgagcugcacaacgagauccuggagcuggacgagaagguggacgaccugagagccgacaccaucagcagccagaucgagcuggccgugcugcugagcaacgagggcaucaucaacagcgaggacgagcaccugcuggcccuggagagaaagcugaagaagaugcugggccccagcgccguggacaucggcaacggcugcuucgagaccaagcacaagugcaaccagaccugccuggacagaaucgccgccggcaccuucaacgccggcgaguucagccugcccaccuucgacagccugaacaucaccgccgccagccugaacgacgacggccuggacaaccacaccauccugcuguacuacagcaccgccgccagcagccuggccgugacccugaugaucgccaucuucaucguguacaugaucagcagagacaacgugagcugcagcaucugccuguga

SEQ ID NO: 187943 - RNA, 1755 nt, Artificial Sequence
  derived and/or modified CDS sequence (opt4) from hemagglutinin__InfluenzaB__AHL91387
augaaggccaucaucgugcugcugaugguggugaccagcaacgccgacagaaucugcaccggcaucaccagcagcaacagcccccacguggugaagaccgccacccagggcgaggugaacgugaccggcgugaucccccugaccaccacccccgccaagagccacuucgccaaccugaagggcaccaagaccagaggcaagcugugccccaccugccugaacugcaccgaccuggacguggcccugggcagacccaugugcgugggcgugacccccagcgccaaggccagcauccugcacgaggugagacccgugaccagcggcugcuuccccaucaugcacgacagaaccaagaucagacagcugcccaaccugcugagaggcuacgagaagaucagacugagcacccagaacgugaucaacgccgagaaggcccccggcggccccuacagacugggcaccagcggcagcugccccaacgccaccagcagaagcggcuucuucgccaccauggccugggccgugcccagagacaacaacaagaccgccaccaacccccugaccguggaggugccccacaucugcaccaaggaggaggaccagaucaccguguggggcuuccacagcgacaacaagacccagaugaagaaccuguacggcgacagcaacccccagaaguucaccagcagcgccaacggcgugaccacccacuacgugagccagaucggcggcuuccccgaccagaccgaggacggcggccugccccagagcggcagaaucgugguggacuacauggugcagaagcccggcaagaccggcaccaucguguaccagagaggcauccugcugccccagaagguguggugcgccagcggcagaagcaaggugaucaagggcagccugccccugaucggcgaggccgacugccugcacgagaaguacggcggccugaacaagagcaagcccuacuacaccggcgagcacgccaaggccaucggcaacugccccaucugggugaagaccccccugaagcuggccaacggcaccaaguacagaccccccgccaagcugcugaaggagagaggcuucuucggcgccaucgccggcuuccuggagggcggcugggagggcaugaucgccggcuggcacggcuacaccagccacggcgcccacggcguggccguggccgccgaccugaagagcacccaggaggccaucaacaagaucaccaagaaccugaacagccugagcgagcuggaggugaagaaccugcagagacugagcggcgccauggacgagcugcacaacgagauccuggagcuggacgagaagguggacgaccugagagccgacaccaucagcagccagaucgagcuggccgugcugcugagcaacgagggcaucaucaacagcgaggacgagcaccugcuggcccuggagagaaagcugaagaagaugcugggccccagcgccguggacaucggcaacggcugcuucgagaccaagcacaagugcaaccagaccugccuggacagaaucgccgccggcaccuucaacgccggcgaguucagccugcccaccuucgacagccugaacaucaccgccgccagccugaacgacgacggccuggacaaccacaccauccugcuguacuacagcaccgccgccagcagccuggccgugacccugaugaucgccaucuucaucguguacaugaucagcagagacaacgugagcugcagcaucugccuguga

SEQ ID NO: 187944 - RNA, 1755 nt, Artificial Sequence
  derived and/or modified CDS sequence (opt4) from hemagglutinin__InfluenzaB__AHL91409
augaaggccaucaucgugcugcugaugguggugaccagcaacgccgacagaaucugcaccggcaucaccagcagcgacagcccccacguggugaagaccgccacccagggcgaggugaacgugaccggcgccaucccccugaccaccacccccaccaagagcuacuucgccaaccugaagggcaccaagaccagaggcaagcugugccccaccugccugaacugcaccgaccuggacguggcccugggcagacccaugugcgugggcaucacccccagcgccaaggccagcauccugcacgaggugagacccgugaccagcggcugcuuccccaucaugcacgacagaaccaagaucagacagcugcccaaccugcugagaggcuacgagaagaucagacugagcacccagaacgugaucaacgccgagaaggcccccggcggccccuacagacugggcaccagcggcagcugccccaacgccaccagcagaagcggcuucuucgccaccauggccugggccgugcccagagacaacaacaagaccgccaccaacccccugaccguggaggugccccacaucugcaccaaggaggaggaccagaucaccguguggggcuuccacagcgacaacaagacccagaugaagaaccuguacggcgacagcaacccccagaaguucaccagcagcgccaacggcaucaccacccacuacgugagccagaucggcggcuuccccgaccagaccgaggacggcggccugccccagagcggcagaaucgugguggacuacauggugcagaagcccggcaagaccggcaccaucguguaccagagaggcauccugcugccccagaagguguggugcgccagcggcagaagcaaggugaucaagggcagccugccccugaucggcgaggccgacugccugcacgagaaguacggcggccugaacaagagcaagcccuacuacaccggcgagcacgccaaggccaucggcaacugccccaucugggugaagaccccccugaagcuggccaacggcaccaaguacagaccccccgccaagcugcugaaggagagaggcuucuucggcgccaucgccggcuuccuggagggcggcugggagggcaugguggccggcuggcacggcuacaccagccacggcgcccacggcguggccguggccgccgaccugaagagcacccaggaggccaucaacaagaucaccaagaaccugaacagccugagcgagcuggaggugaagaaccugcagagacugagcggcgccauggacgagcugcacaacgagauccuggagcuggacgagaagguggacgaccugagagccgacaccaucagcagccagaucgagcuggccgugcugcugagcaacgagggcaucaucaacagcgaggacgagcaccugcuggcccuggagagaaagcugaagaagaugcugggccccagcgccguggacaucggcaacggcugcuucgagaccaagcacaagugcaaccagaccugccuggacagaaucgccgccggcaccuucaacgccggcgaguucagccugcccaccuucgacagccugaacaucaccgccgccagccugaacgacgacggccuggacaaccacaccauccugcuguacuacagcaccgccgccagcagccuggccgugacccugaugaucgccaucuucaucguguacaugaucagcagagacaacgugagcugcagcaucugccuguga

SEQ ID NO: 187945 - RNA, 1755 nt, Artificial Sequence
  derived and/or modified CDS sequence (opt4) from hemagglutinin__InfluenzaB__AHL91431
augaaggccaucaucgugcugcugaugguggugaccagcaacgccgacagaaucugcaccggcaucaccagcagcaacagcccccacguggugaagaccgccacccagggcgaggugaacgugaccggcgccaucccccugaccaccacccccaccaagagccacuucgccaaccugaagggcaccaagaccagaggcaagcugugccccaccugccugaacugcaccgaccuggacguggcccugggcagacccaugugcgugggcaucacccccagcgccaaggccagcauccugcacgaggugagacccgugaccagcggcugcuuccccaucaugcacgacagaaccaagaucagacagcugcccaaccugcugagaggcuacgagaagaucagacugagcacccagaacgugaucaacgccgagaaggcccccggcggccccuacagacugggcaccagcggcagcugccccaacgccaccagcaagagcggcuucuucgccaccauggccugggccgugcccagagacaacaacaagaccgccaccaacccccugaccguggaggugccccacaucugcaccaaggaggaggaccagaucaccguguggggcuuccacagcgacaacaagacccagaugaagaaccuguacggcgacagcaacccccagaaguucaccagcagcgccaacggcaucaccacccacuacgugagccagaucggcggcuuccccgaccagaccgaggacggcggccugccccagagcggcagaaucgugguggacuacauggugcagaagcccggcaagaccggcaccaucguguaccagagaggcauccugcugccccagaagguguggugcgccagcggcagaagcaaggugaucaagggcagccugccccugaucggcgaggccgacugccugcacgagaaguacggcggccugaacaagagcaagcccuacuacaccggcgagcacgccaaggccaucggcaacugccccaucugggugaagaccccccugaagcuggccaacggcaccaaguacagaccccccgccaagcugcugaaggagagaggcuucuucggcgccaucgccggcuuccuggagggcggcugggagggcaugaucgccggcuggcacggcuacaccagccacggcgcccacggcguggccguggccgccgaccugaagagcacccaggaggccaucaacaagaucaccaagaaccugaacuuccugagcgagcuggaggugaagaaccugcagagacugagcggcgccauggacgagcugcacaacgagauccuggagcuggacgagaagguggacgaccugagagccgacaccaucagcagccagaucgagcuggccgugcugcugagcaacgagggcaucaucaacagcgaggacgagcaccugcuggcccuggagagaaagcugaagaagaugcugggccccagcgccguggacaucggcaacggcugcuucgagaccaagcacaagugcaaccagaccugccuggacagaaucgccgccggcaccuucaacgccggcgaguucagccugcccaccuucgacagccugaacaucaccgccgccagccugaacgacgacggccuggacaaccacaccauccugcuguacuacagcaccgccgccagcagccuggccgugacccugaugaucgccaucuucaucguguacaugaucagcagagacaacgugagcugcagcaucugccuguga

SEQ ID NO: 187946 - RNA, 1755 nt, Artificial Sequence
  derived and/or modified CDS sequence (opt4) from hemagglutinin__InfluenzaB__AHL91442
augaaggccaucaucgugcugcugaugguggugaccagcaacgccgacagaaucugcaccggcaucaccagcagcaacagcccccacguggugaagaccgccacccagggcgaggugaacgugaccggcgccaucccccugaccaccacccccaccaagagccacuucgccaaccugaagggcaccaagaccagaggcaagcugugccccaccugccugaacugcaccgaccuggacguggcccugggcagacccaugugcgugggcaucacccccagcgccaaggccagcauccugcacgaggugagacccgugaccagcggcugcuuccccaucaugcacgacagaaccaagaucagacagcugcccaaccugcugagaggcuacgagaagaucagacugagcacccagaacgugaucaacgccgagaccgcccccggcggccccuacagacugggcaccagcggcagcugccccaacgccaccagcaagagcggcuucuucgccaccauggccugggccgugcccagagacaacaacaagaccgccaccaacccccugaccguggaggugccccacaucugcaccaaggaggaggaccagaucaccguguggggcuuccacagcgacaacaagacccagaugaagaaccuguacggcgacagcaacccccagaaguucaccagcagcgccaacggcaucaccacccacuacgugagccagaucggcggcuuccccgaccagaccgaggacggcggccugccccagagcggcagaaucgugguggacuacauggugcagaagcccggcaagaccggcaccaucguguaccagagaggcauccugcugccccagaagguguggugcgccagcggcagaagcaaggugaucaagggcagccugccccugaucggcgaggccgacugccugcacgagaaguacggcggccugaacaagagcaagcccuacuacaccggcgagcacgccaaggccaucggcaacugccccaucugggugaagaccccccugaagcuggccaacggcaccaaguacagaccccccgccaagcugcugaaggagagaggcuucuucggcgccaucgccggcuuccuggagggcggcugggagggcaugaucgccggcuggcacggcuacaccagccacggcgcccacggcguggccguggccgccgaccugaagagcacccaggaggccaucaacaagaucaccaagaaccugaacagccugagcgagcuggaggugaagaaccugcagagacugagcggcgccauggacgagcugcacaacgagauccuggagcuggacgagaagguggacgaccugagagccgacaccaucagcagccagaucgagcuggccgugcugcugagcaacgagggcaucaucaacagcgaggacgagcaccugcuggcccuggagagaaagcugaagaagaugcugggccccagcgccguggacaucggcaacggcugcuucgagaccaagcacaagugcaaccagaccugccuggacagaaucgccgccggcaccuucaacgccggcgaguucagccugcccaccuucgacagccugaacaucaccgccgccagccugaacgacgacggccuggacaaccacaccauccugcuguacuacagcaccgccgccagcagccuggccgugacccugaugaucgccaucuucaucguguacaugaucagcagagacaacgugagcugcagcaucugccuguga

SEQ ID NO: 187947 - RNA, 1755 nt, Artificial Sequence
  derived and/or modified CDS sequence (opt4) from hemagglutinin__InfluenzaB__AHL91453
augaaggccaucaucgugcugcugaugguggugaccagcaacgccgacagaaucugcaccggcaucaccagcagcaacagcccccacguggugaagaccgccacccagggcgaggugaacgugaccggcgccaucccccugaccaccacccccaccaagagccacuucgccaaccugaagggcaccaagaccagaggcaagcugugccccaccugccugaacugcaccgaccuggacguggcccugggcagacccaugugcgugggcaucacccccagcgccaaggccagcauccugcacgaggugagacccgugaccagcggcugcuuccccaucaugcacgacagaaccaagaucagacagcugcccaaccugcugagaggcuacgagaagaucagacugagcacccagaacgugaucaacgccgagaaggcccccggcggccccuacagacugggcaccagcggcagcugccccaacgccaccagcaagagcggcuucuucgccaccauggccugggccgugcccagagacaacaacaagaccgccaccaacccccugaccaucgaggugccccacgugugcaccaaggaggaggaccagaucaccguguggggcuuccacagcgacaacaagacccagaugaagaaccuguacggcgacagcaacccccagaaguucaccagcagcgccaacggcaucaccacccacuacgugagccagaucggcggcuuccccgaccagaccgaggacggcggccugccccagagcggcagaaucgugguggacuacauggugcagaagcccggcaagaccggcaccaucguguaccagagaggcauccugcugccccagaagguguggugcgccagcggcagaagcaaggugaucaagggcagccugccccugaucggcgaggccgacugccugcacgagaaguacggcggccugaacaagagcaagcccuacuacaccggcgagcacgccaaggccaucggcaacugccccaucugggugaagaccccccugaagcuggccaacggcaccaaguacagaccccccgccaagcugcugaaggagagaggcuucuucggcgccaucgccggcuuccuggagggcggcugggagggcaugaucgccggcuggcacggcuacaccagccacggcgcccacggcguggccguggccgccgaccugaagagcacccaggaggccaucaacaagaucaccaagaaccugaacagccugagcgagcuggaggugaagaaccugcagagacugagcggcgccauggacgagcugcacaacgagauccuggagcuggacgagaagguggacgaccugagagccgacaccaucagcagccagaucgagcuggccgugcugcugagcaacgagggcaucaucaacagcgaggacgagcaccugcuggcccuggagagaaagcugaagaagaugcugggccccagcgccguggacaucggcaacggcugcuucgagaccaagcacaagugcaaccagaccugccuggacagaaucgccgccggcaccuucaacgccggcgaguucagccugcccaccuucgacagccugaacaucaccgccgccagccugaacgacgacggccuggacaaccacaccauccugcuguacuacagcaccgccgccagcagccuggccgugacccugaugaucgccaucuucaucguguacaugaucagcagagacaacgugagcugcagcaucugccuguga

SEQ ID NO: 187948 - RNA, 1755 nt, Artificial Sequence; identical to SEQ ID NO: 186465
  derived and/or modified CDS sequence (opt4) from hemagglutinin__InfluenzaB__AHL91464

SEQ ID NO: 187949 - RNA, 1755 nt, Artificial Sequence; identical to SEQ ID NO: 186571
  derived and/or modified CDS sequence (opt4) from hemagglutinin__InfluenzaB__AHL91475

SEQ ID NO: 187950 - RNA, 1755 nt, Artificial Sequence; identical to SEQ ID NO: 187946
  derived and/or modified CDS sequence (opt4) from hemagglutinin__InfluenzaB__AHL91486

SEQ ID NO: 187951 - RNA, 1755 nt, Artificial Sequence; identical to SEQ ID NO: 187946
  derived and/or modified CDS sequence (opt4) from hemagglutinin__InfluenzaB__AHL91497

SEQ ID NO: 187952 - RNA, 1755 nt, Artificial Sequence; identical to SEQ ID NO: 187946
  derived and/or modified CDS sequence (opt4) from hemagglutinin__InfluenzaB__AHL91530

SEQ ID NO: 187953 - RNA, 1755 nt, Artificial Sequence; identical to SEQ ID NO: 186465
  derived and/or modified CDS sequence (opt4) from hemagglutinin__InfluenzaB__AHL91541

SEQ ID NO: 187954 - RNA, 1755 nt, Artificial Sequence; identical to SEQ ID NO: 187946
  derived and/or modified CDS sequence (opt4) from hemagglutinin__InfluenzaB__AHL91552

SEQ ID NO: 187955 - RNA, 1755 nt, Artificial Sequence; identical to SEQ ID NO: 187946
  derived and/or modified CDS sequence (opt4) from hemagglutinin__InfluenzaB__AHL91574

SEQ ID NO: 187956 - RNA, 1755 nt, Artificial Sequence
  derived and/or modified CDS sequence (opt4) from hemagglutinin__InfluenzaB__AHL91585
augaaggccaucaucgugcugcugaugguggugaccagcaacgccgacagaaucugcaccggcaucaccagcagcaacagcccccacguggugaagaccgccacccagggcgaggugaacgugaccggcgccaucccccugaccaccacccccaccaagagccacuucgccaaccugaagggcaccaagaccagaggcaagcugugccccaccugccugaacugcaccgaccuggacguggcccugggcagacccaugugcgugggcaucacccccagcgccaaggccagcauccugcacgaggugagacccgugaccagcggcugcuuccccaucaugcacgacagaaccaagaucagacagcugcccaaccugcugagaggcuacgagaagaucagacugagcacccagaacgugaucaacgccgagaaggcccccggcggccccuacagacugggcaccagcggcagcugccccaacgccaccagcaagagcggcuucuucgccaccauggccugggccgugcccagagacaacaacaagaccgccaccaacccccugaccguggaggugccccacaucugcaccaaggaggaggaccagaucaccguguggggcuuccacagcgacaacaagacccagaugaagaaccuguacggcgacagcaacccccagaaguucaccagcagcgccaacggcaugaccacccacuacgugagccagaucggcggcuuccccgaccagaccgaggacggcggccugccccagagcggcagaaucgugguggacuacauggugcagaagcccggcaagaccggcaccaucguguaccagagaggcauccugcugccccagaagguguggugcgccagcggcagaagcaaggugaucaagggcagccugccccugaucggcgaggccgacugccugcacgagaaguacggcggccugaacaagagcaagcccuacuacaccggcgagcacgccaaggccaucggcaacugccccaucugggugaagaccccccugaagcuggccaacggcaccaaguacagaccccccgccaagcugcugaaggagagaggcuucuucggcgccaucgccggcuuccuggagggcggcugggagggcaugaucgccggcuggcacggcuacaccagccacggcgcccacggcguggccguggccgccgaccugaagagcacccaggaggccaucaacaagaucaccaagaaccugaacagccugagcgagcuggaggugaagaaccugcagagacugagcggcgccauggacgagcugcacaacgagauccuggagcuggacgagaagguggacgaccugagagccgacaccaucagcagccagaucgagcuggccgugcugcugagcaacgagggcaucaucaacagcgaggacgagcaccugcuggcccuggagagaaagcugaagaagaugcugggccccagcgccguggacaucggcaacggcugcuucgagaccaagcacaagugcaaccagaccugccuggacagaaucgccgccggcaccuucaacgccggcgaguucagccugcccaccuucgacagccugaacaucaccgccgccagccugaacgacgacggccuggacaaccacaccauccugcuguacuacagcaccgccgccagcagccuggccgugacccugaugaucgccaucuucaucguguacaugaucagcagagacaacgugagcugcagcaucugccuguga

SEQ ID NO: 187957 - RNA, 1755 nt, Artificial Sequence
  derived and/or modified CDS sequence (opt4) from hemagglutinin__InfluenzaB__AHL91596
augaaggccaucaucgugcugcugaugguggugaccagcaacgccgacagaaucugcaccggcaucaccagcagcaacagcccccacguggugaagaccgccacccagggcgaggugaacgugaccggcgccaucccccugaccaccacccccaccaagagccacuucgccaaccugaagggcaccaagaccagaggcaagcugugccccaccugccugaacugcaccgaccuggacguggcccugggcagacccaugugcgugggcaucacccccagcgccaaggccagcauccugcacgaggugagacccgugaccagcggcugcuuccccaucaugcacgacagaaccaagaucagacagcugcccaaccugcugagaggcuacgagaagaucagacugagcacccagaacgugaucaacgccgagaaggcccccggcggccccuacagacugggcaccagcggcagcugccccaacgccaccagcaagagcggcuucuucgccaccauggccugggccgugcccagagacaacaacaagaccgccaccaacccccugaccguggaggugccccacaucugcaccaaggaggaggaccagaucaccguguggggcuuccacagcgacaacaagacccagaugaagaaccuguacggcgacagcaacccccagaaguucaccagcagcgccaacggcaucaccacccacuacgugagccagaucggcggcuuccccgaccagaccgaggacggcggccugccccagagcggcagaaucgugguggacuacauggugcagaagcccggcaagaccggcaccaucguguaccagagaggcauccugcugccccagaagguguggugcgccagcggcagaagcaaggugaucaagggcagccugccccugaucggcgaggccgacugccugcacgagaaguacggcggccugaacaagagcaagcccuacuacaccggcgagcacgccaaggccaucggcaacugccccaucugggugaagaccccccugaagcuggccaacggcaccaaguacagaccccccgccaagauccugaaggagagaggcuucuucggcgccaucgccggcuuccuggagggcggcugggagggcaugaucgccggcuggcacggcuacaccagccacggcgcccacggcguggccguggccgccgaccugaagagcacccaggaggccaucaacaagaucaccaagaaccugaacagccugagcgagcuggaggugaagaaccugcagagacugagcggcgccauggacgagcugcacaacgagauccuggagcuggacgagaagguggacgaccugagagccgacaccaucagcagccagaucgagcuggccgugcugcugagcaacgagggcaucaucaacagcgaggacgagcaccugcuggcccuggagagaaagcugaagaagaugcugggccccagcgccguggacaucggcaacggcugcuucgagaccaagcacaagugcaaccagaccugccuggacagaaucgccgccggcaccuucaacgccggcgaguucagccugcccaccuucgacagccugaacaucaccgccgccagccugaacgacgacggccuggacaaccacaccauccugcuguacuacagcaccgccgccagcagccuggccgugacccugaugaucgccaucuucaucguguacaugaucagcagagacaacgugagcugcagcaucugccuguga

SEQ ID NO: 187958 - RNA, 1755 nt, Artificial Sequence; identical to SEQ ID NO: 187957
  derived and/or modified CDS sequence (opt4) from hemagglutinin__InfluenzaB__AHL91607

SEQ ID NO: 187959 - RNA, 1755 nt, Artificial Sequence
  derived and/or modified CDS sequence (opt4) from hemagglutinin__InfluenzaB__AHL91618
augaaggccaucaucgugcugcugaugguggugaccagcaacgccgacagaaucugcaccggcaucaccagcagcaacagcccccacguggugaagaccgccacccagggcgaggugaacgugaccggcgccaucccccugaccaccacccccaccaagagccacuucgccaaccugaagggcaccaagaccagaggcaagcugugccccaccugccugaacugcaccgaccuggacguggcccugggcagacccaugugcgugggcaucacccccagcgccaaggccagcauccugcacgaggugagacccgugaccagcggcugcuuccccaucaugcacgacagaaccaagaucagacagcugcccaaccugcugagaggcuacgagaagaucagacugagcacccagaacgugaucaacgccgagaccgcccccggcggccccuacagacugggcaccagcggcagcugccccaacgccaccagcaagagcggcuucuucgccaccauggccugggccgugcccagagacaacaacaagaccgccaccaacccccugaccguggaggugccccacaucugcaccaaggaggaggaccagaucaccguguggggcuuccacagcgacaacaagacccagaugaagaaccuguacggcgacagcaacccccagaaguucaccagcagcgccaacggcaucaccacccacuacgugagccagaucggcggcuuccccgaccagaccgaggacggcggccugccccagagcggcagaaucgugguggacuacauggugcagaagcccggcaagaccggcaccaucguguaccagagaggcauccugcugccccagaagguguggugcgccagcggcagaagcaaggugaucaagggcagccugccccugaucggcgaggccgacugccugcacgagaaguacggcggccugaacaagagcaagcccuacuacaccggcgagcacgccaaggccaucggcaacugccccaucugggugaagaccccccugaagcuggccaacggcaccaaguacagaccccccgccaagcugcugaaggagagaggcuucuucggcgccaucgccggcuuccuggagggcggcugggagggcaugaucgccggcuggcacggcuacaccagccacggcgcccacggcguggccguggccgccgaccugaagagcacccaggaggccaucaacaagaucaccaagaaccugaacagccugagcgagcuggaggugaagaaccugcagagacugagcggcgccauggacgagcugcacaacgagauccuggagcuggacgagaagguggacgaccugagagccgacaccaucagcagccagaucgagcuggccgugcugcugagcaacgagggcaucaucaacagcgaggacgagcaccugcuggcccuggagagaaagcugaagaagaugcugggccccagcgccguggacaucggcaacggcugcuucgagaccaagcacaagugcaaccagaccugccuggacagaaucgccgccggcaccuucaacgugggcgaguucagccugcccaccuucgacagccugaacaucaccgccgccagccugaacgacgacggccuggacaaccacaccauccugcuguacuacagcaccgccgccagcagccuggccgugacccugaugaucgccaucuucaucguguacaugaucagcagagacaacgugagcugcagcaucugccuguga

SEQ ID NO: 187960 - RNA, 1755 nt, Artificial Sequence
  derived and/or modified CDS sequence (opt4) from hemagglutinin__InfluenzaB__AHL91629
augaaggccaucaucgugcugcugaugguggugaccagcaacgccgacagaaucugcaccggcaucaccagcagcaacagcccccacguggugaagaccgccacccagggcgaggugaacgugaccggcgccaucccccugaccaccacccccaccaagagccacuucgccaaccugaagggcaccaagaccagaggcaagcugugccccaccugcuucaacugcaccgaccuggacguggcccugggcagacccaugugcgugggcaucacccccagcgccaaggccagcauccugcacgaggugagacccgugaccagcggcugcuuccccaucaugcacgacagaaccaagaucagacagcugcccaaccugcugagaggcuacgagaagaucagacugagcacccagaacgugaucgacgccgagaaggcccccggcggccccuacaagcugggcaccagcggcagcugccccaacgccaccagcaagagcggcuucuucgccaccauggccugggccgugcccagagacaacaacaagaccgccaccaacccccugaccguggaggugccccacaucugcaccaaggaggaggaccagaucaccguguggggcuuccacagcgacaacaagacccagaugaagaaccuguacggcgacagcaacccccagaaguucaccagcagcgccaacggcaucaccacccacuacgugagccagaucggcggcuuccccgaccagaccgaggacggcggccugccccagagcggcagaaucgugguggacuacauggugcagaagcccggcaagaccggcaccaucguguaccagagaggcauccugcugccccagaagguguggugcgccagcggcagaagcaaggugaucaagggcagccugccccugaucggcgaggccgacugccugcacgagaaguacggcggccugaacaagagcaagcccuacuacaccggcgagcacgccaaggccaucggcaacugccccaucugggugaagaccccccugaagcuggccaacggcaccaaguacagaccccccgccaagcugcugaaggagagaggcuucuucggcgccaucgccggcuuccuggagggcggcugggagggcaugaucgccggcuggcacggcuacaccagccacggcgcccacggcguggccguggccgccgaccugaagagcacccaggaggccaucaacaagaucaccaagaaccugaacagccugagcgagcuggaggugaagaaccugcagagacugagcggcgccauggacgagcugcacaacgagauccuggagcuggacgagaagguggacgaccugagagccgacaccaucagcagccagaucgagcuggccgugcugcugagcaacgagggcaucaucaacagcgaggacgagcaccugcuggcccuggagagaaagcugaagaagaugcugggccccagcgccguggacaucggcaacggcugcuucgagaccaagcacaagugcaaccagaccugccuggacagaaucgccgccggcaccuucaacgccggcgaguucagccugcccaccuucgacagccugaacaucaccgccgccagccugaacgacgacggccuggacaaccacaccauccugcuguacuacagcaccgccgccagcagccuggccgugacccugaugaucgccaucuucaucguguacaugaucagcagagacaacgugagcugcagcaucugccuguga

SEQ ID NO: 187961 - RNA, 1755 nt, Artificial Sequence; identical to SEQ ID NO: 187960
  derived and/or modified CDS sequence (opt4) from hemagglutinin__InfluenzaB__AHL91640

SEQ ID NO: 187962 - RNA, 1755 nt, Artificial Sequence; identical to SEQ ID NO: 186467
  derived and/or modified CDS sequence (opt4) from hemagglutinin__InfluenzaB__AHL91651

SEQ ID NO: 187963 - RNA, 1752 nt, Artificial Sequence
  derived and/or modified CDS sequence (opt4) from hemagglutinin__InfluenzaB__AHL91662
augaaggccaucaucgugcugcugaugguggugaccagcaacgccgacagaaucugcaccggcaucaccagcagcaacagcccccacguggugaagaccgccacccagggcgaggugaacgugaccggcgccaucccccugaccaccacccccaccaagagccacuucgccaaccugaagggcaccaagaccagaggcaagcugugccccaccugccugaacugcaccgaccuggacguggcccugggcagacccaugugcgugggcaucacccccagcgccaaggccagcauccugcacgaggugagacccgugaccagcggcugcuuccccaucaugcacgacagaaccaagaucagacagcugcccaaccugcugagaggcuacgagaagaucagacugagcacccagaacgugaucaacgccgagaccgcccccggcggccccuacagacugggcaccagcggcagcugccccaacgccaccagcaagagcggcuucuucgccaccauggccugggccgugcccagagacaacaacaagaccgccaccaacccccugaccguggaggugccccacaucugcaccaaggaggaggaccagaucaccguguggggcuuccacagcgacaacaagacccagaugaagaaccuguacggcgacagcaacccccagaaguucaccagcagcgccaacggcaucaccacccacuacgugagccagaucggcggcuuccccgaccagaccgaggacggcggccugccccagagcggcagaaucgugguggacuacauggugcagaagcccggcaagaccggcaccaucguguaccagagaggcauccugcugccccagaagguguggugcgccagcggcagaagcaaggugaucaagggcagccugccccugaucggcgaggccgacugccugcacgagaaguacggcggccugaacaagagcaagcccuacuacaccggcgagcacgccaaggccaucggcaacugccccaucugggugaagaccccccugaagcuggccaacggcaccaaguacagaccccccgccaagcugcugaaggagagaggcuucuucggcgccaucgccggcuuccuggagggcggcugggagggcaugaucgccggcuggcacggcuacaccagccacggcgcccacggcguggccguggccgccgaccugaagagcacccaggaggccaucaacaagaucaccaagaaccugaacagccugagcgagcuggaggugaagaaccugcagagacugagcggcgccauggacgagcugcacaacgagauccuggagcuggacgagaagguggacgaccugagagccgacaccaucagcagccagaucgagcuggccgugcugcugagcaacgagggcaucaucaacagcgaggacgagcaccugcuggcccuggagagaaagcugaagaagaugcugggccccagcgccguggacaucggcaacggcugcuucgagaccaagcacaagugcaaccagaccugccuggacagaaucgccgccggcaccuucaacgccggcgaguucagccugcccaccuucgacagccugaacaucaccgccgccagccugaacgacggccuggacaaccacaccauccugcuguacuacagcaccgccgccagcagccuggccgugacccugaugaucgccaucuucaucguguacaugaucagcagagacaacgugagcugcagcaucugccuguga

SEQ ID NO: 187964 - RNA, 1755 nt, Artificial Sequence; identical to SEQ ID NO: 186571
  derived and/or modified CDS sequence (opt4) from hemagglutinin__InfluenzaB__AHL91673

SEQ ID NO: 187965 - RNA, 1755 nt, Artificial Sequence
  derived and/or modified CDS sequence (opt4) from hemagglutinin__InfluenzaB__AHL91684
augaaggccaucaucgugcugcugaugguggugaccagcaacgccgacagaaucugcaccggcaucaccagcagcaacagcccccacguggugaagaccgccacccagggcgaggugaacgugaccggcgccaucccccugaccaccacccccaccaagagccacuucgccaaccugaagggcaccaagaccagaggcaagcugugccccaccugccugaacugcaccgaccuggacguggcccugggcagacccaugugcgugggcaucacccccagcgccaaggccagcauccugcacgaggugagacccgugaccagcggcugcuuccccaucaugcacgacagaaccaagaucagacagcugcccaaccugcugagaggcuacgagaagaucagacugagcacccagaacgugaucaacgccgagaaggcccccggcggccccuacagacugggcaccagcggcagcugccccaacgccaccagcaagagcggcuucuucgccaccauggccugggccgugcccagagacaacaacaagaccgccaccaacccccugaccaucgaggugccccacaucugcaccaaggaggaggaccagaucaccguguggggcuuccacagcgacaacaagacccagaugaagaaccuguacggcgacagcaacccccagaaguucaccagcagcgccaacggcaucaccacccacuacgugagccagaucggcggcuuccccgaccagaccgaggacggcggccugccccagagcggcagaaucgugguggacuacauggugcagaagcccggcaagaccggcaccaucguguaccagagaggcauccugcugccccagaagguguggugcgccagcggcagaagcaaggugaucaagggcuuccugccccugaucggcgaggccgacugccugcacgagaaguacggcggccugaacaagagcaagcccuacuacaccggcgagcacgccaaggccaucggcaacugccccaucugggugaagaccccccugaagcuggccaacggcaccaaguacagaccccccgccaagcugcugaaggagagaggcuucuucggcgccaucgccggcuuccuggagggcggcugggagggcaugaucgccggcuggcacggcuacaccagccacggcgcccacggcguggccguggccgccgaccugaagagcacccaggaggccaucaacaagaucaccaagaaccugaacagccugagcgagcuggaggugaagaaccugcagagacugagcggcgccauggacgagcugcacaacgagauccuggagcuggacgagaagguggacgaccugagagccgacaccaucagcagccagaucgagcuggccgugcugcugagcaacgagggcaucaucaacagcgaggacgagcaccugcuggcccuggagagaaagcugaagaagaugcugggccccagcgccguggacaucggcaacggcugcuucgagaccaagcacaagugcaaccagaccugccuggacagaaucgccgccggcaccuucaacgccggcgaguucagccugcccaccuucgacagccugaacaucaccgccgccagccugaacgacgacggccuggacaaccacaccauccugcuguacuacagcaccgccgccagcagccuggccgugacccugaugaucgccaucuucaucguguacaugaucagcagagacaacgugagcugcagcaucugccuguga

SEQ ID NO: 187966 - RNA, 1755 nt, Artificial Sequence; identical to SEQ ID NO: 186467
  derived and/or modified CDS sequence (opt4) from hemagglutinin__InfluenzaB__AHL91695

SEQ ID NO: 187967 - RNA, 1755 nt, Artificial Sequence; identical to SEQ ID NO: 186571
  derived and/or modified CDS sequence (opt4) from hemagglutinin__InfluenzaB__AHL91706

SEQ ID NO: 187968 - RNA, 1758 nt, Artificial Sequence; identical to SEQ ID NO: 187039
  derived and/or modified CDS sequence (opt4) from hemagglutinin__InfluenzaB__AHL91717

SEQ ID NO: 187969 - RNA, 1758 nt, Artificial Sequence; identical to SEQ ID NO: 187039
  derived and/or modified CDS sequence (opt4) from hemagglutinin__InfluenzaB__AHL91728

SEQ ID NO: 187970 - RNA, 1758 nt, Artificial Sequence; identical to SEQ ID NO: 187039
  derived and/or modified CDS sequence (opt4) from hemagglutinin__InfluenzaB__AHL91739

SEQ ID NO: 187971 - RNA, 1755 nt, Artificial Sequence; identical to SEQ ID NO: 186571
  derived and/or modified CDS sequence (opt4) from hemagglutinin__InfluenzaB__AHL91750

SEQ ID NO: 187972 - RNA, 1758 nt, Artificial Sequence; identical to SEQ ID NO: 187039
  derived and/or modified CDS sequence (opt4) from hemagglutinin__InfluenzaB__AHL91761

SEQ ID NO: 187973 - RNA, 1758 nt, Artificial Sequence
  derived and/or modified CDS sequence (opt4) from hemagglutinin__InfluenzaB__AHL91772
augaaggccaucaucgugcugcugaugguggugaccagcaacgccgacagaaucugcaccggcaucaccagcagcaacagcccccacguggugaagaccgccacccagggcgaggugaacgugaccggcgugaucccccugaccaccacccccaccaagagccacuucgccaaccugaagggcaccaagaccagaggcaagcugugccccaagugccugaacugcaccgaccuggacguggcccugggcagacccaagugcaccggcaacauccccagcgccaaggugagcauccugcacgaggugagacccgugaccagcggcugcuuccccaucaugcacgacagaaccaagaucagacagcugcccaaccugcugagaggcuacgagcacaucagacugagcacccacaacgugaucaacgccgagaaggcccccggcggccccuacaagaucggcaccagcggcagcugccccaacaucaccaacggcaacggcuucuucgccaccauggccugggccgugcccaagaacgacaacaacaagaccgccaccaacagccugaccaucgaggugcccuacaucugcaccgagggcgaggaccagaucaccguguggggcuuccacagcgacaacgagacccagauggccaagcuguacggcgacagcaagccccagaaguucaccagcagcgccaacggcgugaccacccacuacgugagccagaucggcggcuuccccaaccagaccgaggacggcggccugccccagagcggcagaaucgugguggacuacauggugcagaagagcggcaagaccggcaccaucaccuaccagagaggcauccugcugccccagaagguguggugcgccagcggcagaagcaaggugaucaagggcagccugccccugaucggcgaggccgacugccugcacgagaaguacggcggccugaacaagagcaagcccuacuacaccggcgagcacgccaaggccaucggcaacugccccaucugggugaagaccccccugaagcuggccaacggcaccaaguacagaccccccgccaagcugcugaaggagagaggcuucuucggcgccaucgccggcuuccuggagggcggcugggagggcaugaucgccggcuggcacggcuacaccagccacggcgcccacggcguggccguggccgccgaccugaagagcacccaggaggccaucaacaagaucaccaagaaccugaacagccugagcgagcuggaggugaagaaccugcagagacugagcggcgccauggacgagcugcacaacgagauccuggagcuggacgagaagguggacgaccugagagccgacaccaucagcagccagaucgagcuggccgugcugcugagcaacgagggcaucaucaacagcgaggacgagcaccugcuggcccuggagagaaagcugaagaagaugcugggccccagcgccguggagaucggcaacggcugcuucgagaccaagcacaagugcaaccagaccugccuggacagaaucgccgccggcaccuucgacgccggcgaguucagccugcccaccuucgacagccugaacaucaccgccgccagccugaacgacgacggccuggacaaccacaccauccugcuguacuacagcaccgccgccagcagccuggccgugacccugaugaucgccaucuucgugguguacauggugagcagagacaacgugagcugcagcaucugccuguga

SEQ ID NO: 187974 - RNA, 1758 nt, Artificial Sequence; identical to SEQ ID NO: 187973
  derived and/or modified CDS sequence (opt4) from hemagglutinin__InfluenzaB__AHL91783

SEQ ID NO: 187975 - RNA, 1758 nt, Artificial Sequence; identical to SEQ ID NO: 187973
  derived and/or modified CDS sequence (opt4) from hemagglutinin__InfluenzaB__AHL91794

SEQ ID NO: 187976 - RNA, 1758 nt, Artificial Sequence
  derived and/or modified CDS sequence (opt4) from hemagglutinin__InfluenzaB__AHL91805
augaaggccaucaucgugcugcugaugguggugaccagcaacgccgacagaaucugcaccggcaucaccagcagcaacagcccccacguggugaagaccgccacccagggcgaggugaacgugaccggcgugaucccccugaccaccacccccaccaagagccacuucgccaaccugaagggcaccaagaccagaggcaagcugugccccaagugcuucaacugcaccgaccuggacguggcccugggcagacccaagugcaccggcaacauccccagcgccgaggugagcauccugcacgaggugagacccgugaccagcggcugcuuccccaucaugcacgacagaaccaagaucagacagcugcccaaccugcugagaggcuacgagcacaucagacugagcacccacaacgugaucaacgccgagaaggcccccggcggccccuacaagaucggcaccagcggcagcugccccaacgugaccaacggcaacggcuucuucgccaccauggccugggccgugcccaagaacgacaacaacaagaccgccaccaacagccugaccaucgaggugcccuacaucugcaccgagggcgaggaccagaucaccguguggggcuuccacagcgacaacgagacccagauggccaagcuguacggcgacagcaagccccagaaguucaccagcagcgccaacggcgugaccacccacuacgugagccagaucggcggcuuccccaaccagaccgaggacggcggccugccccagagcggcagaaucgugguggacuacauggugcagaagagcggcaagaccggcaccaucaccuaccagagaggcauccugcugccccagaagguguggugcgccagcggcagaagcaaggugaucaagggcagccugccccugaucggcgaggccgacugccugcacgagaaguacggcggccugaacaagagcaagcccuacuacaccggcgagcacgccaaggccaucggcaacugccccaucugggugaagaccccccugaagcuggccaacggcaccaaguacagaccccccgccaagcugcugaaggagagaggcuucuucggcgccaucgccggcuuccuggagggcggcugggagggcaugaucgccggcuggcacggcuacaccagccacggcgcccacggcguggccguggccgccgaccugaagagcacccaggaggccaucaacaagaucaccaagaaccugaacagccugagcgagcuggaggugaagaaccugcagagacugagcggcgccauggacgagcugcacaacgagauccuggagcuggacgagaagguggacgaccugagagccgacaccaucagcagccagaucgagcuggccgugcugcugagcaacgagggcaucaucaacagcgaggacgagcaccugcuggcccuggagagaaagcugaagaagaugcugggccccagcgccguggagaucggcaacggcugcuucgagaccaagcacaagugcaaccagaccugccuggacagaaucgccgccggcaccuucgacgccggcgaguucagccugcccaccuucgacagccugaacaucaccgccgccagccugaacgacgacggccuggacaaccacaccauccugcuguacuacagcaccgccgccagcagccuggccgugacccugaugaucgccaucuucgugguguacauggugagcagagacaacgugagcugcagcaucugccuguga

SEQ ID NO: 187977 - RNA, 1758 nt, Artificial Sequence; identical to SEQ ID NO: 186479
  derived and/or modified CDS sequence (opt4) from hemagglutinin__InfluenzaB__AHL91816

SEQ ID NO: 187978 - RNA, 1758 nt, Artificial Sequence; identical to SEQ ID NO: 186479
  derived and/or modified CDS sequence (opt4) from hemagglutinin__InfluenzaB__AHL91827

SEQ ID NO: 187979 - RNA, 1755 nt, Artificial Sequence; identical to SEQ ID NO: 187086
  derived and/or modified CDS sequence (opt4) from hemagglutinin__InfluenzaB__AHL91838

SEQ ID NO: 187980 - RNA, 1755 nt, Artificial Sequence
  derived and/or modified CDS sequence (opt4) from hemagglutinin__InfluenzaB__AHL91849
augaaggccaucaucgugcugcugaugguggugaccagcaacgccgacagaaucugcaccggcaucaccagcagcaacagcccccacguggugaagaccgccacccagggcgaggugaacgugaccggcgugaucccccugaccaccacccccaccaagagcuacuucgccaaccugaagggcaccagaaccagaggcaagcugugccccgacugccugaacugcaccgaccuggacguggcccugggcagacccaugugcgugggcaccacccccagcgccaaggccagcauccugcacgaggccagacccgugaccagcggcugcuuccccaucaugcacgacagaaccaagaucagacagcugcccaaccugcugagaggcuacgagaacaucagacugagcacccagaacgugaucgacgccgagaacgcccccggcggccccuacagacugggcaccagcggcagcugccccaacgccaccagcaagagcggcuucuucgccaccauggccugggccgugcccaaggacaacaacaagaacgccaccaacccccugaccguggaggugcccuacaucugcaaggagggcgaggaccagaucaccguguggggcuuccacagcgacaacaagacccagaugaagaaccuguacggcgacagcaacccccagaaguucaccagcagcgccaacggcgugaccacccacuacgugagccagaucagcggcuuccccgcccagaccgaggacggcggccugccccagagcggcagaaucgugguggacuacauggugcagaagcccagaaagaccggcaccaucguguaccagagaggcgugcugcugccccagaagguguggugcgccagcggcagaagcaaggugaucaagggcagccugccccugaucggcgaggccgacugccugcacgagaaguacggcggccugaacaagagcaagcccuacuacaccggcgagcacgccaaggccaucggcaacugccccaucugggugaagaccccccugaagcuggccaacggcaccaaguacagaccccccgccaagcugcugaaggagagaggcuucuucggcgccaucgccggcuuccuggagggcggcugggagggcaugaucgccggcuggcacggcuacaccagccacggcgcccacggcguggccguggccgccgaccugaagagcacccaggaggccaucaacaagaucaccaagaaccugaacagccugagcgagcuggaggugaagaaccugcagagacugagcggcgccauggacgagcugcacaacgagauccuggagcuggacgagaagguggacgaccugagagccgacaccaucagcagccagaucgagcuggccgugcugcugagcaacgagggcaucaucaacagcgaggacgagcaccugcuggcccuggagagaaagcugaagaagaugcugggccccagcgccguggacaucggcaacggcugcuucgagaccaagcacaagugcaaccagaccugccuggacagaaucgccgccggcaccuucaacgccggcgaguucagccugcccaccuucgacagccugaacaucaccgccgccagccugaacgacgacggccuggacaaccacaccauccugcuguacuacagcaccgccgccagcagccuggccgugacccugaugcuggccaucuucaucguguacauggugagcagagacaacgugagcugcagcaucugccuguga

SEQ ID NO: 187981 - RNA, 1755 nt, Artificial Sequence
  derived and/or modified CDS sequence (opt4) from hemagglutinin__InfluenzaB__AHL91860
augaaggccaucaucgugcugcugaugguggugaccagcaacgccgacagaaucugcaccggcaucaccagcagcaacagcccccacguggugaagaccgccacccagggcgaggugaacgugaccggcgugaucccccugaccaccacccccaccaagagcuacuucgccaaccugaagggcaccagaaccagaggcaagcugugccccgacugccugaacugcaccgaccuggacguggcccugggcagacccaugugcgugggcaccacccccagcgccaaggccagcauccugcacgaggugagacccgugaccagcggcugcuuccccaucaugcacgacagaaccaagaucagacagcugcccaaccugcugagaggcuacgagaacaucagacugagcacccagaacgugaucgacgccgagaaggcccccggcggccccuacagacugggcaccagcggcagcugccccaacgccaccagcaagagcggcuucuucgccaccauggccugggccgugcccaaggacaacaacaagaacgccaccaacccccugaccguggagauccccuacaucugcaccgagggcgaggaccagaucaccguguggggcuuccacagcgacaacaagacccagaugaagaaccuguacggcgacagcaacccccagaaguucaccagcagcgccaacggcgugaccacccacuacgugagccagaucggcggcuuccccgaccagaccgaggacggcggccugccccagagcggcagaaucgugguggacuacaugaugcagaagcccggcaagaccggcaccaucguguaccagagaggcgugcugcugccccagaagguguggugcgccagcggcagaagcaaggugaucaagggcagccugccccugaucggcgaggccgacugccugcacgagaaguacggcggccugaacaagagcaagcccuacuacaccggcgagcacgccaaggccaucggcaacugccccaucugggugaagaccccccugaagcuggccaacggcaccaaguacagaccccccgccaagcugcugaaggagagaggcuucuucggcgccaucgccggcuuccuggagggcggcugggagggcaugaucgccggcuggcacggcuacaccagccacggcgcccacggcguggccguggccgccgaccugaagagcacccaggaggccaucaacaagaucaccaagaaccugaacagccugagcgagcuggaggugaagaaccugcagagacugagcggcgccauggacgagcugcacaacgagauccuggagcuggacgagaagguggacgaccugagagccgacaccaucagcagccagaucgagcuggccgugcugcugagcaacgagggcaucaucaacagcgaggacgagcaccugcuggcccuggagagaaagcugaagaagaugcugggccccagcgccguggagaucggcaacggcugcuucgagaccaagcacaagugcaaccagaccugccuggacagaaucgccgccggcaccuucaacgccggcgaguucagccugcccaccuucgacagccugaacaucaccgccgccagccugaacgacgacggccuggacaaccacgccauccugcuguacuacagcaccgccgccagcagccuggccgugacccugaugcuggccaucuucaucguguacauggugagcagagacaacgugagcugcagcaucugccuguga

SEQ ID NO: 187982 - RNA, 1755 nt, Artificial Sequence
  derived and/or modified CDS sequence (opt4) from hemagglutinin__InfluenzaB__AHL91871
augaaggccaucaucgugcugcugaugguggugaccagcaacgccgacagaaucugcaccggcaucaccagcagcaacagcccccacguggugaagaccgccacccagggcgaggugaacgugaccggcgugaucccccugaccaccacccccaccaagagcuacuucgccaaccugaagggcaccagaaccagaggcaagcugugccccgacugccugaacugcaccgaccuggacguggcccugggcagacccaugugcgugggcaccacccccagcgccaaggccagcauccugcacgaggugagacccgugaccagcggcugcuuccccaucaugcacgacagaaccaagaucagacagcugcccaaccugcugagaggcuacgagaacaucagacugagcacccagaacgugaucgacgccgagaaggcccccggcggccccuacagacugggcaccagcggcagcugccccaacgccaccagcaagagcggcuucuucgccaccauggccugggccgugcccaaggacaacaacaagaacgccaccaacccccugaccguggagauccccuacaucugcaccgagggcgaggaccagaucaccguguggggcuuccacagcgacaacaagacccagaugaagaaccuguacggcgacagcaacccccagaaguucaccagcagcgccaacggcgugaccacccacuacgugagccagaucggcggcuuccccgaccagaccgaggacggcggccugccccagagcggcagaaucgugguggacuacaugaugcagaagcccggcaagaccggcaccaucguguaccagagaggcgugcugcugccccagaagguguggugcgccagcggcagaagcaaggugaucaagggcagccugccccugaucggcgaggccgacugccugcacgagaaguacggcggccugaacaagagcaagcccuacuacaccggcgagcacgccaaggccaucggcaacugccccaucugggugaagaccccccugaagcuggccaacggcaccaaguacagaccccccgccaagcugcugaaggagagaggcuucuucggcgccaucgccggcuuccuggagggcggcugggagggcaugaucgccggcuggcacggcuacaccagccacggcgcccacggcguggccguggccgccgaccugaagagcacccaggaggccaucaacaagaucaccaagaaccugaacagccugagcgagcuggaggugaagaaccugcagagacugagcggcgccauggacgagcugcacaacgagauccuggagcuggacgagaagguggacgaccugagagccgacaccaucagcagccagaucgagcuggccgugcugcugagcaacgagggcaucaucaacagcgaggacgagcaccugcuggcccuggagagaaagcugaagaagaugcugggccccagcgccguggagaucggcaacggcugcuucgagaccaagcacaagugcaaccagaccugccuggacagaaucgccgccggcaccuucaacgccggcgaguucagccugcccaccuucgacagccugaacaucaccgccgccagccugaacgacgacggccuggacaaccacaccauccugcuguacuacagcaccgccgccagcagccuggccgugacccugaugcuggccaucuucaucguguacauggugagcagagacaacgugagcugcagcaucugccuguga

SEQ ID NO: 187983 - RNA, 1755 nt, Artificial Sequence; identical to SEQ ID NO: 186486
  derived and/or modified CDS sequence (opt4) from hemagglutinin__InfluenzaB__AHL91882

SEQ ID NO: 187984 - RNA, 1755 nt, Artificial Sequence
  derived and/or modified CDS sequence (opt4) from hemagglutinin__InfluenzaB__AHL91904
augaaggccaucaucgugcugcugaugguggugaccagcaacgccgacagaaucugcaccggcaucaccagcagcaacagcccccacguggugaagaccgccacccagggcgaggugaacgugaccggcgugaucccccugaccaccacccccaccaagagcuacuucgccaaccugaagggcaccagaaccagaggcaagcugugccccgacugccugaacugcaccgaccuggacguggcccugggcagacccaugugcgugggcaccacccccagcgccaaggccagcauccugcacgaggugagacccgugaccagcggcugcuuccccaucaugcacgacagaaccaagaucagacagcuggccaaccugcugagaggcuacgagaacaucagacugagcacccagaacgugaucgacgccgagaaggcccccggcggccccuacagacugggcaccagcggcagcugccccaacgccaccagcaagagcggcuucuucgccaccauggccugggccgugcccaaggacaacaacaagaacgccaccaacccccugaccguggaggugcccuacaucugcaccgagggcgaggaccagaucaccguguggggcuuccacagcgacaacaagacccagaugaagaaccuguacggcgacagcaacccccagaaguucaccagcagcgccaacggcgugaccacccacuacgugagccagaucggcggcuuccccgaccagaccgaggacggcggccugccccagagcggcagaaucgugguggacuacaugaugcagaagcacggcaagaccggcaccaucguguaccagagaggcgugcugcugccccagaagguguggugcgccagcggcagaagcaaggugaucaagggcagccugccccugaucggcgaggccgacugccugcacgagaaguacggcggccugaacaagagcaagcccuacuacaccggcgagcacgccaaggccaucggcaacugccccaucugggugaagaccccccugaagcuggccaacggcaccaaguacagaccccccgccaagcugcugaaggagagaggcuucuucggcgccaucgccggcuuccuggagggcggcugggagggcaugaucgccggcuggcacggcuacaccagccacggcgcccacggcguggccguggccgccgaccugaagagcacccaggaggccaucaacaagaucaccaagaaccugaacagccugagcgagcuggaggugaagaaccugcagagacugagcggcgccauggacgagcugcacaacgagauccuggagcuggacgagaagguggacgaccugagagccgacaccaucagcagccagaucgagcuggccgugcugcugagcaacgagggcaucaucaacagcgaggacgagcaccugcuggcccuggagagaaagcugaagaagaugcugggccccagcgccguggacaucggcaacggcugcuucgagaccaagcacaagugcaaccagaccugccuggacagaaucgccgccggcaccuucaacgccggcgaguucagccugcccaccuucgacagccugaacaucaccgccgccagccugaacgacgacggccuggacaaccacaccauccugcuguacuacagcaccgccgccagcagccuggccgugacccugaugcuggccaucuucaucguguacauggugagcagagacaacgugagcugcagcaucugccuguga

SEQ ID NO: 187985 - RNA, 1755 nt, Artificial Sequence
  derived and/or modified CDS sequence (opt4) from hemagglutinin__InfluenzaB__AHL91915
augaaggccaucaucgugcugcugaugguggugaccagcaacgccgacagaaucugcaccggcaucaccagcagcaacagcccccacguggugaagaccgccacccagggcgaggugaacgugaccggcgugaucccccugaccaccacccccaccaagagcuacuucgccaaccugaagggcaccagaaccagaggcaagcugugccccgacugccugaacugcaccgaccuggacguggcccugggcagacccaugugcgugggcaccacccccagcgccaaggccagcauccugcacgaggugagacccgugaccagcggcugcuuccccaucaugcacgacagaaccaagaucagacagcugcccaaccugcugagaggcuacgagaacaucagacugagcacccagaacgugaucgacgccgagaaggcccccggcggccccuacagacugggcaccagcggcagcugccccaacgccaccagcaagagcggcuucuucgccaccauggccugggccgugcccaaggacaacuacaagaacgccaccaacccccugaccguggaggugcccuacaucugcaccgagggcgaggaccagaucaccguguggggcuuccacagcgacaacaagacccagaugaagaaccuguacggcgacagcaacccccagaaguucaccagcagcgccaacggcgugaccacccacuacgugagccagaucggcggcuuccccgaccagaccgaggacggcggccugccccagagcggcagaaucgugguggacuacaugaugcagaagcccggcaagaccggcaccaucguguaccagagaggcgugcugcugccccagaagguguggugcgccagcggcagaagcaaggugaucaagggcagccugccccugaucggcgaggccgacugccugcacgagaaguacggcggccugaacaagagcaagcccuacuacaccggcgagcacgccaaggccaucggcaacugccccaucugggugaagaccccccugaagcuggccaacggcaccaaguacagaccccccgccaagcugcugaaggagagaggcuucuucggcgccaucgccggcuuccuggagggcggcugggagggcaugaucgccggcuggcacggcuacaccagccacggcgcccacggcguggccguggccgccgaccugaagagcacccaggaggccaucaacaagaucaccaagaaccugaacagccugagcgagcuggaggugaagaaccugcagagacugagcggcgccauggacgagcugcacaacgagauccuggagcuggacgagaagguggacgaccugagagccgacaccaucagcagccagaucgagcuggccgugcugcugagcaacgagggcaucaucaacagcgaggacgagcaccugcuggcccuggagagaaagcugaagaagaugcugggccccagcgccguggacaucggcaacggcugcuucgagaccaagcacaagugcaaccagaccugccuggacagaaucgccgccggcaccuucaacgccggcgaguucagccugcccaccuucgacagccugaacaucaccgccgccagccugaacgacgacggccuggacaaccacaccauccugcuguacuacagcaccgccgccagcagccuggccgugacccugaugcuggccaucuucaucguguacauggugagcagagacaacgugagcugcagcaucugccuguga

SEQ ID NO: 187986 - RNA, 1755 nt, Artificial Sequence; identical to SEQ ID NO: 187084
  derived and/or modified CDS sequence (opt4) from hemagglutinin__InfluenzaB__AHL91926

SEQ ID NO: 187987 - RNA, 1755 nt, Artificial Sequence; identical to SEQ ID NO: 187659
  derived and/or modified CDS sequence (opt4) from hemagglutinin__InfluenzaB__AHL91937

SEQ ID NO: 187988 - RNA, 1755 nt, Artificial Sequence; identical to SEQ ID NO: 186486
  derived and/or modified CDS sequence (opt4) from hemagglutinin__InfluenzaB__AHL91948

SEQ ID NO: 187989 - RNA, 1758 nt, Artificial Sequence
  derived and/or modified CDS sequence (opt4) from hemagglutinin__InfluenzaB__AHL91959
augaaggccaucaucgugcugcugaugguggugaccagcaacgccgacagaaucugcaccggcaucaccagcagcaacagcccccacguggugaagaccgccacccagggcgaggugaacgugaccggcgugaucccccugaccaccacccccaccaagagccacuucgccaaccugaagggcaccaagaccagaggcaagcugugccccaagugccugaacugcaccgaccuggacguggcccugggcagacccaagugcaccggcaacauccccagcgccgaggugagcauccugcacgaggugagacccgugaccagcggcugcuuccccaucaugcacgacagaaccaagaucagacagcugcccaaccugcugagaggcuacgagcacaucagacugagcacccacaacgugaucaacgccgagaaggcccccggcggccccuacaagaucggcaccagcggcagcugccccaacgugaccaacggcaacggcuucuucgccaccauggccugggccgugcccaagaacgacaacaacaagaccgccaccaacagccugaccaucgaggugcccuacaucugcaccgagggcgaggaccagaucaccaucuggggcuuccacagcgacaacgagacccagauggccaagcuguacggcgacagcaagccccagaaguucaccagcagcgccaacggcgugaccacccacuacgugagccagaucggcggcuuccccaaccagaccgaggacggcggccugccccagagcggcagaaucgugguggacuacauggugcagaagagcggcaagaccggcaccaucaccuaccagagaggcauccugcugccccagaagguguggugcgccagcggcagaagcaaggugaucaagggcagccugccccugaucggcgaggccgacugccugcacgagaaguacggcggccugaacaagagcaagcccuacuacaccggcgagcacgccaaggccaucggcaacugccccaucugggugaagaccccccugaagcuggccaacggcaccaaguacagaccccccgccaagcugcugaaggagagaggcuucuucggcgccaucgccggcuuccuggagggcggcugggagggcaugaucgccggcuggcacggcuacaccagccacggcgcccacggcguggccguggccgccgaccugaagagcacccaggaggccaucaacaagaucaccaagaaccugaacagccugagcgagcuggaggugaagaaccugcagagacugagcggcgccauggacgagcugcacaacgagauccuggagcuggacgagaagguggacgaccugagagccgacaccaucagcagccagaucgagcuggccgugcugcugagcaacgagggcaucaucaacagcgaggacgagcaccugcuggcccuggagagaaagcugaagaagaugcugggccccagcgccguggagaucggcaacggcugcuucgagaccaagcacaagugcaaccagaccugccuggacagaaucgccgccggcaccuucgacgccggcgaguucagccugcccaccuucgacagccugaacaucaccgccgccagcuucaacgacgacggccuggacaaccacaccauccugcuguacuacagcaccgccgccagcagccuggccgugacccugaugaucgccaucuucgugguguacauggugagcagagacaacgugagcugcagcaucugccuguga

SEQ ID NO: 187990 - RNA, 1758 nt, Artificial Sequence; identical to SEQ ID NO: 186698
  derived and/or modified CDS sequence (opt4) from hemagglutinin__InfluenzaB__AHL91970

SEQ ID NO: 187991 - RNA, 1755 nt, Artificial Sequence
  derived and/or modified CDS sequence (opt4) from hemagglutinin__InfluenzaB__AHL91991
augaaggccaucaucgugcugcugaugguggugaccagcaacgccgacagaaucugcaccggcaucaccagcagcaacagcccccacguggugaagaccgccacccagggcgaggugaacgugaccggcgugaucccccugaccaccacccccaccaagagcuacuucgccaaccugaagggcaccagaaccagaggcaagcugugccccgacugccugaacugcaccgaccuggacguggcccugggcagacccaugugcgugggcaccacccccagcgccaaggccagcauccugcacgaggugagacccgugaccagcggcugcuuccccaucaugcacgacagaaccaagaucagacagcuggccaaccugcugagaggcuacgagaacaucagacugagcacccagaacgugaucgacgccgagaaggcccccggcggccccuacagacugggcaccagcggcagcugccccaacgccaccaacaagagcggcuucuucgccaccauggccugggccgugcccaaggacaacaacaagaacgccaccaacccccugaccguggaggugcccuacaucugcaccgagggcgaggaccagaucaccguguggggcuuccacagcgacaacaagacccagaugaagaaccuguacggcgacagcaacccccagaaguucaccagcagcgccaacggcgugaccacccacuacgugagccagaucggcggcuuccccgaccagaccgaggacggcggccugccccagagcggcagaaucgugguggacuacaugaugcagaagcccggcaagaccggcaccaucguguaccagagaggcgugcugcugccccagaagguguggugcgccagcggcagaagcaaggugaucaagggcagccugccccugaucggcgaggccgacugccugcacgagaaguacggcggccugaacaagagcaagcccuacuacaccggcgagcacgccaaggccaucggcaacugccccaucugggugaagaccccccugaagcuggccaacggcaccaaguacagaccccccgccaagcugcugaaggagagaggcuucuucggcgccaucgccggcuuccuggagggcggcugggagggcaugaucgccggcuggcacggcuacaccagccacggcgcccacggcguggccguggccgccgaccugaagagcacccaggaggccaucaacaagaucaccaagaaccugaacagccugagcgagcuggaggugaagaaccugcagagacugagcggcgccauggacgagcugcacaacgagauccuggagcuggacgagaagguggacgaccugagagccgacaccaucagcagccagaucgagcuggccgugcugcugagcaacgagggcaucaucaacagcgaggacgagcaccugcuggcccuggagagaaagcugaagaagaugcugggccccagcgccguggacaucggcaacggcugcuucgagaccaagcacaagugcaaccagaccugccuggacagaaucgccgccggcaccuucaacgccggcgaguucagccugcccaccuucgacagccugaacaucaccgccgccagccugaacgacgacggccuggacaaccacaccauccugcuguacuacagcaccgccgccagcagccuggccgugacccugaugcuggccaucuucaucguguacauggugagcagagacaacgugagcugcagcaucugccuguga

SEQ ID NO: 187992 - RNA, 1758 nt, Artificial Sequence; identical to SEQ ID NO: 186574
  derived and/or modified CDS sequence (opt4) from hemagglutinin__InfluenzaB__AHL92002

SEQ ID NO: 187993 - RNA, 1758 nt, Artificial Sequence; identical to SEQ ID NO: 186574
  derived and/or modified CDS sequence (opt4) from hemagglutinin__InfluenzaB__AHL92013

SEQ ID NO: 187994 - RNA, 1758 nt, Artificial Sequence; identical to SEQ ID NO: 186574
  derived and/or modified CDS sequence (opt4) from hemagglutinin__InfluenzaB__AHL92024

SEQ ID NO: 187995 - RNA, 1758 nt, Artificial Sequence; identical to SEQ ID NO: 186574
  derived and/or modified CDS sequence (opt4) from hemagglutinin__InfluenzaB__AHL92035

SEQ ID NO: 187996 - RNA, 1758 nt, Artificial Sequence; identical to SEQ ID NO: 186574
  derived and/or modified CDS sequence (opt4) from hemagglutinin__InfluenzaB__AHL92046

SEQ ID NO: 187997 - RNA, 1758 nt, Artificial Sequence; identical to SEQ ID NO: 186574
  derived and/or modified CDS sequence (opt4) from hemagglutinin__InfluenzaB__AHL92057

SEQ ID NO: 187998 - RNA, 1758 nt, Artificial Sequence
  derived and/or modified CDS sequence (opt4) from hemagglutinin__InfluenzaB__AHL92068
augaaggccaucaucgugcugcugaugguggugaccagcaacgccgacagaaucugcaccggcaucaccagcagcaacagcccccacguggugaagaccgccacccagggcgaggugaacgugaccggcgugaucccccugaccaccacccccaccaagagccacuucgccaaccugaagggcaccgagaccagaggcaagcugugccccaagugccugaacugcaccgaccuggacguggcccugggcagacccaagugcaccggcaacauccccagcgccagagugagcauccugcacgaggugagacccgugaccagcggcugcuuccccaucaugcacgacagaaccaagaucagacagcugcccaaccugcugagaggcuacgagcacaucagacugagcacccacaacgugaucaacgccgagaacgcccccggcggccccuacaagaucggcaccagcggcagcugccccaacaucaccaacggcaacggcuucuucgccaccauggccugggccgugcccaagaacgacaacaacaagaccgccaccaacagccugaccaucgaggugcccuacaucugcaccgagggcgaggaccagaucaccguguggggcuuccacagcgacaacgagacccagauggccaagcuguacggcgacagcaagccccagaaguucaccagcagcgccaacggcgugaccacccacuacgugagccaggugggcggcuuccccaaccagaccgaggacggcggccugccccagagcggcagaaucgugguggacuacauggugcagaagagcggcaagaccggcaccaucaccuaccagagaggcauccugcugccccagaagguguggugcgccagcggcagaagcaaggugaucaagggcagccugccccugaucggcgaggccgacugccugcacgagaaguacggcggccugaacaagagcaagcccuacuacaccggcgagcacgccaaggccaucggcaacugccccaucugggugaagaccccccugaagcuggccaacggcaccaaguacagaccccccgccaagcugcugaaggagagaggcuucuucggcgccaucgccggcuuccuggagggcggcugggagggcaugaucgccggcuggcacggcuacaccagccacggcgcccacggcguggccguggccgccgaccugaagagcacccaggaggccaucaacaagaucaccaagaaccugaacagccugagcgagcuggaggugaagaaccugcagagacugagcggcgccauggacgagcugcacaacgagauccuggagcuggacgagaagguggacgaccugagagccgacaccaucagcagccagaucgagcuggccgugcugcugagcaacgagggcaucaucaacagcgaggacgagcaccugcuggcccuggagagaaagcugaagaagaugcugggccccagcgccguggagaucggcaacggcugcuucgagaccaagcacaagugcaaccagaccugccuggacagaaucgccgccggcaccuucgacgccggcgaguucagccugcccaccuucgacagccugaacaucaccgccgccagccugaacgacgacggccuggacaaccacaccauccugcuguacuacagcaccgccgccagcagccuggccgugacccugaugaucgccaucuucgugguguacauggugagcagagacaacgugagcugcagcaucugccuguga

SEQ ID NO: 187999 - RNA, 1758 nt, Artificial Sequence
  derived and/or modified CDS sequence (opt4) from hemagglutinin__InfluenzaB__AHL92079
augaaggccaucaucgugcugcugaugguggugaccagcaacgccgacagaaucugcaccggcaucaccagcagcaacagcccccacguggugaagaccgccacccagggcgaggugaacgugaccggcgugaucccccugaccaccacccccaccaagagccacuucgccaaccugaagggcaccgagaccagaggcaagcugugccccaagugccugaacugcaccgaccuggacguggcccugggcagacccaagugcaccggcaacauccccagcgccagagugagcauccugcacgaggugagacccgugaccagcggcugcuuccccaucaugcacgacagaaccaagaucagacagcugcccaaccugcugagaggcuacgagcacaucagacugagcacccacaacgugaucaacgccgagaacgcccccggcggccccuacaagaucggcaccagcggcagcugccccaacaucaccaacggcaacggcuucuucgccaccauggccugggccgugcccaagaacgacaacaacaagaccgccaccaacagccugaccaucgaggugcccuacaucugcaccgagggcgaggaccagaucaccguguggggcuuccacagcgacaacgagacccagauggccaagcuguacggcgacagcaagccccagaaguucaccagcagcgccaacggcgugaccacccacuacgugagccagaucggcggcuuccccaaccagaccgaggacggcggccugccccagagcggcagaaucgugguggacuacauggugcagaagagcggcaagaccggcaccaucaccuaccagagaggcauccugcugccccagaagguguggugcgccagcggcagaagcaaggugaucaagggcagccugccccugaucggcgaggccgacugccugcacgagaaguacggcggccugaacaagagcaagcccuacuacaccggcgagcacgccaaggccaucggcaacugccccaucugggugaagaccccccugaagcuggccaacggcaccaaguacagaccccccgccaagcugcugaaggagagaggcuucuucggcgccaucgccggcuuccuggagggcggcugggagggcaugaucgccggcuggcacggcuacaccagccacggcgcccacggcguggccguggccgccgaccugaagagcacccaggaggccaucaacaagaucaccaagaaccugaacagccugagcgagcuggaggugaagaaccugcagagacugagcggcgccauggacgagcugcacaacgagauccuggagcuggacgagaagguggacgaccugagagccgacaccaucagcagccagaucgagcuggccgugcugcugagcaacgagggcaucaucaacagcgaggacgagcaccugcuggcccuggagagaaagcugaagaagaugcugggccccagcgccguggagaucggcaacggcugcuucgagaccaagcacaagugcaaccagaccugccuggacagaaucgccgccggcaccuucgacgccggcgaguucagccugcccaccuucgacagccugaacaucaccgccgccagccugaacgacgacggccuggacaaccacaccauccugcuguacuacagcaccgccgccagcagccuggccgugacccugaugaucgccaucuucgugguguacauggugagcagagacaacgugagcugcagcaucugccuguga

SEQ ID NO: 188000 - RNA, 1758 nt, Artificial Sequence; identical to SEQ ID NO: 187999
  derived and/or modified CDS sequence (opt4) from hemagglutinin__InfluenzaB__AHL92090

SEQ ID NO: 188001 - RNA, 1758 nt, Artificial Sequence; identical to SEQ ID NO: 186574
  derived and/or modified CDS sequence (opt4) from hemagglutinin__InfluenzaB__AHL92101

SEQ ID NO: 188002 - RNA, 1755 nt, Artificial Sequence; identical to SEQ ID NO: 186627
  derived and/or modified CDS sequence (opt4) from hemagglutinin__InfluenzaB__AHL92112

SEQ ID NO: 188003 - RNA, 1758 nt, Artificial Sequence; identical to SEQ ID NO: 186574
  derived and/or modified CDS sequence (opt4) from hemagglutinin__InfluenzaB__AHL92123

SEQ ID NO: 188004 - RNA, 1758 nt, Artificial Sequence; identical to SEQ ID NO: 187999
  derived and/or modified CDS sequence (opt4) from hemagglutinin__InfluenzaB__AHL92134

SEQ ID NO: 188005 - RNA, 1758 nt, Artificial Sequence; identical to SEQ ID NO: 187999
  derived and/or modified CDS sequence (opt4) from hemagglutinin__InfluenzaB__AHL92145

SEQ ID NO: 188006 - RNA, 1758 nt, Artificial Sequence; identical to SEQ ID NO: 186574
  derived and/or modified CDS sequence (opt4) from hemagglutinin__InfluenzaB__AHL92156

SEQ ID NO: 188007 - RNA, 1758 nt, Artificial Sequence; identical to SEQ ID NO: 187999
  derived and/or modified CDS sequence (opt4) from hemagglutinin__InfluenzaB__AHL92167

SEQ ID NO: 188008 - RNA, 1758 nt, Artificial Sequence; identical to SEQ ID NO: 186574
  derived and/or modified CDS sequence (opt4) from hemagglutinin__InfluenzaB__AHL92178

SEQ ID NO: 188009 - RNA, 1758 nt, Artificial Sequence; identical to SEQ ID NO: 186574
  derived and/or modified CDS sequence (opt4) from hemagglutinin__InfluenzaB__AHL92189

SEQ ID NO: 188010 - RNA, 1755 nt, Artificial Sequence; identical to SEQ ID NO: 186627
  derived and/or modified CDS sequence (opt4) from hemagglutinin__InfluenzaB__AHL92200

SEQ ID NO: 188011 - RNA, 1758 nt, Artificial Sequence; identical to SEQ ID NO: 186574
  derived and/or modified CDS sequence (opt4) from hemagglutinin__InfluenzaB__AHL92211

SEQ ID NO: 188012 - RNA, 1758 nt, Artificial Sequence; identical to SEQ ID NO: 186574
  derived and/or modified CDS sequence (opt4) from hemagglutinin__InfluenzaB__AHL92222

SEQ ID NO: 188013 - RNA, 1755 nt, Artificial Sequence; identical to SEQ ID NO: 187889
  derived and/or modified CDS sequence (opt4) from hemagglutinin__InfluenzaB__AHL92233

SEQ ID NO: 188014 - RNA, 1758 nt, Artificial Sequence; identical to SEQ ID NO: 187999
  derived and/or modified CDS sequence (opt4) from hemagglutinin__InfluenzaB__AHL92244

SEQ ID NO: 188015 - RNA, 1758 nt, Artificial Sequence; identical to SEQ ID NO: 186574
  derived and/or modified CDS sequence (opt4) from hemagglutinin__InfluenzaB__AHL92255

SEQ ID NO: 188016 - RNA, 1758 nt, Artificial Sequence; identical to SEQ ID NO: 186574
  derived and/or modified CDS sequence (opt4) from hemagglutinin__InfluenzaB__AHL92266

SEQ ID NO: 188017 - RNA, 1758 nt, Artificial Sequence
  derived and/or modified CDS sequence (opt4) from hemagglutinin__InfluenzaB__AHL92277
augaaggccaucaucgugcugcugaugguggugaccagcaacgccgacagaaucugcaccggcaucaccagcagcaacagcccccacguggugaagaccgccacccagggcgaggugaacgugaccggcgugaucccccugaccaccacccccaccaagagccacuucgccaaccugaagggcaccgagaccagaggcaagcugugccccaagugccugaacugcaccgaccuggacguggcccugggcagacccaagugcaccggcaacauccccagcgccagagugagcauccugcacgaggugagacccgugaccagcggcugcuuccccaucaugcacgacagaaccaagaucagacagcugcccaaccugcugagaggcuacgagcacaucagacugagcacccacaacgugaucaacgccgagaacgcccccggcggccccuacaagaucggcaccagcggcagcugccccaacgugaccaacggcaacggcuucuucgccaccauggccugggccgugcccaagaacgacaacaacaagaccgccaccaacagccugaccaucgaggugcccuacaucugcaccgagggcgaggaccagaucaccguguggggcuuccacagcgacaacgagacccagauggccaagcuguacggcgacagcaagccccagaaguucaccagcagcgccaacggcgugaccacccacuacgugagccagaucggcggcuuccccaaccagaccgaggacggcggccugccccagagcggcagaaucgugguggacuacauggugcagaagagcggcaagaccggcaccaucaccuaccagagaggcauccugcugccccagaagguguggugcgccagcggcagaagcaaggugaucaagggcagccugccccugaucggcgaggccgacugccugcacgagaaguacggcggccugaacaagagcaagcccuacuacaccggcgagcacgccaaggccaucggcaacugccccaucugggugaagaccccccugaagcuggccaacggcaccaaguacagaccccccgccaagcugcugaaggagagaggcuucuucggcgccaucgccggcuuccuggagggcggcugggagggcaugaucgccggcuggcacggcuacaccagccacggcgcccacggcguggccguggccgccgaccugaagagcacccaggaggccaucaacaagaucaccaagaaccugaacagccugagcgagcuggaggugaagaaccugcagagacugagcggcgccauggacgagcugcacaacgagauccuggagcuggacgagaagguggacgaccugagagccgacaccaucagcagccagaucgagcuggccgugcugcugagcaacgagggcaucaucaacagcgaggacgagcaccugcuggcccuggagagaaagcugaagaagaugcugggccccagcgccguggagaucggcaacggcugcuucgagaccaagcacaagugcaaccagaccugccuggacagaaucgccaccggcaccuucgacgccggcgaguucagccugcccaccuucgacagccugaacaucaccgccgccagccugaacgacgacggccuggacaaccacaccauccugcuguacuacagcaccgccgccagcagccuggccgugacccugaugaucgccaucuucgugguguacauggugagcagagacaacgugagcugcagcaucugccuguga

SEQ ID NO: 188018 - RNA, 1758 nt, Artificial Sequence; identical to SEQ ID NO: 186574
  derived and/or modified CDS sequence (opt4) from hemagglutinin__InfluenzaB__AHL92288

SEQ ID NO: 188019 - RNA, 1758 nt, Artificial Sequence; identical to SEQ ID NO: 186574
  derived and/or modified CDS sequence (opt4) from hemagglutinin__InfluenzaB__AHL92299

SEQ ID NO: 188020 - RNA, 1755 nt, Artificial Sequence; identical to SEQ ID NO: 187692
  derived and/or modified CDS sequence (opt4) from hemagglutinin__InfluenzaB__AHL92310

SEQ ID NO: 188021 - RNA, 1755 nt, Artificial Sequence; identical to SEQ ID NO: 186627
  derived and/or modified CDS sequence (opt4) from hemagglutinin__InfluenzaB__AHL92321

SEQ ID NO: 188022 - RNA, 1755 nt, Artificial Sequence; identical to SEQ ID NO: 186627
  derived and/or modified CDS sequence (opt4) from hemagglutinin__InfluenzaB__AHL92332

SEQ ID NO: 188023 - RNA, 1755 nt, Artificial Sequence
  derived and/or modified CDS sequence (opt4) from hemagglutinin__InfluenzaB__AHL92354
augaaggccaucaucgugcugcugaugguggugaccagcaacgccgacagaaucugcaccggcaucaccagcagcaacagcccccacguggugaagaccgccacccagggcgaggugaacgugaccggcgugaucccccugaccaccacccccaccaagagcuacuucgccaaccugaagggcaccagaaccagaggcaagcugugccccgacugccugaacugcaccgaccuggacguggcccugggcagacccaugugcgugggcaucacccccagcgccaaggccagcauccugcacgaggugagacccgugaccagcggcugcuuccccaucaugcacgacagaaccaagaucagacagcuggccaaccugcugagaggcuacgagaacaucagacugagcacccagaacgugguggacgccgagaaggcccccggcggccccuacagacugggcaccagcggcagcugccccaacgccaccagcaagagcggcuucuucgccaccauggccugggccgugcccaaggacaacaacaagaacgccaccaacccccugaccguggaggugcccuacaucugcaccgagggcgaggaccagaucaccguguggggcuuccacagcgacaacaagacccagaugaagaaccuguacggcgacagcaacccccagaaguucaccagcagcgccaacggcgugaccacccacuacgugagccagaucggcggcuuccccgaccagaccgaggacggcggccugccccagagcggcagaaucgugguggacuacaugaugcagaagcccggcaagaccggcaccaucguguaccagagaggcgugcugcugccccagaagguguggugcgccagcggcagaagcaaggugaucaagggcagccugccccugaucggcgaggccgacugccugcacgagaaguacggcggccugaacaagagcaagcccuacuacaccggcgagcacgccaaggccaucggcaacugccccaucugggugaagaccccccugaagcuggccaacggcaccaaguacagaccccccgccaagcugcugaaggagagaggcuucuucggcgccaucgccggcuuccuggagggcggcugggagggcaugaucgccggcuggcacggcuacaccagccacggcgcccacggcguggccguggccgccgaccugaagagcacccaggaggccaucaacaagaucaccaagaaccugaacagccugagcgagcuggaggugaagaaccugcagagacugagcggcgccauggacgagcugcacaacgagauccuggagcuggacgagaagguggacgaccugagagccgacaccaucagcagccagaucgagcuggccgugcugcugagcaacgagggcaucaucaacagcgaggacgagcaccugcuggcccuggagagaaagcugaagaagaugcugggccccagcgccguggacaucggcaacggcugcuucgagaccaagcacaagugcaaccagaccugccuggacagaaucgccgccggcaccuucaacgccggcgaguucagccugcccaccuucgacagccugaacaucaccgccgccagccugaacgacgacggccuggacaaccacaccauccugcuguacuacagcaccgccgccagcagccuggccgugacccugaugcuggccaucuucaucguguacauggugagcagagacaacgugagcugcagcaucugccuguga

SEQ ID NO: 188024 - RNA, 1755 nt, Artificial Sequence; identical to SEQ ID NO: 188023
  derived and/or modified CDS sequence (opt4) from hemagglutinin__InfluenzaB__AHL92365

SEQ ID NO: 188025 - RNA, 1755 nt, Artificial Sequence; identical to SEQ ID NO: 186880
  derived and/or modified CDS sequence (opt4) from hemagglutinin__InfluenzaB__AHL92376

SEQ ID NO: 188026 - RNA, 1755 nt, Artificial Sequence; identical to SEQ ID NO: 186880
  derived and/or modified CDS sequence (opt4) from hemagglutinin__InfluenzaB__AHL92387

SEQ ID NO: 188027 - RNA, 1755 nt, Artificial Sequence; identical to SEQ ID NO: 186880
  derived and/or modified CDS sequence (opt4) from hemagglutinin__InfluenzaB__AHL92398

SEQ ID NO: 188028 - RNA, 1755 nt, Artificial Sequence; identical to SEQ ID NO: 186880
  derived and/or modified CDS sequence (opt4) from hemagglutinin__InfluenzaB__AHL92409

SEQ ID NO: 188029 - RNA, 1755 nt, Artificial Sequence; identical to SEQ ID NO: 186880
  derived and/or modified CDS sequence (opt4) from hemagglutinin__InfluenzaB__AHL92420

SEQ ID NO: 188030 - RNA, 1755 nt, Artificial Sequence; identical to SEQ ID NO: 186627
  derived and/or modified CDS sequence (opt4) from hemagglutinin__InfluenzaB__AHL92431

SEQ ID NO: 188031 - RNA, 1755 nt, Artificial Sequence; identical to SEQ ID NO: 186880
  derived and/or modified CDS sequence (opt4) from hemagglutinin__InfluenzaB__AHL92442

SEQ ID NO: 188032 - RNA, 1755 nt, Artificial Sequence; identical to SEQ ID NO: 186880
  derived and/or modified CDS sequence (opt4) from hemagglutinin__InfluenzaB__AHL92453

SEQ ID NO: 188033 - RNA, 1755 nt, Artificial Sequence; identical to SEQ ID NO: 186880
  derived and/or modified CDS sequence (opt4) from hemagglutinin__InfluenzaB__AHL92464

SEQ ID NO: 188034 - RNA, 1755 nt, Artificial Sequence
  derived and/or modified CDS sequence (opt4) from hemagglutinin__InfluenzaB__AHL92475
augaaggccaucaucgugcugcugaugguggugaccagcaacgccgacagaaucugcaccggcaucaccagcagcaacagcccccacguggugaagaccgccacccagggcgaggugaacgugaccggcgugaucccccugaccaccacccccaccaagagcuacuucgccaaccugaagggcaccagaaccagaggcaagcugugccccgacugccugaacugcaccgaccuggacguggcccugggcagacccaugugcgugggcaccacccccagcgccaaggccagcauccugcacgaggugagacccgugaccagcggcugcuuccccaucaugcacgacagaaccaagaucagacagcugcccaaccugcugagaggcuacgagaacaucagacugagcacccagaacgugaucgacgccgagaaggcccccggcggccccuacagacugggcaccagcggcagcugccccaacgccaccagcaagaucggcuucuucgccaccauggccugggccgugcccaaggacaacuacaagaacgccaccaacccccugaccguggaggugcccuacaucugcaccgagggcgaggaccagaucaccguguggggcuuccacagcgacaacaagacccagaugaagaaccuguacggcgacagcaacccccagaaguucaccagcagcgccaacggcgugaccacccacuacgugagccagaucggcgacuuccccgaccagaccgaggacggcggccugccccagagcggcagaaucgugguggacuacaugaugcagaagcccggcaagaccggcaccaucguguaccagagaggcgugcugcugccccagaagguguggugcgccagcggcagaagcaaggugaucaagggcagccugccccugaucggcgaggccgacugccugcacgagaaguacggcggccugaacaagagcaagcccuacuacaccggcgagcacgccaaggccaucggcaacugccccaucugggugaagaccccccugaagcuggccaacggcaccaaguacagaccccccgccaagcugcugaaggagagaggcuucuucggcgccaucgccggcuuccuggagggcggcugggagggcaugaucgccggcuggcacggcuacaccagccacggcgcccacggcguggccguggccgccgaccugaagagcacccaggaggccaucaacaagaucaccaagaaccugaacagccugagcgagcuggaggugaagaaccugcagagacugagcggcgccauggacgagcugcacaacgagauccuggagcuggacgagaagguggacgaccugagagccgacaccaucagcagccagaucgagcuggccgugcugcugagcaacgagggcaucaucaacagcgaggacgagcaccugcuggcccuggagagaaagcugaagaagaugcugggccccagcgccguggacaucggcaacggcugcuucgagaccaagcacaagugcaaccaggccugccuggacagaaucgccgccggcaccuucaacgccggcgaguucagccugcccaccuucgacagccugaacaucaccgccgccagccugaacgacgacggccuggacaaccacaccauccugcuguacuacagcaccgccgccagcagccuggccgugacccugaugcuggccaucuucaucguguacauggugagcagagacaacgugagcugcagcaucugccuguga

SEQ ID NO: 188035 - RNA, 1755 nt, Artificial Sequence; identical to SEQ ID NO: 186627
  derived and/or modified CDS sequence (opt4) from hemagglutinin__InfluenzaB__AHL92486

SEQ ID NO: 188036 - RNA, 1755 nt, Artificial Sequence; identical to SEQ ID NO: 186880
  derived and/or modified CDS sequence (opt4) from hemagglutinin__InfluenzaB__AHL92497

SEQ ID NO: 188037 - RNA, 1755 nt, Artificial Sequence; identical to SEQ ID NO: 186880
  derived and/or modified CDS sequence (opt4) from hemagglutinin__InfluenzaB__AHL92508

SEQ ID NO: 188038 - RNA, 1755 nt, Artificial Sequence; identical to SEQ ID NO: 186880
  derived and/or modified CDS sequence (opt4) from hemagglutinin__InfluenzaB__AHL92519

SEQ ID NO: 188039 - RNA, 1755 nt, Artificial Sequence; identical to SEQ ID NO: 186880
  derived and/or modified CDS sequence (opt4) from hemagglutinin__InfluenzaB__AHL92530

SEQ ID NO: 188040 - RNA, 1755 nt, Artificial Sequence; identical to SEQ ID NO: 186627
  derived and/or modified CDS sequence (opt4) from hemagglutinin__InfluenzaB__AHL92541

SEQ ID NO: 188041 - RNA, 1752 nt, Artificial Sequence
  derived and/or modified CDS sequence (opt4) from hemagglutinin__InfluenzaB__AHL92563
augaaggccaucaucgugcugcugaugguggugaccagcaacgccgacagaaucugcaccggcaucaccagcagcaacagcccccacguggugaagaccgccacccagggcgaggugaacgugaccggcgugaucccccugaccaccacccccaagaagagcuacuucgccaaccugaagggcaccagaaccagaggcaagcugugccccgacugccugaacugcaccgaccuggacguggcccugggcagacccaugugcgugggcaccacccccagcgccaaggccagcauccugcacgaggugagacccgugaccagcggcugcuuccccaucaugcacgacagaaccaagaucagacagcugcccaaccugcugagaggcuacgagaacaucagacugagcacccagaacgugaucgacgccgagaaggcccccggcggccccuacagacugggcaccagcggcagcugccccaacgccaccagcaagaucggcuucuucgccaccauggccugggccgugcccaaggacaacuacaagaacgccaccaacccccugaccguggaggugcccuacaucugcaccgagggcgaggaccagaucaccguguggggcuuccacagcgacaacaagacccagaugaagaaccuguacggcgacagcaacccccagaaguucaccagcagcgccaacggcgugaccacccacuacgugagccagaucggcgacuuccccgaccagaccgaggacggcggccugccccagagcggcagaaucgugguggacuacaugaugcagaagcccggcaagaccggcaccaucguguaccagagaggcgugcugcugccccagaagguguggugcgccagcggcagaagcaaggugaucaagggcagccugccccugaucggcgaggccgacugccugcacgagaaguacggcggccugaacaagagcaagcccuacuacaccggcgagcacgccaaggccaucggcaacugccccaucugggugaagaccccccugaagcuggccaacggcaccaaguacagaccccccgccaagcugcugaaggagagaggcuucuucggcgccaucgccggcuuccuggagggcggcugggagggcaugaucgccggcuggcacggcuacaccagccacggcgcccacggcguggccguggccgccgaccugaagagcacccaggaggccaucaacaagaucaccaagaaccugaacagccugagcgagcuggaggugaagaaccugcagagacugagcggcgccauggacgagcugcacaacgagauccuggagcuggacgagaagguggacgaccugagagccgacaccaucagcagccagaucgagcuggccgugcugcugagcaacgagggcaucaucaacagcgaggacgagcaccugcuggcccuggagagaaagcugaagaagaugcugggccccagcgccguggacaucggcaacggcugcuucgagaccaagcacaagugcaaccagaccugccuggacagaaucgccgccggcaccuucaacgccggcgaguucagccugcccaccuucgacagccugaacaucaccgccgccagccugaacgacggccuggacaaccacaccauccugcuguacuacagcaccgccgccagcagccuggccgugacccugaugcuggccaucuucaucguguacauggugagcagagacaacgugagcugcagcaucugccuguga

SEQ ID NO: 188042 - RNA, 1755 nt, Artificial Sequence; identical to SEQ ID NO: 186880
  derived and/or modified CDS sequence (opt4) from hemagglutinin__InfluenzaB__AHL92574

SEQ ID NO: 188043 - RNA, 1755 nt, Artificial Sequence
  derived and/or modified CDS sequence (opt4) from hemagglutinin__InfluenzaB__AHL92585
augaaggccaucaucgugcugcugaugguggugaccagcaacgccgacagaaucugcaccggcaucaccagcagcaacagcccccacguggugaagaccgccacccagggcgaggugaacgugaccggcgugaucccccugaccaccacccccaccaagagcuacuucgccaaccugaagggcaccagaaccagaggcaagcugugccccgacugccugaacugcaccgaccuggacguggcccugggcagacccaugugcgugggcgccacccccagcgccaaggccagcauccugcacgaggugagacccgugaccagcggcugcuuccccaucaugcacgacagaaccaagaucagacagcugcccaaccugcugagaggcuacgagaacaucagacugagcacccagaacgugaucgacgccgagaaggcccccggcggccccuacagacugggcaccagcggcagcugccccaacgccaccagcaagagcggcuucuucgccaccauggccugggccgugcccaaggacaacaacaagaacgccaccaacccccugaccguggaggugcccuacaucugcaccgagggcgaggaccagaucaccguguggggcuuccacagcgacaacaagacccagaugaagaaccuguacggcgacagcaacccccagaaguucaccagcagcgccaacggcgugaccacccacuacgugagccagaucggcagcuuccccgaccagaccgaggacggcggccugccccagagcggcagaaucgugguggacuacaugaugcagaagcccggcaagaccggcaccaucguguaccagagaggcgugcugcugccccagaagguguggugcgccagcggcagaagcaaggugaucaagggcagccugccccugaucggcgaggccgacugccugcacgagaaguacggcggccugaacaagagcaagcccuacuacaccggcgagcacgccaaggccaucggcaacugccccaucugggugaagaccccccugaagcuggccaacggcaccaaguacagaccccccgccaagcugcugaaggagagaggcuucuucggcgccaucgccggcuuccuggagggcggcugggagggcaugaucgccggcuggcacggcuacaccagccacggcgcccacggcguggccguggccgccgaccugaagagcacccaggaggccaucaacaagaucaccaagaaccugaacagccugagcgagcuggaggugaagaaccugcagagacugagcggcgccauggacgagcugcacaacgagauccuggagcuggacgagaagguggacgaccugagagccgacaccaucagcagccagaucgagcuggccgugcugcugagcaacgagggcaucaucaacagcgaggacgagcaccugcuggcccuggagagaaagcugaagaagaugcugggccccagcgccguggagaucggcaacggcugcuucgagaccaagcacaagugcaaccagaccugccuggacagaaucgccgccggcaccuucaacgccggcgaguucagccugcccaccuucgacagccugaacaucaccgccgccagccugaacgacgacggccuggacaaccacaccauccugcuguacuacagcaccgccgccagcagccuggccgugacccugaugcuggccaucuucaucguguacauggugagcagagacaacgugagcugcagcaucugccuguga

SEQ ID NO: 188044 - RNA, 1755 nt, Artificial Sequence; identical to SEQ ID NO: 186880
  derived and/or modified CDS sequence (opt4) from hemagglutinin__InfluenzaB__AHL92596

SEQ ID NO: 188045 - RNA, 1755 nt, Artificial Sequence; identical to SEQ ID NO: 186627
  derived and/or modified CDS sequence (opt4) from hemagglutinin__InfluenzaB__AHL92607

SEQ ID NO: 188046 - RNA, 1755 nt, Artificial Sequence
  derived and/or modified CDS sequence (opt4) from hemagglutinin__InfluenzaB__AHL92629
augaaggccaucaucgugcugcugaugguggugaccagcaacgccgacagaaucugcaccggcaucaccagcagcaacagcccccacguggugaagaccgccacccagggcgaggugaacgugaccggcgugaucccccugaccaccacccccgagaagagcuacuucgccaaccugaagggcaccagaaccagaggcaagcugugccccgacugccugaacugcaccgaccuggacguggcccugggcagacccaugugcgugggcaccacccccagcgccaaggccagcauccugcacgaggugagacccgugaccagcggcugcuuccccaucaugcacgacagaaccaagaucagacagcugcccaaccugcugagaggcuacgagaacaucagacugagcacccagaacgugaucgacgccgagaaggcccccggcggccccuacagacugggcaccagcggcagcugccccaacgccaccagcaagaucggcuucuucgccaccauggccugggccgugcccaaggacaacuacaagaacgccaccaacccccugaccguggaggugcccuacaucugcaccgagggcgaggaccagaucaccguguggggcuuccacagcgacaacaagacccagaugaagaaccuguacggcgacagcaacccccagaaguucaccagcagcgccaacggcgugaccacccacuacgugagccagaucggcgacuuccccgaccagaccgaggacggcggccugccccagagcggcagaaucgugguggacuacaugaugcagaagcccggcaagaccggcaccaucguguaccagagaggcgugcugcugccccagaagguguggugcgccagcggcagaagcaaggugaucaagggcagccugccccugaucggcgaggccgacugccugcacgagaaguacggcggccugaacaagagcaagcccuacuacaccggcgagcacgccaaggccaucggcaacugccccaucugggugaagaccccccugaagcuggccaacggcaccaaguacagaccccccgccaagcugcugaaggagagaggcuucuucggcgccaucgccggcuuccuggagggcggcugggagggcaugaucgccggcuggcacggcuacaccagccacggcgcccacggcguggccguggccgccgaccugaagagcacccaggaggccaucaacaagaucaccaagaaccugaacagccugagcgagcuggaggugaagaaccugcagagacugagcggcgccauggacgagcugcacaacgagauccuggagcuggacgagaagguggacgaccugagagccgacaccaucagcagccagaucgagcuggccgugcugcugagcaacgagggcaucaucaacagcgaggacgagcaccugcuggcccuggagagaaagcugaagaagaugcugggccccagcgccguggacaucggcaacggcugcuucgagaccaagcacaagugcaaccagaccugccuggacagaaucgccgccggcaccuucaacgccggcgaguucagccugcccaccuucgacagccugaacaucaccgccgccagccugaacgacgacggccuggacaaccacaccauccugcuguacuacagcaccgccgccagcagccuggccgugacccugaugcuggccaucuucaucguguacauggugagcagagacaacgugagcugcagcaucugccuguga

SEQ ID NO: 188047 - RNA, 1755 nt, Artificial Sequence; identical to SEQ ID NO: 186627
  derived and/or modified CDS sequence (opt4) from hemagglutinin__InfluenzaB__AHL92640

SEQ ID NO: 188048 - RNA, 1755 nt, Artificial Sequence; identical to SEQ ID NO: 186627
  derived and/or modified CDS sequence (opt4) from hemagglutinin__InfluenzaB__AHL92651

SEQ ID NO: 188049 - RNA, 1755 nt, Artificial Sequence
  derived and/or modified CDS sequence (opt4) from hemagglutinin__InfluenzaB__AHL92684
augaaggccaucaucgugcugcugaugguggugaccagcaacgccgacagaaucugcaccggcaucaccagcagcaacagcccccacguggugaagaccgccacccagggcgaggugaacgugaccggcgugaucccccugaccaccacccccaccaagagcuacuucgccaaccugaagggcaccagaaccagaggcaagcugugccccgacugccugaacugcaccgaccuggacguggcccugggcagacccaugugcgugggcaccacccccagcgccaaggccagcauccugcacgaggugagacccgugaccagcggcugcuuccccaucaugcacgacagaaccaagaucagacagcugcccaaccugcugagaggcuacgagaacaucagacugagcacccagaacgugaucgacgccgagaaggcccccggcggccccuacagacugggcaccagcggcagcugccccaacgccaccagcaagagcggcuucuucgccaccauggccugggccgugcccaaggacaacaacaagaacgccaccaacccccugaccguggaggugcccuacaucugcaccgagggcgaggaccagaucaccguguggggcuuccacagcgacaacaagacccagaugaagaaccuguacggcgacagcaacccccagaaguucaccagcagcgccaacggcgugaccacccacuacgugagccagaucggcagcuuccccgaccagaccgaggacggcggccugccccagagcggcagaaucgugguggacuacaugaugcagaagcccggcaagaccggcaccaucguguaccagagaggcgugcugcugccccagaagguguggugcgccagcggcagaagcaaggugaucaagggcagccugccccugaucggcgaggccgacugccugcacgagaaguacggcggccugaacaagagcaagcccuacuacaccggcgagcacgccaaggccaucggcaacugccccaucugggugaagaccccccugaagcuggccaacggcaccaaguacagaccccccgccaagcugcugaaggagagaggcuucuucggcgccaucgccggcuuccuggagggcggcugggagggcaugaucgccggcuggcacggcuacaccagccacggcgcccacggcguggccguggccgccgaccugaagagcacccaggaggccaucaacaagaucaccaagaaccugaacagccugagcgagcuggaggugaagaaccugcagagacugagcggcgccauggacgagcugcacaacgagauccuggagcuggacgagaagguggacgaccugagagccgacaccaucagcagccagaucgagcuggccgugcugcugagcaacgagggcaucaucaacagcgaggacgagcaccugcuggcccuggagagaaagcugaagaagaugcugggccccagcgccguggagaucggcaacggcugcuucgagaccaagcacaagugcaaccagaccugccuggacagaaucgccgccggcaccuucaacgccggcgaguucagccugcccaccuucgacagccugaacaucaccgccgccagccugaacgacgacggccuggacaaccacaucauccugcuguacuacagcaccgccgccagcagccuggccgugacccugaugcuggccaucuucaucguguacauggugagcagagacaacgugagcugcagcaucugccuguga

SEQ ID NO: 188050 - RNA, 1755 nt, Artificial Sequence; identical to SEQ ID NO: 186880
  derived and/or modified CDS sequence (opt4) from hemagglutinin__InfluenzaB__AHL92695

SEQ ID NO: 188051 - RNA, 1755 nt, Artificial Sequence; identical to SEQ ID NO: 186880
  derived and/or modified CDS sequence (opt4) from hemagglutinin__InfluenzaB__AHL92706

SEQ ID NO: 188052 - RNA, 1755 nt, Artificial Sequence
  derived and/or modified CDS sequence (opt4) from hemagglutinin__InfluenzaB__AHL92728
augaaggccaucaucgugcugcugaugguggugaccagcaacgccgacagaaucugcaccggcaucaccagcagcaacagcccccacguggugaagaccgccacccagggcgaggugaacgugaccggcgugaucccccugaccaccacccccaccaagagcuacuucgccaaccugaagggcaccagaaccagaggcaagcugugccccgacugccugaacugcaccgaccuggacguggcccugggcagacccaugugcgugggcaccacccccagcgccaaggccagcauccugcacgaggugagacccgugaccagcggcugcuuccccaucaugcacgacagaaccaagaucagacagcugcccaaccugcugagaggcuacgagaacaucagacugagcacccagaacgugaucgacgccgagaaggcccccggcggccccuacagacugggcaccagcggcagcugccccaacgccaccagcaagaucggcuucuucgccaccauggccugggccgugcccaaggacaacuacaagaacgccaccaacccccugaccguggaggugcccuacaucugcaccgagggcgaggaccagaucaccguguggggcuuccacagcgacaacaagacccagaugaagaaccuguacggcgacagcaacccccagaaguucaccagcagcgccaacggcgugaccacccacuacgugagccagaucggcgacuuccccgaccagaccgaggacggcggccugccccagagcggcagaaucgugguggacuacaugaugcagaagcccggcaagaccggcaccaucguguaccagagaggcgugcugcugccccagaagguguggugcgccagcggcagaagcaaggugaucaagggcagccugccccugaucggcgaggccgacugccugcacgagaaguacggcggccugaacaagagcaagcccuacuacaccggcaagcacgccaaggccaucggcaacugccccaucugggugaagaccccccugaagcuggccaacggcaccaaguacagaccccccgccaagcugcugaaggagagaggcuucuucggcgccaucgccggcuuccuggagggcggcugggagggcaugaucgccggcuggcacggcuacaccagccacggcgcccacggcguggccguggccgccgaccugaagagcacccaggaggccaucaacaagaucaccaagaaccugaacagccugagcgagcuggaggugaagaaccugcagagacugagcggcgccauggacgagcugcacaacgagaucaucgagcuggacgagaagguggacgaccugagagccgacaccaucagcagccagaucgagcuggccgugcugcugagcaacgagggcaucaucaacagcgaggacgagcaccugcuggcccuggagagaaagcugaagaagaugcugggccccagcgccguggacaucggcaacggcugcuucgagaccaagcacaagugcaaccagaccugccuggacagaaucgccgccggcaccuucaacgccggcgaguucagccugcccaccuucgacagccugaacaucaccgccgccagccugaacgacgacggccuggacaaccacaccauccugcuguacuacagcaccgccgccagcagccuggccgugacccugaugcuggccaucuucaucguguacauggugagcagagacaacgugagcugcagcaucugccuguga

SEQ ID NO: 188053 - RNA, 1755 nt, Artificial Sequence; identical to SEQ ID NO: 188052
  derived and/or modified CDS sequence (opt4) from hemagglutinin__InfluenzaB__AHL92739

SEQ ID NO: 188054 - RNA, 1755 nt, Artificial Sequence; identical to SEQ ID NO: 188052
  derived and/or modified CDS sequence (opt4) from hemagglutinin__InfluenzaB__AHL92750

SEQ ID NO: 188055 - RNA, 1755 nt, Artificial Sequence; identical to SEQ ID NO: 186880
  derived and/or modified CDS sequence (opt4) from hemagglutinin__InfluenzaB__AHL92761

SEQ ID NO: 188056 - RNA, 1755 nt, Artificial Sequence
  derived and/or modified CDS sequence (opt4) from hemagglutinin__InfluenzaB__AHL92772
augaaggccaucaucgugcugcugaugguggugaccagcaacgccgacagaaucugcaccggcaucaccagcagcaacagcccccacguggugaagaccgccacccagggcgaggugaacgugaccggcgugaucccccugaccaccacccccaccaagagcuacuucgccaaccugaagggcaccagaaccagaggcaagcugugccccgacugccugaacugcaccgaccuggacguggcccugggcagacccaugugcaugggcaccacccccagcgccaaggccagcauccugcacgaggugagacccgugaccagcggcugcuuccccaucaugcacgacagaaccaagaucagacagcugcccaaccugcugagaggcuacgagaacaucagacugagcacccagaacgugaucgacgccgagaaggcccccggcggccccuacagacugggcaccagcggcagcugccccaacgccaccagcaagaucggcuucuucgccaccauggccugggccgugcccaaggacaacuacaagaacgccaccaacccccugaccguggaggugcccuacaucugcaccgagggcgaggaccagaucaccguguggggcuuccacagcgacaacaagacccagaugaagaaccuguacggcgacagcaacccccagaaguucaccagcagcgccaacggcgugaccacccacuacgugagccagaucggcgacuuccccgaccagaccgaggacggcggccugccccagagcggcagaaucgugguggacuacaugaugcagaagcccggcaagaccggcaccaucguguaccagagaggcgugcugcugccccagaagguguggugcgccagcggcagaagcaaggugaucaagggcagccugccccugaucggcgaggccgacugccugcacgagaaguacggcggccugaacaagagcaagcccuacuacaccggcgagcacgccaaggccaucggcaacugccccaucugggugaagaccccccugaagcuggccaacggcaccaaguacagaccccccgccaagcugcugaaggagagaggcuucuucggcgccaucgccggcuuccuggagggcggcugggagggcaugaucgccggcuggcacggcuacaccagccacggcgcccacggcguggccguggccgccgaccugaagagcacccaggaggccaucaacaagaucaccaagaaccugaacagccugagcgagcuggaggugaagaaccugcagagacugagcggcgccauggacgagcugcacaacgagauccuggagcuggacgagaagguggacgaccugagagccgacaccaucagcagccagaucgagcuggccgugcugcugagcaacgagggcaucaucaacagcgaggacgagcaccugcuggcccuggagagaaagcugaagaagaugcugggccccagcgccguggacaucggcaacggcugcuucgagaccaagcacaagugcaaccagaccugccuggacagaaucgccgccggcaccuucaacgccggcgaguucagccugcccaccuucgacagccugaacaucaccgccgccagccugaacgacgacggccuggacaaccacaccauccugcuguacuacagcaccgccgccagcagccuggccgugacccugaugcuggccaucuucaucguguacauggugagcagagacaacgugagcugcagcaucugccuguga

SEQ ID NO: 188057 - RNA, 1755 nt, Artificial Sequence; identical to SEQ ID NO: 186880
  derived and/or modified CDS sequence (opt4) from hemagglutinin__InfluenzaB__AHL92794

SEQ ID NO: 188058 - RNA, 1755 nt, Artificial Sequence; identical to SEQ ID NO: 186880
  derived and/or modified CDS sequence (opt4) from hemagglutinin__InfluenzaB__AHL92805

SEQ ID NO: 188059 - RNA, 1755 nt, Artificial Sequence; identical to SEQ ID NO: 186880
  derived and/or modified CDS sequence (opt4) from hemagglutinin__InfluenzaB__AHL92816

SEQ ID NO: 188060 - RNA, 1755 nt, Artificial Sequence
  derived and/or modified CDS sequence (opt4) from hemagglutinin__InfluenzaB__AHL92827
augaaggccaucaucgugcugcugaugguggugaccagcaacgccgacagaaucugcaccggcaucaccagcagcaacagcccccacguggugaagaccgccacccagggcgaggugaacgugaccggcgugaucccccugaccaccacccccaccaagagcuacuucgccaaccugaagggcaccagaaccagaggcaagcugugccccgacugccugaacugcaccgaccuggacguggcccugggcagacccaugugcgugggcaccacccccagcgccaaggccagcauccugcacgaggugagacccgugaccagcggcugcuuccccaucaugcacgacagaaccaagaucagacagcugcccaaccugcugagaggcuacgagaacaucagacugagcacccagaacgugaucgacgccgagaaggcccccggcggccccuacagacugggcaccagcggcagcugccccaacgccaccagcaagaucggcuucuucgccaccauggccugggccgugcccaaggacaacuacaagaacgccaccaacccccugaccguggaggugcccuacaucugcaccgagggcgaggaccagaucaccguguggggcuuccacagcgacaacaagacccagaugaagaaccuguacggcgacagcaacccccagaaguucaccagcagcgccaacggcgugaccacccacuacgugagccagaucggcgacuuccccgaccagaccgaggacggcggccugccccagagcggcagaaucgugguggacuacaugaugcagaagcccggcaagaccggcaccaucguguaccagagaggcgugcugcugccccagaagguguggugcgccagcggcagaagcaaggugaucaagggcagccugccccugaucggcgaggccgacugccugcacgagaaguacggcggccugaacaagagcaagcccuacuacaccggcgagcacgccaaggccaucggcaacugccccaucugggugaagaccccccugaagcuggccaacggcaccaaguacagaccccccgccaagcugcugaaggagagaggcuucuucggcgccaucgccggcuuccuggagggcggcugggagggcaugaucgccggcuggcacggcuacaccagccacggcgcccacggcguggccguggccgccgaccugaagagcacccaggaggccaucaacaagaucaccaagaaccugaacagccugagcgagcuggaggugaagaaccugcagagacugagcggcgccauggacgagcugcacaacgagauccuggagcuggacgagaagguggacgaccugagagccgacaccaucagcagccagaucgagcuggccgugcugcugagcaacgagggcaucaucaacagcgaggacgagcaccugcuggcccuggagagaaagcugaagaagaugcugggccccagcgccguggacaucggcaacggcugcuucgagaccaagcacaagugcaaccagaccugccuggacagaaucgccgccggcaccuucaacgccggcgaguucagccugcccaccuucgacagccugaacaucaccgccgccagccugaacgacgacggccuggacaaccacaccauccugcuguacuacagcaccgccgccagcagccuggccgugacccugaugcuggccaucuucgugguguacauggugagcagagacaacgugagcugcagcaucugccuguga

SEQ ID NO: 188061 - RNA, 1755 nt, Artificial Sequence; identical to SEQ ID NO: 186880
  derived and/or modified CDS sequence (opt4) from hemagglutinin__InfluenzaB__AHL92838

SEQ ID NO: 188062 - RNA, 1755 nt, Artificial Sequence; identical to SEQ ID NO: 186880
  derived and/or modified CDS sequence (opt4) from hemagglutinin__InfluenzaB__AHL92849

SEQ ID NO: 188063 - RNA, 1755 nt, Artificial Sequence; identical to SEQ ID NO: 186880
  derived and/or modified CDS sequence (opt4) from hemagglutinin__InfluenzaB__AHL92860

SEQ ID NO: 188064 - RNA, 1758 nt, Artificial Sequence; identical to SEQ ID NO: 186698
  derived and/or modified CDS sequence (opt4) from hemagglutinin__InfluenzaB__AHL92871

SEQ ID NO: 188065 - RNA, 1755 nt, Artificial Sequence; identical to SEQ ID NO: 186486
  derived and/or modified CDS sequence (opt4) from hemagglutinin__InfluenzaB__AHL92882

SEQ ID NO: 188066 - RNA, 1758 nt, Artificial Sequence
  derived and/or modified CDS sequence (opt4) from hemagglutinin__InfluenzaB__AHL92893
augaaggccaucaucgugcugcugaugguggugaccagcaacgccgacagaaucugcaccggcaucaccagcagcaacagcccccacguggugaagaccgccacccagggcgaggugaacgugaccggcgugaucccccugaccaccacccccaccaagagccacuucgccaaccugaagggcaccaagaccagaggcaagcugugccccaagugccugaacugcaccgaccuggacguggcccugggcagacccaagugcaccggcaacauccccagcgccgaggugagcauccugcacgaggugagacccgugaccagcggcugcuuccccaucaugcacgacagaaccaagaucagacagcugcccaaccugcugagaggcuacgagcacaucagacugagcacccacaacgugaucaacgccgagaaggcccccggcggccccuacaagaucggcaccagcggcagcugccccaacgugaccaacggcaacggcuucuucgccaccauggccugggccgugcccaagaacgacaacaacaagaccgccaccaacagccugaccaucgaggugcccuacaucugcaccgagggcgaggaccagaucaccaucuggggcuuccacagcgacaaggagacccagauggccaagcuguacggcgacagcaagccccagaaguucaccagcagcgccaacggcgugaccacccacuacgugagccagaucggcggcuuccccaaccagaccgaggacggcggccugccccagagcggcagaaucgugguggacuacauggugcagaagagcggcaagaccggcaccaucaccuaccagagaggcauccugcugccccagaagguguggugcgccagcggcagaagcaaggugaucaagggcagccugccccugaucggcgaggccgacugccugcacgagaaguacggcggccugaacaagagcaagcccuacuacaccggcgagcacgccaaggccaucggcaacugccccaucugggugaagaccccccugaagcuggccaacggcaccaaguacagaccccccgccaagcugcugaaggagagaggcuucuucggcgccaucgccggcuuccuggagggcggcugggagggcaugaucgccggcuggcacggcuacaccagccacggcgcccacggcguggccguggccgccgaccugaagagcacccaggaggccaucaacaagaucaccaagaaccugaacagccugagcgagcuggaggugaagaaccugcagagacugagcggcgccauggacgagcugcacaacgagauccuggagcuggacgagaagguggacgaccugagagccgacaccaucagcagccagaucgagcuggccgugcugcugagcaacgagggcaucaucaacagcgaggacgagcaccugcuggcccuggagagaaagcugaagaagaugcugggccccagcgccguggagaucggcaacggcugcuucgagaccaagcacaagugcaaccagaccugccuggacagaaucgccgccggcaccuucgacgccggcgaguucagccugcccaccuucgacagccugaacaucaccgccgccagccugaacgacgacggccuggacaaccacaccauccugcuguacuacagcaccgccgccagcagccuggccgugacccugaugaucgccaucuucaucguguacauggugagcagagacaacgugagcugcagcaucugccuguga

SEQ ID NO: 188067 - RNA, 1755 nt, Artificial Sequence; identical to SEQ ID NO: 187083
  derived and/or modified CDS sequence (opt4) from hemagglutinin__InfluenzaB__AHL92904

SEQ ID NO: 188068 - RNA, 1758 nt, Artificial Sequence
  derived and/or modified CDS sequence (opt4) from hemagglutinin__InfluenzaB__AHL92915
augaaggccaucaucgugcugcugaugguggugaccagcaacgccgacagaaucugcaccggcaucaccagcagcaacagcccccacguggugaagaccgccacccagggcgaggugaacgugaccggcgugaucccccugaccaccacccccaccaagagccacuucgccaaccugaagggcaccaagaccagaggcaagcugugccccaagugccugaacugcaccgaccuggacguggcccugggcagacccaagugcaccggcaacauccccagcgccgaggugagcauccugcacgaggugagacccgugaccagcggcugcuuccccaucaugcacgacagaaccaagaucagacagcugcccaaccugcugagaggcuacgagcacaucagacugagcacccacaacgugaucaacgccgagaaggcccccggcggccccuacaagaucggcaccagcggcagcugccccaacgugaccaacggcaacggcuucuucgccaccauggccugggccgugcccaagaacgacaacaacaagaccgccaccaacagccugaccaucgaggugcccuacaucugcaccgagggcgaggaccagaucaccaucuggggcuuccacagcgacaacgagacccagauggccaagcuguacggcgacagcaagccccagaaguucaccagcagcgccaacggcgugaccacccacuacgugagccagaucggcggcuuccccaaccagaccgaggacggcggccugccccagagcggcagaaucgugguggacuacauggugcagaagagcggcaagaccggcaccaucaccuaccagagaggcauccugcugccccagaagguguggugcgccagcggcagaagcaaggugaucaagggcagccugccccugaucggcgaggccgacugccugcacgagaaguacggcggccugaacaagagcaagcccuacuacaccggcgagcacgccaaggccaucggcaacugccccaucugggugaagaccccccugaagcuggccaacggcaccaaguacagaccccccgccaagcugcugaaggagagaggcuucuucggcgccaucgccggcuuccuggagggcggcugggagggcaugaucgccggcuggcacggcuacaccagccacggcgcccacggcguggccguggccgccgaccugaagagcacccaggaggccaucaacaagaucaccaagaaccugaacagccugagcgagcuggaggugaagaaccugcagagacugagcggcgccauggacgagcugcacaacgagauccuggagcuggacgagaagguggacgaccugagagccgacaccaucagcagccagaucgagcuggccgugcugcugagcaacgagggcaucaucaacagcgaggacgagcaccugcuggcccuggagagaaagcugaagaagaugcugggccccagcgccguggagaucggcaacggcugcuucgagaccaagcacaagugcaaccagaccugccuggacagaaucgccgccggcaccuucgacgccggcgaguucagccugcccaccuucgacagccugaacaucaccgccgccagccugaacgacgacggccuggacaaccacaccauccugcuguacuacagcaccgccgccagcagccuggccgugacccugaugaucgccaucuucaucguguacauggugagcagagacaacgugagcugcagcaucugccuguga

SEQ ID NO: 188069 - RNA, 1758 nt, Artificial Sequence; identical to SEQ ID NO: 186698
  derived and/or modified CDS sequence (opt4) from hemagglutinin__InfluenzaB__AHL92926

SEQ ID NO: 188070 - RNA, 1755 nt, Artificial Sequence; identical to SEQ ID NO: 187659
  derived and/or modified CDS sequence (opt4) from hemagglutinin__InfluenzaB__AHL92937

SEQ ID NO: 188071 - RNA, 1758 nt, Artificial Sequence; identical to SEQ ID NO: 186574
  derived and/or modified CDS sequence (opt4) from hemagglutinin__InfluenzaB__AHL92948

SEQ ID NO: 188072 - RNA, 1758 nt, Artificial Sequence; identical to SEQ ID NO: 186574
  derived and/or modified CDS sequence (opt4) from hemagglutinin__InfluenzaB__AHL92959

SEQ ID NO: 188073 - RNA, 1758 nt, Artificial Sequence; identical to SEQ ID NO: 186574
  derived and/or modified CDS sequence (opt4) from hemagglutinin__InfluenzaB__AHL92970

SEQ ID NO: 188074 - RNA, 1758 nt, Artificial Sequence; identical to SEQ ID NO: 186574
  derived and/or modified CDS sequence (opt4) from hemagglutinin__InfluenzaB__AHL92981

SEQ ID NO: 188075 - RNA, 1758 nt, Artificial Sequence; identical to SEQ ID NO: 186574
  derived and/or modified CDS sequence (opt4) from hemagglutinin__InfluenzaB__AHL92992

SEQ ID NO: 188076 - RNA, 1758 nt, Artificial Sequence; identical to SEQ ID NO: 187999
  derived and/or modified CDS sequence (opt4) from hemagglutinin__InfluenzaB__AHL93004

SEQ ID NO: 188077 - RNA, 1758 nt, Artificial Sequence; identical to SEQ ID NO: 186574
  derived and/or modified CDS sequence (opt4) from hemagglutinin__InfluenzaB__AHL93015

SEQ ID NO: 188078 - RNA, 1758 nt, Artificial Sequence; identical to SEQ ID NO: 186574
  derived and/or modified CDS sequence (opt4) from hemagglutinin__InfluenzaB__AHL93026

SEQ ID NO: 188079 - RNA, 1755 nt, Artificial Sequence; identical to SEQ ID NO: 188023
  derived and/or modified CDS sequence (opt4) from hemagglutinin__InfluenzaB__AHL93037

SEQ ID NO: 188080 - RNA, 1755 nt, Artificial Sequence; identical to SEQ ID NO: 188023
  derived and/or modified CDS sequence (opt4) from hemagglutinin__InfluenzaB__AHL93048

SEQ ID NO: 188081 - RNA, 1755 nt, Artificial Sequence; identical to SEQ ID NO: 188052
  derived and/or modified CDS sequence (opt4) from hemagglutinin__InfluenzaB__AHL93059

SEQ ID NO: 188082 - RNA, 1755 nt, Artificial Sequence; identical to SEQ ID NO: 186880
  derived and/or modified CDS sequence (opt4) from hemagglutinin__InfluenzaB__AHL93070

SEQ ID NO: 188083 - RNA, 1755 nt, Artificial Sequence
  derived and/or modified CDS sequence (opt4) from hemagglutinin__InfluenzaB__AHL93081
augaaggccaucaucgugcugcugaugguggugaccagcaacgccgacagaaucugcaccggcaucaccagcagcaacagcccccacguggugaagaccgccacccagggcgaggugaacgugaccggcgugaucccccugaccaccacccccaccaagagcuacuucgccaaccugaagggcaccagaaccagaggcaagcugugccccgacugccugaacugcaccgaccuggacguggcccugggcagacccaugugcgugggcaccacccccagcgccaaggccagcauccugcacgaggugagacccgugaccagcggcugcuuccccaucaugcacgacagaaccaagaucagacagcugcccaaccugcugagaggcuacgagaacaucagacugagcacccagaacgugaucgacgccgagaaggcccccggcggccccuacagacugggcaccagcggcagcugccccaacgccaccagcaagaucggcuucuucgccaccauggccugggccgugcccaaggacaacuacaagaacgccaccaacccccugaccguggaggugcccuacaucugcaccgagggcgaggaccagaucaccguguggggcuuccacagcgacaacaagacccagaugaagaaccuguacggcgacagcaacccccagaaguucaccagcagcgccaacggcgugaccacccacuacgugagccagaucggcgacuuccccgaccagaccgaggacggcggccugccccagagcggcagaaucgugguggacuacaugaugcagaagcccggcaagaccggcaccaucguguaccagagaggcgugcugcugccccagaagguguggugcgccagcggcagaagcaaggugaucaagggcagccugccccugaucggcgaggccgacugccugcacgagaaguacggcggccugaacaagagcaagcccuacuacaccggcgagcacgccaaggccaucggcaacugccccaucugggugaagaccccccugaagcuggccaacggcaccaaguacagaccccccgccaagcugcugaaggagagaggcuucuucggcgccaucgccggcuuccuggagggcggcugggagggcaugaucgccggcuggcacggcuacaccagccacggcgcccacggcguggccguggccgccgaccugaagagcacccaggaggccaucaacaagaucaccaagaaccugaacagccugagcgagcuggaggugaagaaccugcagagacugagcggcgccauggacgagcugcacaacgagauccuggagcuggacggcaagguggacgaccugagagccgacaccaucagcagccagaucgagcuggccgugcugcugagcaacgagggcaucaucaacagcgaggacgagcaccugcuggcccuggagagaaagcugaagaagaugcugggccccagcgccguggacaucggcaacggcugcuucgagaccaagcacaagugcaaccagaccugccuggacagaaucgccgccggcaccuucaacgccggcgaguucagccugcccaccuucgacagccugaacaucaccgccgccagccugaacgacgacggccuggacaaccacaccauccugcuguacuacagcaccgccgccagcagccuggccgugacccugaugcuggccaucuucaucguguacauggugagcagagacaacgugagcugcagcaucugccuguga

SEQ ID NO: 188084 - RNA, 1755 nt, Artificial Sequence; identical to SEQ ID NO: 186880
  derived and/or modified CDS sequence (opt4) from hemagglutinin__InfluenzaB__AHL93092

SEQ ID NO: 188085 - RNA, 1755 nt, Artificial Sequence; identical to SEQ ID NO: 186880
  derived and/or modified CDS sequence (opt4) from hemagglutinin__InfluenzaB__AHL93103

SEQ ID NO: 188086 - RNA, 1755 nt, Artificial Sequence; identical to SEQ ID NO: 186880
  derived and/or modified CDS sequence (opt4) from hemagglutinin__InfluenzaB__AHL93114

SEQ ID NO: 188087 - RNA, 1755 nt, Artificial Sequence; identical to SEQ ID NO: 186627
  derived and/or modified CDS sequence (opt4) from hemagglutinin__InfluenzaB__AHL93125

SEQ ID NO: 188088 - RNA, 1755 nt, Artificial Sequence
  derived and/or modified CDS sequence (opt4) from hemagglutinin__InfluenzaB__AHL93136
augaaggccaucaucgugcugcugaugguggugaccagcaacgccgacagaaucugcaccggcaucaccagcagcaacagcccccacguggugaagaccgccacccagggcgaggugaacgugaccggcgugaucccccugaccaccacccccaccaagagcuacuucgccaaccugaagggcaccagaaccagaggcaagcugugccccgacugccugaacugcaccgaccuggacguggcccugggcagacccaugugcgugggcaccacccccagcgccaaggccagcauccugcacgaggugagacccgugaccagcggcugcuuccccaucaugcacgacagaaccaagaucagacagcugcccaaccugcugagaggcuacgagaacaucagacugagcacccagaacgugaucgacgccgagaaggcccccggcggccccuacagacugggcaccagcggcagcugccccaacgccaccagcaagaucggcuucuucgccaccauggccugggccgugcccaaggacaacuacaagaacgccaccaacccccugaccguggaggugcccuacaucugcaccgagggcgaggaccagaucaccguguggggcuuccacagcgacaacaagacccagaugaagaaccuguacggcgacagcaacccccagaaguucaccagcagcgccaacggcgugaccacccacuacgugagccagaucggcgacuuccccgaccagaccgaggacggcggccugccccagagcggcagaaucgugguggacuacaugaugcagaagcccggcaagaccggcaccaucguguaccagagaggcgugcugcugccccagagaguguggugcgccagcggcagaagcaaggugaucaagggcagccugccccugaucggcgaggccgacugccugcacgagaaguacggcggccugaacaagagcaagcccuacuacaccggcgagcacgccaaggccaucggcaacugccccaucugggugaagaccccccugaagcuggccaacggcaccaaguacagaccccccgccaagcugcugaaggagagaggcuucuucggcgccaucgccggcuuccuggagggcggcugggagggcaugaucgccggcuggcacggcuacaccagccacggcgcccacggcguggccguggccgccgaccugaagagcacccaggaggccaucaacaagaucaccaagaaccugaacagccugagcgagcuggaggugaagaaccugcagagacugagcggcgccauggacgagcugcacaacgagauccuggagcuggacgagaagguggacgaccugagagccgacaccaucagcagccagaucgagcuggccgugcugcugagcaacgagggcaucaucaacagcgaggacgagcaccugcuggcccuggagagaaagcugaagaagaugcugggccccagcgccguggacaucggcaacggcugcuucgagaccaagcacaagugcaaccagaccugccuggacagaaucgccgccggcaccuucaacgccggcgaguucagccugcccaccuucgacagccugaacaucaccgccgccagccugaacgacgacggccuggacaaccacaccauccugcuguacuacagcaccgccgccagcagccuggccgugacccugaugcuggccaucuucaucguguacauggugagcagagacaacgugagcugcagcaucugccuguga

SEQ ID NO: 188089 - RNA, 1755 nt, Artificial Sequence; identical to SEQ ID NO: 186627
  derived and/or modified CDS sequence (opt4) from hemagglutinin__InfluenzaB__AHL93147

SEQ ID NO: 188090 - RNA, 1755 nt, Artificial Sequence; identical to SEQ ID NO: 186880
  derived and/or modified CDS sequence (opt4) from hemagglutinin__InfluenzaB__AHL93158

SEQ ID NO: 188091 - RNA, 1755 nt, Artificial Sequence
  derived and/or modified CDS sequence (opt4) from hemagglutinin__InfluenzaB__AHL93169
augaaggccaucaucgugcugcugaugguggugaccagcaacgccgacagaaucugcaccggcaucaccagcagcaacagcccccacguggugaagaccgccacccagggcgaggugaacgugaccggcgugaucccccugaccaccacccccaccaagagcuacuucgccaaccugaagggcaccagaaccagaggcaagcugugccccgacugcuucaacugcaccgaccuggacguggcccugggcagacccaugugcgugggcaccacccccagcgccaaggccagcauccugcacgaggugagacccgugaccagcggcugcuuccccaucaugcacgacagaaccaagaucagacagcugcccaaccugcugagaggcuacgagaacaucagacugagcacccagaacgugaucgacgccgagaaggcccccggcggccccuacagacugggcaccagcggcagcugccccaacgccaccagcaagaucggcuucuucgccaccauggccugggccgugcccaaggacaacuacaagaacgccaccaacccccugaccguggaggugcccuacaucugcaccgagggcgaggaccagaucaccguguggggcuuccacagcgacaacaagacccagaugaagaaccuguacggcgacagcaacccccagaaguucaccagcagcgccaacggcgugaccacccacuacgugagccagaucggcgacuuccccgaccagaccgaggacggcggccugccccagagcggcagaaucgugguggacuacaugaugcagaagcccggcaagaccggcaccaucguguaccagagaggcgugcugcugccccagaagguguggugcgccagcggcagaagcaaggugaucaagggcagccugccccugaucggcgaggccgacugccugcacgagaaguacggcggccugaacaagagcaagcccuacuacaccggcgagcacgccaaggccaucggcaacugccccaucugggugaagaccccccugaagcuggccaacggcaccaaguacagaccccccgccaagcugcugaaggagagaggcuucuucggcgccaucgccggcuuccuggagggcggcugggagggcaugaucgccggcuggcacggcuacaccagccacggcgcccacggcguggccguggccgccgaccugaagagcacccaggaggccaucaacaagaucaccaagaaccugaacagccugagcgagcuggaggugaagaaccugcagagacugagcggcgccauggacgagcugcacaacgagauccuggagcuggacgagaagguggacgaccugagagccgacaccaucagcagccagaucgagcuggccgugcugcugagcaacgagggcaucaucaacagcgaggacgagcaccugcuggcccuggagagaaagcugaagaagaugcugggccccagcgccguggacaucggcaacggcugcuucgagaccaagcacaagugcaaccagaccugccuggacagaaucgccgccggcaccuucaacgccggcgaguucagccugcccaccuucgacagccugaacaucaccgccgccagccugaacgacgacggccuggacaaccacaccauccugcuguacuacagcaccgccgccagcagccuggccgugacccugaugcuggccaucuucaucguguacauggugagcagagacaacgugagcugcagcaucugccuguga

SEQ ID NO: 188092 - RNA, 1755 nt, Artificial Sequence
  derived and/or modified CDS sequence (opt4) from hemagglutinin__InfluenzaB__AHL93180
augaaggccaucaucgugcugcugaugguggugaccagcaacgccgacagaaucugcaccggcaucaccagcagcaacagcccccacguggugaagaccgccacccagggcgaggugaacgugaccggcgugaucccccugaccaccacccccaccaagagcuacuucgccaaccugaagggcaccagaaccagaggcaagcugugccccgacugccugaacugcaccgaccuggacguggcccugggcagacccaugugcgugggcaccacccccagcgccaaggccagcauccugcacgaggugagacccgugaccagcggcugcuuccccaucauccacgacagaaccaagaucagacagcugcccaaccugcugagaggcuacgagaacaucagacugagcacccagaacgugaucgacgccgagaaggcccccggcggccccuacagacugggcaccagcggcagcugccccaacgccaccagcaagagcggcuucuucgccaccauggccugggccgugcccaaggacaacaacaagaacgccaccaacccccugaccguggaggugcccuacaucugcaccgagggcgaggaccagaucaccguguggggcuuccacagcgacaacaagacccagaugaagaaccuguacggcgacagcaacccccagaaguucaccagcagcgccaacggcgugaccacccacuacgugagccagaucggcagcuuccccgaccagaccgaggacggcggccugccccagagcggcagaaucgugguggacuacaugaugcagaagcccggcaagaccggcaccaucguguaccagagaggcgugcugcugccccagagaguguggugcgccagcggcagaagcaaggugaucaagggcagccugccccugaucggcgaggccgacugccugcacgagaaguacggcggccugaacaagagcaagcccuacuacaccggcgagcacgccaaggccaucggcaacugccccaucugggugaagaccccccugaagcuggccaacggcaccaaguacagaccccccgccaagcugcugaaggagagaggcuucuucggcgccaucgccggcuuccuggagggcggcugggagggcaugaucgccggcuggcacggcuacaccagccacggcgcccacggcguggccguggccgccgaccugaagagcacccaggaggccaucaacaagaucaccaagaaccugaacagccugagcgagcuggaggugaagaaccugcagagacugagcggcgccauggacgagcugcacaacgagauccuggagcuggacgagaagguggacgaccugagagccgacaccaucagcagccagaucgagcuggccgugcugcugagcaacgagggcaucaucaacagcgaggacgagcaccugcuggcccuggagagaaagcugaagaagaugcugggccccagcgccguggagaucggcaacggcugcuucgagaccaagcacaagugcaaccagaccugccuggacagaaucgccgccggcaccuucaacgccggcgaguucagccugcccaccuucgacagccugaacaucaccgccgccagccugaacgacgacggccuggacaaccacaccauccugcuguacuacagcaccgccgccagcagccuggccgugacccugaugcuggccaucuucaucguguacauggugagcagagacaacgugagcugcagcaucugccuguga

SEQ ID NO: 188093 - RNA, 1755 nt, Artificial Sequence
  derived and/or modified CDS sequence (opt4) from hemagglutinin__InfluenzaB__AHL93191
augaaggccaucaucgugcugcugaugguggugaccagcaacgccgacagaaucugcaccggcaucaccagcagcaacagcccccacguggugaagaccgccacccagggcgaggugaacgugaccggcgugaucccccugaccaccacccccaccaagagcuacuucgccaaccugaagggcaccagaaccagaggcaagcugugccccgacugccugaacugcaccgaccuggacguggcccugggcagacccaugugcgugggcaccacccccagcgccaaggccagcauccugcacgaggugagacccgugaccagcggcugcuuccccaucaugcacgacagaaccaagaucagacagcugcccaaccugcugagaggcuacgagaacaucagacugagcacccagaacgugaucgacgccgagaaggcccccggcggccccuacagacugggcaccagcggcagcugccccaacgacaccagcaagaucggcuucuucgccaccauggccugggccgugcccaaggacaacuacaagaacgccaccaacccccugaccguggaggugcccuacaucugcaccgagggcgaggaccagaucaccguguggggcuuccacagcgacaacaagacccagaugaagaaccuguacggcgacagcaacccccagaaguucaccagcagcgccaacggcgugaccacccacuacgugagccagaucggcgacuuccccgaccagaccgaggacggcggccugccccagagcggcagaaucgugguggacuacaugaugcagaagcccggcaagaccggcaccaucguguaccagagaggcgugcugcugccccagaagguguggugcgccagcggcagaagcaaggugaucaagggcagccugccccugaucggcgaggccgacugccugcacgagaaguacggcggccugaacaagagcaagcccuacuacaccggcgagcacgccaaggccaucggcaacugccccaucugggugaagaccccccugaagcuggccaacggcaccaaguacagaccccccgccaagcugcugaaggagagaggcuucuucggcgccaucgccggcuuccuggagggcggcugggagggcaugaucgccggcuggcacggcuacaccagccacggcgcccacggcguggccguggccgccgaccugaagagcacccaggaggccaucaacaagaucaccaagaaccugaacagccugagcgagcuggaggugaagaaccugcagagacugagcggcgccauggacgagcugcacaacgagauccuggagcuggacgagaagguggacgaccugagagccgacaccaucagcagccagaucgagcuggccgugcugcugagcaacgagggcaucaucaacagcgaggacgagcaccugcuggcccuggagagaaagcugaagaagaugcugggccccagcgccguggacaucggcaacggcugcuucgagaccaagcacaagugcaaccagaccugccuggacagaaucgccgccggcaccuucaacgccggcgaguucagccugcccaccuucgacagccugaacaucaccgccgccagccugaacgacgacggccuggacaaccacaccauccugcuguacuacagcaccgccgccagcagccuggccgugacccugaugcuggccaucuucaucguguacauggugagcagagacaacgugagcugcagcaucugccuguga

SEQ ID NO: 188094 - RNA, 1755 nt, Artificial Sequence
  derived and/or modified CDS sequence (opt4) from hemagglutinin__InfluenzaB__AHL93202
augaaggccaucaucgugcugcugaugguggugaccagcaacgccgacagaaucugcaccggcaucaccagcagcaacagcccccacguggugaagaccgccacccagggcgaggugaacgugaccggcgugaucccccugaccaccacccccaccaagagcuacuucgccaaccugaagggcaccagaaccagaggcaagcugugccccgacugccugaacugcaccgaccuggacguggcccugggcagacccaugugcgugggcaccacccccagcgccaaggccagcauccugcacgaggugagacccgugaccagcggcugcuuccccaucaugcacgacagaaccaagaucagacagcugcccaaccugcugagaggcuacgagaacaucagacugagcacccagaacgugaucgacgccgagaaggcccccggcggccccuacagacugggcaccagcggcagcugccccaacgccaccagcaagaucggcuucuucgccaccauggccugggccgugcccaaggacaacuacaagaacgccaccaacccccugaccguggaggugcccuacaucugcaccgagggcgaggaccagaucaccguguggggcuuccacagcgacaacaagacccagaugaagaaccuguacggcgacagcaacccccagaaguucaccagcagcgccaacggcgugaccacccacuacgugagccagaucggcgacuuccccgaccagaccgaggacggcggccugccccagagcggcagaaucgugguggacuacaugaugcagaagcccggcaagaccggcaccaucguguaccagagaggcgugcugcugccccagaagguguggugcgccagcggcagaagcaaggugaucaagggcagccugccccugaucggcgaggccgacugccugcacgagaaguacggcggccugaacaagagcaagcccuacuacaccggcgagcacgccaaggccaucggcaacugccccaucugggugaagaccccccugaagcuggccaacggcaccaaguacagaccccccgccaagcugcugaaggagagaggcuucuucggcgccaucgccggcuuccuggagggcggcugggagggcaugaucgccggcuggcacggcuacaccagccacggcgcccacggcguggccguggccgccgaccugaagagcacccaggaggccaucaacaagaucaccaagaaccugaacagccugagcgagcuggaggugaagaaccugcagagacugagcggcgccauggacgaguuccacaacgagauccuggagcuggacgagaagguggacgaccugagagccgacaccaucagcagccagaucgagcuggccgugcugcugagcaacgagggcaucaucaacagcgaggacgagcaccugcuggcccuggagagaaagcugaagaagaugcugggccccagcgccguggacaucggcaacggcugcuucgagaccaagcacaagugcaaccagaccugccuggacagaaucgccgccggcaccuucaacgccggcgaguucagccugcccaccuucgacagccugaacaucaccgccgccagccugaacgacgacggccuggacaaccacaccauccugcuguacuacagcaccgccgccagcagccuggccgugacccugaugcuggccaucuucaucguguacauggugagcagagacaacgugagcugcagcaucugccuguga

SEQ ID NO: 188095 - RNA, 1758 nt, Artificial Sequence; identical to SEQ ID NO: 187049
  derived and/or modified CDS sequence (opt4) from hemagglutinin__InfluenzaB__AHL93213

SEQ ID NO: 188096 - RNA, 1758 nt, Artificial Sequence; identical to SEQ ID NO: 187049
  derived and/or modified CDS sequence (opt4) from hemagglutinin__InfluenzaB__AHL93224

SEQ ID NO: 188097 - RNA, 1758 nt, Artificial Sequence
  derived and/or modified CDS sequence (opt4) from hemagglutinin__InfluenzaB__AHL93235
augaaggccaucaucgugcugcugaugguggugaccagcaacgccgacagaaucugcaccggcaucaccagcagcaacagcccccacguggugaagaccgccacccagggcgaggugaacgugaccggcgugaucccccugaccaccacccccaccaagagccacuucgccaaccugaagggcaccgagaccagaggcaagcugugccccaagugccccaacugcaccgaccuggacguggcccugggcagacccaagugcaccggcaagauccccagcgccagagugagcauccugcacgaggugagacccgugaccagcggcugcuuccccaucaugcacgacagaaccaagaucagacagcugcccaaccugcugagaggcuacgagcacaucagacugagcacccacaacgugaucaacgccgagaacgcccccggcggccccuacaagaucggcaccagcggcagcugccccaacgugaccaacggcaacggcuucuucgccaccauggccugggccgugcccaagaacgacaagaacaagaccgccaccaacccccugaccaucgaggugcccuacaucugcaccgagggcgaggaccagaucaccguguggggcuuccacagcgacaacgagacccagauggccaagcuguacggcgacagcaagccccagaaguucaccagcagcgccaacggcgugaccacccacuacgugagccagaucggcggcuuccccaaccagaccgaggacggcggccugccccagagcggcagaaucgugguggacuacauggugcagaagagcggcaagaccggcaccaucaccuaccagagaggcauccugcugccccagaagguguggugcgccagcggcagaagcaaggugaucaagggcagccugccccugaucggcgaggccgacugccugcacgagaaguacggcggccugaacaagagcaagcccuacuacaccggcgagcacgccaaggccaucggcaacugccccaucugggugaagaccccccugaagcuggccaacggcaccaaguacagaccccccgccaagcugcugaaggagagaggcuucuucggcgccaucgccggcuuccuggagggcggcugggagggcaugaucgccggcuggcacggcuacaccagccacggcgcccacggcguggccguggccgccgaccugaagagcacccaggaggccaucaacaagaucaccaagaaccugaacagccugagcgagcuggaggugaagaaccugcagagacugagcggcgccauggacgagcugcacaacgagauccuggagcuggacgagaagguggacgaccugagagccgacaccaucagcagccagaucgagcuggccgugcugcugagcaacgagggcaucaucaacagcgaggacgagcaccugcuggcccuggagagaaagcugaagaagaugcugggccccagcgccguggagaucggcaacggcugcuucgagaccaagcacaagugcaaccagaccugccuggacagaaucgccgccggcaccuucgacgccggcgaguucagccugcccaccuucgacagccugaacaucaccgccgccagccugaacaacgacggccuggacaaccacaccauccugcuguacuacagcaccgccgccagcagccuggccgugacccugaugaucgccaucuucgugguguacauggugagcagagacaacgugagcugcagcaucugccuguga

SEQ ID NO: 188098 - RNA, 1758 nt, Artificial Sequence
  derived and/or modified CDS sequence (opt4) from hemagglutinin__InfluenzaB__AHL93246
augaaggccaucaucgugcugcugaugguggugaccagcaacgccgacagaaucugcaccggcaucaccagcagcaacagcccccacguggugaagaccgccacccagggcgaggugaacgugaccggcgugaucccccugaccaccacccccaccaagagccacuucgccaaccugaagggcaccgagaccagaggcaagcugugccccaagugccugaacugcaccgaccuggacguggcccugggcagacccaagugcaccggcaacauccccagcgccagagugagcauccugcacgaggugagacccgugaccagcggcugcuuccccaucaugcacgacagaaccaagaucagacagcugcccaaccugcugagaggcuacgagcacaucagacugagcacccacaacgugaucaacgccgagaacgcccccggcggccccuacaagaucggcaccagcggcagcugccccaacgugaccaacggcaacggcuucuucgccaccauggccugggccgugcccaagaacgacaagaacaagaccgccaccaacagccugaccaucgaggugcccuacaucugcaccgagggcgaggaccagaucaccaucuggggcuuccacagcgacaacgagacccagauggccaagcuguacggcgacagcaagccccagaaguucaccagcagcgccaacggcgugaccacccacuacgugagccagaucggcggcuuccccaaccagaccgaggacggcggccugccccagagcggcagaaucgugguggacuacauggugcagaagagcggcaagaccggcaccaucaccuaccagagaggcauccugcugccccagaagguguggugcgccagcggcagaagcaaggugaucaagggcagccugccccugaucggcgaggccgacugccugcacgagaaguacggcggccugaacaagagcaagcccuacuacaccggcgagcacgccaaggccaucggcaacugccccaucugggugaagaccccccugaagcuggccaacggcaccaaguacagaccccccgccaagcugcugaaggagagaggcuucuucggcgccaucgccggcuuccuggagggcggcugggagggcaugaucgccggcuggcacggcuacaccagccacggcgcccacggcguggccguggccgccgaccugaagagcacccaggaggccaucaacaagaucaccaagaaccugaacagccugggcgagcuggaggugaagaaccugcagagacugagcggcgccauggacgagcugcacaacgagauccuggagcuggacgagaagguggacgaccugagagccgacaccaucagcagccagaucgagcuggccgugcugcugagcaacgagggcaucaucaacagcgaggacgagcaccugcuggcccuggagagaaagcugaagaagaugcugggccccagcgccguggagaucggcaacggcugcuucgagaccaagcacaagugcaaccagaccugccuggacagaaucgccgccggcaccuucgacgccggcgaguucagccugcccaccuucgacagccugaacaucaccgccgccagccugaacgacgacggccuggacaaccacaccauccugcuguacuacagcaccgccgccagcagccuggccgugacccugaugaucgccaucuucgugguguacauggugagcagagacaacgugagcugcagcaucugccuguga

SEQ ID NO: 188099 - RNA, 1758 nt, Artificial Sequence; identical to SEQ ID NO: 187049
  derived and/or modified CDS sequence (opt4) from hemagglutinin__InfluenzaB__AHL93257

SEQ ID NO: 188100 - RNA, 1758 nt, Artificial Sequence; identical to SEQ ID NO: 187382
  derived and/or modified CDS sequence (opt4) from hemagglutinin__InfluenzaB__AHL93268

SEQ ID NO: 188101 - RNA, 1758 nt, Artificial Sequence
  derived and/or modified CDS sequence (opt4) from hemagglutinin__InfluenzaB__AHL93279
augaaggccaucaucgugcugcugaugguggugaccagcaacgccgacagaaucugcaccggcaucaccagcagcaacagcccccacguggugaagaccgccacccagggcgaggugaacgugaccggcgugaucccccugaccaccacccccaccaagagccacuucgccaaccugaagggcaccgagaccagaggcaagcugugccccaagugccugaacugcaccgaccuggacguggcccugggcagacccaagugcaccggcaagauccccagcgccagagugagcauccugcacgaggugagacccgugaccagcggcugcuuccccaucaugcacgacagaaccaagaucagacagcugcccaaccugcugagaggcuacgagcacaucagacugagcacccacaacgugaucaacgccgagaacgcccccggcggccccuacaagaucggcaccagcggcagcugccccaacaucaccaacggcaacggcuucuucgccaccauggccugggccgugcccaagaacgacaagaacaagaccgccaccaacccccugaccaucgaggugcccuacaucugcaccgagggcgaggaccagaucaccguguggggcuuccacagcgacaacgagacccagauggccaagcuguacggcgacagcaagccccagaaguucaccagcagcgccaacggcgugaccacccacuacgugagccagaucggcggcuuccccaaccagaccgaggacggcggccugccccagagcggcagaaucgugguggacuacauggugcagaagagcggcaagaccggcaccaucaccuaccagagaggcauccugcugccccagaagguguggugcgccagcggcaagagcaaggugaucaagggcagccugccccugaucggcgaggccgacugccugcacgagaaguacggcggccugaacaagagcaagcccuacuacaccggcgagcacgccaaggccaucggcaacugccccaucugggugaagaccccccugaagcuggccaacggcaccaaguacagaccccccgccaagcugcugaaggagagaggcuucuucggcgccaucgccggcuuccuggagggcggcugggagggcaugaucgccggcuggcacggcuacaccagccacggcgcccacggcguggccguggccgccgaccugaagagcacccaggaggccaucaacaagaucaccaagaaccugaacagccugagcgagcuggaggugaagaaccugcagagacugagcggcgccauggacgagcugcacaacgagauccuggagcuggacgagaagguggacgaccugagagccgacaccaucagcagccagaucgagcuggccgugcugcugagcaacgagggcaucaucaacagcgaggacgagcaccugcuggcccuggagagaaagcugaagaagaugcugggccccagcgccguggagaucggcaacggcugcuucgagaccaagcacaagugcaaccagaccugccuggacagaaucgccgccggcaccuucgacgccggcgaguucagccugcccaccuucgacagccugaacaucaccgccgccagccugaacgacgacggccuggacaaccacaccauccugcuguacuacagcaccgccgccagcagccuggccgugacccugaugaucgccaucuucgugguguacauggugagcagagacaacgugagcugcagcaucugccuguga

SEQ ID NO: 188102 - RNA, 1758 nt, Artificial Sequence; identical to SEQ ID NO: 187049
  derived and/or modified CDS sequence (opt4) from hemagglutinin__InfluenzaB__AHL93290

SEQ ID NO: 188103 - RNA, 1758 nt, Artificial Sequence
  derived and/or modified CDS sequence (opt4) from hemagglutinin__InfluenzaB__AHL93301
augaaggccaucaucgugcugcugaugguggugaccagcaacgccgacagaaucugcaccggcaucaccagcagcaacagcccccacguggugaagaccgccacccagggcgaggugaacgugaccggcgugaucccccugaccaccacccccaccaagagccacuucgccaaccugaagggcaccgagaccagaggcaagcugugccccaagugccugaacugcaccgaccuggacguggcccugggcagacccaagugcaccggcaagauccccagcgccagagugagcauccugcacgaggugagacccgugaccagcggcugcuuccccaucaugcacgacagaaccaagaucagacagcugcccaaccugcugagaggcuacgagcacaucagacugagcacccacaacgugaucaacgccgagaacgcccccggcggccccuacaagaucggcaccagcggcagcugccccaacaucaccaacggcaacggcuucuucgccaccauggccugggccgugcccaagaacgacaagaacaagaccgccaccaacccccugaccaucgaggugcccuacaucugcaccgagggcgaggaccagaucaccguguggggcuuccacagcgacaacgagacccagauggccaagcuguacggcgacagcaagccccagaaguucaccagcagcgccaacggcgugaccacccacuacgugagccagaucggcggcuuccccaaccagaccgaggacggcggccugccccagagcggcagaaucgugguggacuacauggugcagaagagcggcaagaccggcaccaucaccuaccagagaggcauccugcugccccagaagguguggugcgccagcggcagaagcaaggugaucaagggcagccugccccugaucggcgaggccgacugccugcacgagaaguacggcggccugaacaagagcaagcccuacuacaccggcgagcacgccaaggccaucggcaacugccccaucugggugaagaccccccugaagcuggccaacggcaccaaguacagaccccccgccaagcugcugaaggagagaggcuucuucggcgccaucgccggcuuccuggagggcggcugggagggcaugaucgccggcuggcacggcuacaccagccacggcgcccacggcguggccguggccgccgaccugaagagcacccaggaggccaucaacaagaucaccaagaaccugaacagccugagcgagcuggaggugaagaaccugcagagacugagcggcgccauggacgagcugcacaacgagauccuggagcuggacgagaagguggacgaccugagagccgacaccaucagcagccagaucgagcuggccgugcugcugagcaacgagggcaucaucaacagcgaggacgagcaccugcuggcccuggagagaaagcugaagaagaugcugggccccagcgccguggagaucggcaacggcugcuucgagaccaagcacaagugcaaccagaccugccuggacagaaucgccgccggcaccuucaacgccggcgaguucagccugcccaccuucgacagccugaacaucaccgccgccagccugaacgacgacggccuggacaaccacaccauccugcuguacuacagcaccgccgccagcagccuggccgugacccugaugaucgccaucuucgugguguacauggugagcagagacaacgugagcugcagcaucugccuguga

SEQ ID NO: 188104 - RNA, 1758 nt, Artificial Sequence
  derived and/or modified CDS sequence (opt4) from hemagglutinin__InfluenzaB__AHL93312
augaaggccaucaucgugcugcugaugguggugaccagcaacgccgacagaaucugcaccggcaucaccagcagcaacagcccccacguggugaagaccgccacccagggcgaggugaacgugaccggcgugaucccccugaccaccacccccaccaagagccacuucgccaaccugaagggcaccgagaccagaggcaagcugugccccaagugccugaacugcaccgaccuggacguggcccugggcagacccaagugcaccggcaagauccccagcgccagagugagcauccugcacgaggugagacccgugaccagcggcugcuuccccaucaugcacgacagaaccaagaucagacagcugcccaaccugcugagaggcuacgagcacaucagacugagcacccacaacgugaucaacgccgagaacgcccccggcggccccuacaagaucggcaccagcggcagcugccccaacaucaccaacggcaacggcuucuacgccaccauggccugggccgugcccaagaacgacaagaacaagaccgccaccaacccccugaccaucgaggugcccuacaucugcaccgagggcgaggaccagaucaccguguggggcuuccacagcgacaacgagacccagauggccaagcuguacggcgacagcaagccccagaaguucaccagcagcgccaacggcgugaccacccacuacgugagccagaucggcggcuuccccaaccagaccgaggacggcggccugccccagagcggcagaaucgugguggacuacauggugcagaagagcggcaagaccggcaccaucaccuaccagagaggcauccugcugccccagaagguguggugcgccagcggcagaagcaaggugaucaagggcagccugccccugaucggcgaggccgacugccugcacgagaaguacggcggccugaacaagagcaagcccuacuacaccggcgagcacgccaaggccaucggcaacugccccaucugggugaagaccccccugaagcuggccaacggcaccaaguacagaccccccgccaagcugcugaaggagagaggcuucuucggcgccaucgccggcuuccuggagggcggcugggagggcaugaucgccggcuggcacggcuacaccagccacggcgcccacggcguggccguggccgccgaccugaagagcacccaggaggccaucaacaagaucaccaagaaccugaacagccugagcgagcuggaggugaagaaccugcagagacugagcggcgccauggacgagcugcacaacgagauccuggagcuggacgagaagguggacgaccugagagccgacaccaucagcagccagaucgagcuggccgugcugcugagcaacgagggcaucaucaacagcgaggacgagcaccugcuggcccuggagagaaagcugaagaagaugcugggccccagcgccguggagaucggcaacggcugcuucgagaccaagcacaagugcaaccagaccugccuggacagaaucgccgccggcaccuucgacgccggcgaguucagccugcccaccuucgacagccugaacaucaccgccgccagccugaacgacgacggccuggacaaccacaccauccugcuguacuacagcaccgccgccagcagccuggccgugacccugaugaucgccaucuucgugguguacauggugagcagagacaacgugagcugcagcaucugccuguga

SEQ ID NO: 188105 - RNA, 1758 nt, Artificial Sequence
  derived and/or modified CDS sequence (opt4) from hemagglutinin__InfluenzaB__AHL93323
augaaggccaucaucgugcugcugaugguggugaccagcaacgccgacagaaucugcaccggcaucaccagcagcaacagcccccacguggugaagaccgccacccagggcgaggugaacgugaccggcgugaucccccugaccaccacccccaccaagagccacuucgccaaccugaagggcaccgagaccagaggcaagcugugccccaagugccugaacugcaccgaccuggacguggcccugggcagacccaagugcaccggcaagauccccagcgccagagugagcauccugcacgaggugagacccgugaccagcggcugcuuccccaucaugcacgacagaaccaagaucagacagcugcccaaccugcugagaggcuacgagcacaucagacugagcacccacaacgugaucaacgccgagaacgcccccggcggccccuacaagaucggcaccagcggcagcugccccaacaucaccaacggcaacggcuucuucgccaccauggccugggccgugcccaagaacgacaagaacaagaccgccaccaacccccugaccaucgaggugcccuacaucugcaccgagggcgaggaccagaucaccguguggggcuuccacagcgacaacgagacccagauggccaagcuguacggcgacagcaagccccagaaguucaccagcagcgccaacggcgugaccacccacuacgugagccagaucggcggcuuccccaaccagaccgaggacggcggccugccccagagcggcagaaucgugguggacuacauggugcagaagagcggcaagaccggcaccaucaccuaccagagaggcauccugcugccccagaagguguggugcaccagcggcagaagcaaggugaucaagggcagccugccccugaucggcgaggccgacugccugcacgagaaguacggcggccugaacaagagcaagcccuacuacaccggcgagcacgccaaggccaucggcaacugccccaucugggugaagaccccccugaagcuggccaacggcaccaaguacagaccccccgccaagcugcugaaggagagaggcuucuucggcgccaucgccggcuuccuggagggcggcugggagggcaugaucgccggcuggcacggcuacaccagccacggcgcccacggcguggccguggccgccgaccugaagagcacccaggaggccaucaacaagaucaccaagaaccugaacagccugagcgagcuggaggugaagaaccugcagagacugagcggcgccauggacgagcugcacaacgagauccuggagcuggacgagaagguggacgaccugagagccgacaccaucagcagccagaucgagcuggccgugcugcugagcaacgagggcaucaucaacagcgaggacgagcaccugcuggcccuggagagaaagcugaagaagaugcugggccccagcgccguggagaucggcaacggcugcuucgagaccaagcacaagugcaaccagaccugccuggacagaaucgccgccggcaccuucgacgccggcgaguucagccugcccaccuucgacagccugaacaucaccgccgccagccugaacgacgacggccuggacaaccacaccauccugcuguacuacagcaccgccgccagcagccuggccgugacccugaugaucgccaucuucgugguguacauggugagcagagacaacgugagcugcagcaucugccuguga

SEQ ID NO: 188106 - RNA, 1758 nt, Artificial Sequence
  derived and/or modified CDS sequence (opt4) from hemagglutinin__InfluenzaB__AHL93334
augaaggccaucaucgugcugcugaugguggugaccagcaacgccgacagaaucugcaccggcaucaccagcagcaacagcccccacguggugaagaccgccacccagggcgaggugaacgugaccggcgugaucccccugaccaccacccccaccaagagccacuucgccaaccugaagggcaccgagaccagaggcaagcugugccccaagugccccaacugcaccgaccuggacguggcccugggcagacccaagugcaccggcaagauccccagcgccagagugagcauccugcacgaggugagacccgugaccagcggcugcuuccccaucaugcacgacagaaccaagaucagacagcugcccaaccugcugagaggcuacgagcacaucagacugagcacccacaacgugaucaacgccgagaacgcccccggcggccccuacaagaucggcaccagcggcagcugccccaacaucaccaacggcaacggcuucuucgccaccauggccugggccgugcccaagaacgacaagaacaagaccgccaccaacccccugaccaucgaggugcccuacaucugcaccgagggcgaggaccagaucaccguguggggcuuccacagcgacaacgagacccagauggccaagcuguacggcgacagcaagccccagaaguucaccagcagcgccaacggcgugaccacccacuacgugagccagaucggcggcuuccccaaccagaccgaggacggcggccugccccagagcggcagaaucgugguggacuacauggugcagaagagcggcaagaccggcaccaucaccuaccagagaggcauccugcugccccagaagguguggugcaccagcggcagaagcaaggugaucaagggcagccugccccugaucggcgaggccgacugccugcacgagaaguacggcggccugaacaagagcaagcccuacuacaccggcgagcacgccaaggccaucggcaacugccccaucugggugaagaccccccugaagcuggccaacggcaccaaguacagaccccccgccaagcugcugaaggagagaggcuucuucggcgccaucgccggcuuccuggagggcggcugggagggcaugaucgccggcuggcacggcuacaccagccacggcgcccacggcguggccguggccgccgaccugaagagcacccaggaggccaucaacaagaucaccaagaaccugaacagccugagcgagcuggaggugaagaaccugcagagacugagcggcgccauggacgagcugcacaacgagauccuggagcuggacgagaagguggacgaccugagagccgacaccaucagcagccagaucgagcuggccgugcugcugagcaacgagggcaucaucaacagcgaggacgagcaccugcuggcccuggagagaaagcugaagaagaugcugggccccagcgccguggagaucggcaacggcugcuucgagaccaagcacaagugcaaccagaccugccuggacagaaucgccgccggcaccuucgacgccggcgaguucagccugcccaccuucgacagccugaacaucaccgccgccagccugaacgacgacggccuggacaaccacaccauccugcuguacuacagcaccgccgccagcagccuggccgugacccugaugaucgccaucuucgugguguacauggugagcagagacaacgugagcugcagcaucugccuguga

SEQ ID NO: 188107 - RNA, 1758 nt, Artificial Sequence; identical to SEQ ID NO: 187049
  derived and/or modified CDS sequence (opt4) from hemagglutinin__InfluenzaB__AHL93345

SEQ ID NO: 188108 - RNA, 1758 nt, Artificial Sequence; identical to SEQ ID NO: 187049
  derived and/or modified CDS sequence (opt4) from hemagglutinin__InfluenzaB__AHL93356

SEQ ID NO: 188109 - RNA, 1758 nt, Artificial Sequence
  derived and/or modified CDS sequence (opt4) from hemagglutinin__InfluenzaB__AHL93367
augaaggccaucaucgugcugcugaugguggugaccagcaacgccgacagaaucugcaccggcaucaccagcagcaacagcccccacguggugaagaccgccacccagggcgaggugaacgugaccggcgugaucccccugaccaccacccccaccaagagccacuucgccaaccugaagggcaccgagaccagaggcaagcugugccccaagugccugaacugcaccgaccuggacguggcccugggcagacccaagugcaccggcaagauccccagcgccagagugagcauccugcacgaggugagacccgugaccagcggcugcuuccccaucaugcacgacagaaccaagaucagacagcugcccaaccugcugagaggcuacgaguacaucagacugagcacccacaacgugaucaacgccgagaacgcccccggcggccccuacaagaucggcaccagcggcagcugccccaacaucaccaacggcaacggcuucuucgccaccauggccugggccgugcccaagaacgacaagaacaagaccgccaccaacccccugaccaucgaggugcccuacaucugcaccgagggcgaggaccagaucaccguguggggcuuccacagcgacaacgagacccagauggccaagcuguacggcgacagcaagccccagaaguucaccagcagcgccaacggcgugaccacccacuacgugagccagaucggcggcuuccccaaccagaccgaggacggcggccugccccagagcggcagaaucgugguggacuacauggugcagaagagcggcaagaccggcaccaucaccuaccagagaggcauccugcugccccagaagguguggugcgccagcggcagaagcaaggugaucaagggcagccugccccugaucggcgaggccgacugccugcacgagaaguacggcggccugaacaagagcaagcccuacuacaccggcgagcacgccaaggccaucggcaacugccccaucugggugaagaccccccugaagcuggccaacggcaccaaguacagaccccccgccaagcugcugaaggagagaggcuucuucggcgccaucgccggcuuccuggagggcggcugggagggcaugaucgccggcuggcacggcuacaccagccacggcgcccacggcguggccguggccgccgaccugaagagcacccaggaggccaucaacaagaucaccaagaaccugaacagccugagcgagcuggaggugaagaaccugcagagacugagcggcgccauggacgagcugcacaacgagauccuggagcuggacgagaagguggacgaccugagagccgacaccaucagcagccagaucgagcuggccgugcugcugagcaacgagggcaucaucaacagcgaggacgagcaccugcuggcccuggagagaaagcugaagaagaugcugggccccagcgccguggagaucggcaacggcugcuucgagaccaagcacaagugcaaccagaccugccuggacagaaucgccgccggcaccuucgacgccggcgaguucagccugcccaccuucgacagccugaacaucaccgccgccagccugaacgacgacggccuggacaaccacaccauccugcuguacuacagcaccgccgccagcagccuggccgugacccugaugaucgccaucuucgugguguacauggugagcagagacaacgugagcugcagcaucugccuguga

SEQ ID NO: 188110 - RNA, 1758 nt, Artificial Sequence; identical to SEQ ID NO: 187049
  derived and/or modified CDS sequence (opt4) from hemagglutinin__InfluenzaB__AHL93378

SEQ ID NO: 188111 - RNA, 1758 nt, Artificial Sequence
  derived and/or modified CDS sequence (opt4) from hemagglutinin__InfluenzaB__AHL93389
augaaggccaucaucgugcugcugaugguggugaccagcaacgccgacagaaucugcaccggcaucaccagcagcaacagcccccacguggugaagaccgccacccagggcgaggugaacgugaccggcgugaucccccugaccaccacccccaccaagagcuacuucgccaaccugaagggcaccgagaccagaggcaagcugugccccaagugccugaacugcaccgaccuggacguggcccugggcagacccaagugcaccggcaagauccccagcgccagagugagcauccugcacgaggugagacccgugaccagcggcugcuuccccaucaugcacgacagaaccaagaucagacagcugcccaaccugcugagaggcuacgagcacaucagacugagcacccacaacgugaucaacgccgagaacgcccccggcggccccuacaagaucggcaccagcggcagcugccccaacaucaccaacggcaacggcuucuucgccaccauggccugggccgugcccaagaacgacaagaacaagaccgccaccaacccccugaccaucgaggugcccuacaucugcaccgagggcgaggaccagaucaccguguggggcuuccacagcgacaacgagacccagauggccaagcuguacggcgacagcaagccccagaaguucaccagcagcgccaacggcgugaccacccacuacgugagccagaucggcggcuuccccaaccagaccgaggacggcggccugccccagagcggcagaaucgugguggacuacauggugcagaagagcggcaagaccggcaccaucaccuaccagagaggcauccugcugccccagaagguguggugcgccagcggcagaagcaaggugaucaagggcagccugccccugaucggcgaggccgacugccugcacgagaaguacggcggccugaacaagagcaagcccuacuacaccggcgagcacgccaaggccaucggcaacugccccaucugggugaagaccccccugaagcuggccaacggcaccaaguacagaccccccgccaagcugcugaaggagagaggcuucuucggcgccaucgccggcuuccuggagggcggcugggagggcaugaucgccggcuggcacggcuacaccagccacggcgcccacggcguggccguggccgccgaccugaagagcacccaggaggccaucaacaagaucaccaagaaccugaacagccugagcgagcuggaggugaagaaccugcagagacugagcggcgccauggacgagcugcacaacgagauccuggagcuggacgagaagguggacgaccugagagccgacaccaucagcagccagaucgagcuggccgugcugcugagcaacgagggcaucaucaacagcgaggacgagcaccugcuggcccuggagagaaagcugaagaagaugcugggccccagcgccguggagaucggcaacggcugcuucgagaccaagcacaagugcaaccagaccugccuggacagaaucgccgccggcaccuucgacgccggcgaguucagccugcccaccuucgacagccugaacaucaccgccgccagccugaacgacgacggccuggacaaccacaccauccugcuguacuacagcaccgccgccagcagccuggccgugacccugaugaucgccaucuucgugguguacauggugagcagagacaacgugagcugcagcaucugccuguga

SEQ ID NO: 188112 - RNA, 1758 nt, Artificial Sequence; identical to SEQ ID NO: 187049
  derived and/or modified CDS sequence (opt4) from hemagglutinin__InfluenzaB__AHL93400

SEQ ID NO: 188113 - RNA, 1758 nt, Artificial Sequence; identical to SEQ ID NO: 187382
  derived and/or modified CDS sequence (opt4) from hemagglutinin__InfluenzaB__AHL93411

SEQ ID NO: 188114 - RNA, 1758 nt, Artificial Sequence; identical to SEQ ID NO: 187382
  derived and/or modified CDS sequence (opt4) from hemagglutinin__InfluenzaB__AHL93422

SEQ ID NO: 188115 - RNA, 1758 nt, Artificial Sequence; identical to SEQ ID NO: 187382
  derived and/or modified CDS sequence (opt4) from hemagglutinin__InfluenzaB__AHL93433

SEQ ID NO: 188116 - RNA, 1758 nt, Artificial Sequence; identical to SEQ ID NO: 187049
  derived and/or modified CDS sequence (opt4) from hemagglutinin__InfluenzaB__AHL93444

SEQ ID NO: 188117 - RNA, 1758 nt, Artificial Sequence
  derived and/or modified CDS sequence (opt4) from hemagglutinin__InfluenzaB__AHL93455
augaaggccaucaucgugcugcugaugguggugaccagcaacgccgacagaaucugcaccggcaucaccagcagcaacagcccccacguggugaagaccgccacccagggcgaggugaacgugaccggcgugaucccccugaccaccacccccaccaagagccacuucgccaaccugaagggcaccgagaccagaggcaagcugugccccaagugccugaacugcaccgaccuggacguggcccugggcagacccaagugcaccggcaagauccccagcgccagagugagcauccugcacgaggugagacccgugaccagcggcugcuuccccaucaugcacgacagaaccaagaucagacagcugcccaaccugcugagaggcuacgagcacaucagacugagcacccacaacgugaucaacgccgagaacgcccccggcggccccuacaagaucggcaccagcggcagcugccccaacaucaccaacggcaacggcuucuucgccaccauggccugggccgugcccaagaacgacaagaacaagaccgccaccaacccccugaccaucgaggugcccuacaucugcaccgagggcgaggaccagaucaccguguggggcuuccacagcgacaacgagacccagauggccaagcuguacggcgacagcaagccccagaaguucaccagcagcgccaacggcgugaccacccacuacgugagccagaucggcggcuuccccaaccagaccgaggacggcggccugccccagagcggcagaaucgugguggacuacauggugcagaagagcggcaagaccggcaccaucaccuaccagagaggcauccugcugccccagaagguguggugcgccagcggcagaagcaaggugaucaagggcagccugccccugaucggcgaggccgacugccugcacgagaaguacggcggccugaacaagagcaagcccuacuacaccggcgagcacgccaaggccaucggcaacugccccaucugggugaagaccccccugaagcuggccaacggcaccaaguacagaccccccgccaagcugcugaaggagagaggcuucuucggcgccaucgccggcuuccuggagggcggcugggagggcaugaucgccggcuggcacggcuacaccagccacggcgcccacggcguggccguggccgccgaccugaagagcacccaggaggccaucaacaagaucaccaagaaccugaacagccugagcgagcuggaggugaagaaccugcagagacugagcggcgccaugaacgagcugcacaacgagauccuggagcuggacgagaagguggacgaccugagagccgacaccaucagcagccagaucgagcuggccgugcugcugagcaacgagggcaucaucaacagcgaggacgagcaccugcuggcccuggagagaaagcugaagaagaugcugggccccagcgccguggagaucggcaacggcugcuucgagaccaagcacaagugcaaccagaccugccuggacagaaucgccgccggcaccuucgacgccggcgaguucagccugcccaccuucgacagccugaacaucaccgccgccagccugaacgacgacggccuggacaaccacaccauccugcuguacuacagcaccgccgccagcagccuggccgugacccugaugaucgccaucuucgugguguacauggugagcagagacaacgugagcugcagcaucugccuguga

SEQ ID NO: 188118 - RNA, 1758 nt, Artificial Sequence; identical to SEQ ID NO: 187049
  derived and/or modified CDS sequence (opt4) from hemagglutinin__InfluenzaB__AHL93466

SEQ ID NO: 188119 - RNA, 1758 nt, Artificial Sequence; identical to SEQ ID NO: 186668
  derived and/or modified CDS sequence (opt4) from hemagglutinin__InfluenzaB__AHL93477

SEQ ID NO: 188120 - RNA, 1758 nt, Artificial Sequence; identical to SEQ ID NO: 186743
  derived and/or modified CDS sequence (opt4) from hemagglutinin__InfluenzaB__AHL93488

SEQ ID NO: 188121 - RNA, 1755 nt, Artificial Sequence
  derived and/or modified CDS sequence (opt4) from hemagglutinin__InfluenzaB__AHL93499
augaaggccaucaucgugcugcugaugguggugaccagcaacgccgacagaaucugcaccggcaucaccagcagcaacagcccccacguggugaagaccgccacccagggcgaggugaacgugaccggcgugaucccccugaccaccacccccaccaagagcuacuucgccaaccugaagggcaccagaaccagaggcaagcugugccccgacugccugaacugcaccgaccuggacguggcccugggcagacccaugugcgugggcaccacccccagcgccaaggccagcauccugcacgagaucagacccgugaccagcggcugcuuccccaucaugcacgacagaaccaagaucagacagcugcccaaccugcugagaggcuacgagaacaucagacugagcacccagaacgugaucgacgccgagaaggcccccggcggccccuacagacugggcaccagcggcagcugccccaacgccaccagcaagaucggcuucuucgccaccauggccugggccgugcccaaggacaacuacaagaacgccaccaacccccugaccguggaggugcccuacaucugcaccgagggcgaggaccagaucaccguguggggcuuccacagcgacaacaagacccagaugaagaaccuguacggcgacagcaacccccagaaguucaccagcagcgccaacggcgugaccgcccacuacgugagccagaucggcgacuuccccgaccagaccgaggacggcggccugccccagagcggcagaaucgugguggacuacaugaugcagaagcccggcaagaccggcaccaucguguaccagagaggcgugcugcugccccagaagguguggugcgccagcggcagaagcaaggugaucaagggcagccugccccugaucggcgaggccgacugccugcacgagaaguacggcggccugaacaagagcaagcccuacuacaccggcgagcacgccaaggccaucggcaacugccccaucugggugaagaccccccugaagcuggccaacggcaccaaguacagaccccccgccaagcugcugaaggagagaggcuucuucggcgccaucgccggcuuccuggagggcggcugggagggcaugaucgccggcuggcacggcuacaccagccacggcgcccacggcguggccguggccgccgaccugaagagcacccaggaggccaucaacaagaucaccaagaaccugaacagccugagcgagcuggaggugaagaaccugcagagacugagcggcgccauggacgagcugcacaacgagauccuggagcuggacgagaagguggacgaccugagagccgacaccaucagcagccagaucgagcuggccgugcugcugagcaacgagggcaucaucaacagcgaggacgagcaccugcuggcccuggagagaaagcugaagaagaugcugggccccagcgccguggacaucggcaacggcugcuucgagaccaagcacaagugcaaccagaccugccuggacagaaucgccgccggcaccuucaacgccggcgaguucagccugcccaccuucgacagccugaacaucaccgccgccagccugaacgacgacggccuggacaaccacaccauccugcuguacuacagcaccgccgccagcagccuggccgugacccugaugcuggccaucuucaucguguacauggugagcagagacaacgugagcugcagcaucugccuguga

SEQ ID NO: 188122 - RNA, 1758 nt, Artificial Sequence; identical to SEQ ID NO: 186668
  derived and/or modified CDS sequence (opt4) from hemagglutinin__InfluenzaB__AHL93510

SEQ ID NO: 188123 - RNA, 1755 nt, Artificial Sequence
  derived and/or modified CDS sequence (opt4) from hemagglutinin__InfluenzaB__AHL93521
augaaggccaucaucgcccugcugaugguggugaccagcaacgccgacagaaucugcaccggcaucaccagcagcaacagcccccacguggugaagaccgccacccagggcgaggugaacgugaccggcgugaucccccugaccaccacccccaccaagagcuacuucgccaaccugaagggcaccagaaccagaggcaagcugugccccgacugccugaacugcaccgaccuggacguggcccugggcagacccaugugcgugggcaccacccccagcgccaaggccagcauccugcacgaggugagacccgugaccagcggcugcuuccccaucaugcacgacagaaccaagaucagacagcugcccaaccugcugagaggcuacgagaacaucagacugagcacccagaacgugaucgacgccgagaaggcccccggcggccccuacagacugggcaccagcggcagcugccccaacgccaccagcaagaucggcuucuucgccaccauggccugggccgugcccaaggacaacuacaagaacgccaccaacccccugaccguggaggugcccuacaucugcaccgagggcgaggaccagaucaccguguggggcuuccacagcgacaacaagacccagaugaagaaccuguacggcgacagcaacccccagagauucaccagcagcgccaacggcgugaccacccacuacgugagccagaucggcgacuuccccgaccagaccgaggacggcggccugccccagagcggcagaaucgugguggacuacauggugcagaagcccggcaagaccggcaccaucguguaccagagaggcgugcugcugccccagaagguguggugcgccagcggcagaagcaaggugaucaagggcagccugccccugaucggcgaggccgacugccugcacgagaaguacggcggccugaacaagagcaagcccuacuacaccggcgagcacgccaaggccaucggcaacugccccaucugggugaagaccccccugaagcuggccaacggcaccaaguacagaccccccgccaagcugcugaaggagagaggcuucuucggcgccaucgccggcuuccuggagggcggcugggagggcaugaucgccggcuggcacggcuacaccagccacggcgcccacggcguggccguggccgccgaccugaagagcacccaggaggccaucaacaagaucaccaagaaccugaacagccugagcgagcuggaggugaagaaccugcagagacugagcggcgccauggacgagcugcacaacgagauccuggagcuggacgagaagguggacgaccugagagccgacaccaucagcagccagaucgagcuggccgugcugcugagcaacgagggcaucaucaacagcgaggacgagcaccugcuggcccuggagagaaagcugaagaagaugcugggccccagcgccguggacaucggcaacggcugcuucgagaccaagcacaagugcaaccagaccugccuggacagaaucgccgccggcaccuucaacgccggcgaguucagccugcccaccuucgacagccugaacaucaccgccgccagccugaacgacgacggccuggacaaccacaccauccugcuguacuacagcaccgccgccagcagccuggccgugacccugaugcuggccaucuucaucguguacauggugagcagagacaacgugagcugcagcaucugccuguga

SEQ ID NO: 188124 - RNA, 1758 nt, Artificial Sequence; identical to SEQ ID NO: 186743
  derived and/or modified CDS sequence (opt4) from hemagglutinin__InfluenzaB__AHL93532

SEQ ID NO: 188125 - RNA, 1758 nt, Artificial Sequence; identical to SEQ ID NO: 186705
  derived and/or modified CDS sequence (opt4) from hemagglutinin__InfluenzaB__AHL93543

SEQ ID NO: 188126 - RNA, 1758 nt, Artificial Sequence; identical to SEQ ID NO: 186705
  derived and/or modified CDS sequence (opt4) from hemagglutinin__InfluenzaB__AHL93554

SEQ ID NO: 188127 - RNA, 1758 nt, Artificial Sequence; identical to SEQ ID NO: 186705
  derived and/or modified CDS sequence (opt4) from hemagglutinin__InfluenzaB__AHL93565

SEQ ID NO: 188128 - RNA, 1758 nt, Artificial Sequence; identical to SEQ ID NO: 186743
  derived and/or modified CDS sequence (opt4) from hemagglutinin__InfluenzaB__AHL93576

SEQ ID NO: 188129 - RNA, 1758 nt, Artificial Sequence; identical to SEQ ID NO: 186743
  derived and/or modified CDS sequence (opt4) from hemagglutinin__InfluenzaB__AHL93587

SEQ ID NO: 188130 - RNA, 1758 nt, Artificial Sequence
  derived and/or modified CDS sequence (opt4) from hemagglutinin__InfluenzaB__AHL93609
augaaggccaucaucgugcugcugaugguggugaccagcaacgccgacagaaucugcaccggcaucaccagcagcaacagcccccacguggugaagaccgccacccagggcgaggugaacgugaccggcgugaucccccugaccaccacccccaccaagagccacuucgccaaccugaagggcaccgagaccagaggcaagcugugccccaagugccccaacugcaccgaccuggacguggcccugggcagacccaagugcaccggcaagauccccagcgccagagugagcauccugcacgaggugagacccgugaccagcggcugcuuccccaucaugcacgacagaaccaagaucagacagcugcccaaccugcugagaggcuacgagcacaucagacugagcacccacaacgugaucaacgccgagaacgcccccggcggccccuacaagaucggcaccagcggcagcugccccaacgugaccaacggcaacggcuucuucgccaccauggccugggccgugcccaagaacgacaagaacaagaccgccaccaacccccugaccaucgaggugcccuacaucugcaccgagggcgaggaccagaucaccguguggggcuuccacagcgacaacgagacccagauggccaagcuguacggcgacagcaagccccagaaguucaccagcagcgccaacggcgugaccacccacuacgugagccagaucggcggcuuccccaaccagaccgaggacggcggccugccccagagcggcagaaucgugguggacuacauggugcagaagagcggcaagaccggcaccaucaccuaccagagaggcauccugcugccccagaagguguggugcgccagcggcagaagcaaggugaucaagggcagccugccccugaucggcgaggccgacugccugcacgagaaguacggcggccugaacaagagcaagcccuacuacaccggcgagcacgccaaggccaucggcaacugccccaucugggugaagaccccccugaagcuggccaacggcaccaaguacagaccccccgccaagcugcugaccgagagaggcuucuucggcgccaucgccggcuuccuggagggcggcugggagggcaugaucgccggcuggcacggcuacaccagccacggcgcccacggcguggccguggccgccgaccugaagagcacccaggaggccaucaacaagaucaccaagaaccugaacagccugagcgagcuggaggugaagaaccugcagagacugagcggcgccauggacgagcugcacaacgagauccuggagcuggacgagaagguggacgaccugagagccgacaccaucagcagccagaucgagcuggccgugcugcugagcaacgagggcaucaucaacagcgaggacgagcaccugcuggcccuggagagaaagcugaagaagaugcugggccccagcgccguggagaucggcaacggcugcuucgagaccaagcacaagugcaaccagaccugccuggacagaaucgccgccggcaccuucgacgccggcgaguucagccugcccaccuucgacagccugaacaucaccgccgccagccugaacgacgacggccuggacaaccacaccauccugcuguacuacagcaccgccgccagcagccuggccgugacccugaugaucgccaucuucgugguguacauggugagcagagacaacgugagcugcagcaucugccuguga

SEQ ID NO: 188131 - RNA, 1758 nt, Artificial Sequence; identical to SEQ ID NO: 186743
  derived and/or modified CDS sequence (opt4) from hemagglutinin__InfluenzaB__AHL93620

SEQ ID NO: 188132 - RNA, 1758 nt, Artificial Sequence; identical to SEQ ID NO: 188130
  derived and/or modified CDS sequence (opt4) from hemagglutinin__InfluenzaB__AHL93631

SEQ ID NO: 188133 - RNA, 1758 nt, Artificial Sequence; identical to SEQ ID NO: 188130
  derived and/or modified CDS sequence (opt4) from hemagglutinin__InfluenzaB__AHL93642

SEQ ID NO: 188134 - RNA, 1755 nt, Artificial Sequence
  derived and/or modified CDS sequence (opt4) from hemagglutinin__InfluenzaB__AHL93653
augaaggccaucaucgugcugcugaugguggugaccagcaacgccgacagaaucugcaccggcaucaccagcagcaacagcccccacguggugaagaccgccacccagggcgaggugaacgugaccggcgugaucccccugaccaccacccccaccaagagcuacuucgccaaccugaagggcaccagaaccagaggcaagcugugccccgacugccugaacugcaccgaccuggacguggcccugggcagacccaugugcgugggcaccacccccagcgccaaggccagcauccugcacgaggugagacccgugaccagcggcugcuuccccaucaugcacgacagaaccaagaucagacagcugcccaaccugcugagaggcuacgagaacaucagacugagcacccagaacgugaucgacgccgagaaggcccccggcggccccuacagacugggcaccagcggcagcugccccaacgccaccagcaagaucggcuucuucgccaccauggccugggccgugcccaaggacaacuacaagaacgccaccaacccccugaccguggaggugcccuacaucugcaccgagggcgaggaccagaucaccguguggggcuuccacagcgacaacaagacccagaugaagaaccuguacggcgacagcaacccccagaaguucaccagcagcgccaacggcgugaccacccacuacgugagccagaucggcgacuuccccgaccagaccgaggacggcggccugccccagagcggcagaaucgugguggacuacauggugcagaagcccggcaagaccggcaccaucguguaccagagaggcgugcugcugccccagaagguguggugcgccagcggcagaagcaaggugaucaagggcagccugccccugaucggcgaggccgacugccugcacgagaaguacggcggccugaacaagagcaagcccuacuacaccggcgagcacgccaaggccaucggcgacugccccaucugggugaagaccccccugaagcuggccaacggcaccaaguacagaccccccgccaagcugcugaaggagagaggcuucuucggcgccaucgccggcuuccuggagggcggcugggagggcaugaucgccggcuggcacggcuacaccagccacggcgcccacggcguggccguggccgccgaccugaagagcacccaggaggccaucaacaagaucaccaagaaccugaacagccugagcgagcuggaggugaagaaccugcagagacugagcggcgccauggacgagcugcacaacgagauccuggagcuggacgagaagguggacgaccugagagccgacaccaucagcagccagaucgagcuggccgugcugcugagcaacgagggcaucaucaacagcgaggacgagcaccugcuggcccuggagagaaagcugaagaagaugcugggccccagcgccguggacaucggcaacggcugcuucgagaccaagcacaagugcaaccagaccugccuggacagaaucgccgccggcaccuucaacgccggcgaguucagccugcccaccuucgacagccugaacaucaccgccgccagccugaacgacgacggccuggacaaccacaccauccugcuguacuacagcaccgccgccagcagccuggccgugacccugaugcuggccaucuucaucguguacauggugagcagagacaacgugagcugcagcaucugccuguga

SEQ ID NO: 188135 - RNA, 1758 nt, Artificial Sequence; identical to SEQ ID NO: 186743
  derived and/or modified CDS sequence (opt4) from hemagglutinin__InfluenzaB__AHL93664

SEQ ID NO: 188136 - RNA, 1758 nt, Artificial Sequence; identical to SEQ ID NO: 186668
  derived and/or modified CDS sequence (opt4) from hemagglutinin__InfluenzaB__AHL93675

SEQ ID NO: 188137 - RNA, 1758 nt, Artificial Sequence; identical to SEQ ID NO: 188130
  derived and/or modified CDS sequence (opt4) from hemagglutinin__InfluenzaB__AHL93686

SEQ ID NO: 188138 - RNA, 1758 nt, Artificial Sequence; identical to SEQ ID NO: 188130
  derived and/or modified CDS sequence (opt4) from hemagglutinin__InfluenzaB__AHL93697

SEQ ID NO: 188139 - RNA, 1758 nt, Artificial Sequence
  derived and/or modified CDS sequence (opt4) from hemagglutinin__InfluenzaB__AHL93708
augaaggccaucaucgugcugcugaugguggugaccagcaacgccgacagaaucugcaccggcaucaccagcagcaacagcccccacguggugaagaccgccacccagggcgaggugaacgugaccggcgugaucccccugaccaccacccccaccaagagccacuucgccaaccugaagggcaccgagaccagaggcaagcugugccccaagugccccaacugcaccgaccuggacguggcccugggcagacccaagugcaccggcaagauccccagcgccagagugagcauccugcacgaggugagacccgugaccagcggcugcuuccccaucaugcacgacagaaccaagaucagacagcugcccaaccugcugagaggcuacgagcacaucagacugagcacccacaacgugaucaacgccgagaacgcccccggcggccccuacaagaucggcaccagcggcagcugccccaacgugaccaacggcaacggcuucuucgccaccauggccugggccgugcccaagaacgacaagaacaagaccgccaccaacccccugaccaucgaggugcccuacaucugcaccgagggcgaggaccagaucaccguguggggcuuccacagcgacaacgagacccagauggccaagcuguacggcgacagcaagccccagaaguucaccagcagcgccaacggcgugaccacccacuacgugagccagaucggcggcuuccccaaccagaccgaggacggcggccugccccagagcggcagaaucgugguggacuacauggugcagaagagcggcaagaccggcaccaucaccuaccagagaggcauccugcugccccagaagguguggugcgccagcggcagaagcaaggugaucaagggcagccugccccugaucggcgaggccgacugccugcacgagaaguacggcggccugaacaagagcaagcccuacuacaccggcaagcacgccaaggccaucggcaacugccccaucugggugaagaccccccugaagcuggccaacggcaccaaguacagaccccccgccaagcugcugaccgagagaggcuucuucggcgccaucgccggcuuccuggagggcggcugggagggcaugaucgccggcuggcacggcuacaccagccacggcgcccacggcguggccguggccgccgaccugaagagcacccaggaggccaucaacaagaucaccaagaaccugaacagccugagcgagcuggaggugaagaaccugcagagacugagcggcgccauggacgagcugcacaacgagauccuggagcuggacgagaagguggacgaccugagagccgacaccaucagcagccagaucgagcuggccgugcugcugagcaacgagggcaucaucaacagcgaggacgagcaccugcuggcccuggagagaaagcugaagaagaugcugggccccagcgccguggagaucggcaacggcugcuucgagaccaagcacaagugcaaccagaccugccuggacagaaucgccgccggcaccuucgacgccggcgaguucagccugcccaccuucgacagccugaacaucaccgccgccagccugaacgacgacggccuggacaaccacaccauccugcuguacuacagcaccgccgccagcagccuggccgugacccugaugaucgccaucuucgugguguacauggugagcagagacaacgugagcugcagcaucugccuguga

SEQ ID NO: 188140 - RNA, 1758 nt, Artificial Sequence
  derived and/or modified CDS sequence (opt4) from hemagglutinin__InfluenzaB__AHL93719
augaaggccaucaucgugcugcugaugguggugaccagcaacgccgacagaaucugcaccggcaucaccagcagcaacagcccccacaucgugaagaccgccacccagggcgaggugaacgugaccggcgugaucccccugaccaccacccccaccaagagccacuucgccaaccugaagggcaccgagaccagaggcaagcugugccccaagugccugaacugcaccgaccuggacguggcccugggcagacccaagugcaccggcaagauccccagcgccagagugagcauccugcacgaggugauccccgugaccagcggcugcuuccccaucaugcacgacagaaccaagaucagacagcugcccaaccugcugagaggcuacgagcacaucagacugagcacccacaacgugaucaacgccgagaacgcccccggcggccccuacaagaucggcaccagcggcagcugccccaacaucaccaacggcaacggcuucuucgccaccauggccugggccgugcccaagaacgacaagaacaagaccgccaccaacccccugaccaucgaggugcccuacaucugcaccgagggcgaggaccagaucaccguguggggcuuccacagcgacaacgagacccagauggccaagcuguacggcgacagcaagccccagaaguucaccagcagcgccaacggcgugaccacccacuacgugagccagaucggcggcuuccccaaccagaccgaggacggcggccugccccagagcggcagaaucgugguggacuacauggugcagaagagcggcaagaccggcaccaucaccuaccagagaggcauccugcugccccagaagguguggugcgccagcggcagaagcaaggugaucaagggcagccugccccugaucggcgaggccgacugccugcacgagaaguacggcggccugaacaagagcaagcccuacuacaccggcgagcacgccaaggccaucggcaacugccccaucugggugaagaccccccugaagcuggccaacggcaccaaguacagaccccccgccaagcugcugaaggagagaggcuucuucggcgccaucgccggcuuccuggagggcggcugggagggcaugaucgccggcuggcacggcuacaccagccacggcgcccacggcguggccguggccgccgaccugaagagcacccaggaggccaucaacaagaucaccaagaaccugaacagccugagcgagcuggaggugaagaaccugcagagacugagcggcgccauggacgagcugcacaacgagauccuggagcuggacgagaagguggacgaccugagagccgacaccaucagcagccagaucgagcuggccgugcugcugagcaacgagggcaucaucaacagcgaggacgagcaccugcuggcccuggagagaaagcugaagaagaugcugggccccagcgccguggagaucggcaacggcugcuucgagaccaagcacaagugcaaccagaccugccuggacagaaucgccgccggcaccuucgacgccggcgaguucagccugcccaccuucgacagccugaacaucaccgccgccagccugaacgacgacggccuggacaaccacaccauccugcuguacuacagcaccgccgccagcagccuggccgugacccugaugaucgccaucuucgugguguacauggugagcagagacaacgugagcugcagcaucugccuguga

SEQ ID NO: 188141 - RNA, 1758 nt, Artificial Sequence; identical to SEQ ID NO: 186743
  derived and/or modified CDS sequence (opt4) from hemagglutinin__InfluenzaB__AHL93730

SEQ ID NO: 188142 - RNA, 1758 nt, Artificial Sequence; identical to SEQ ID NO: 186743
  derived and/or modified CDS sequence (opt4) from hemagglutinin__InfluenzaB__AHL93741

SEQ ID NO: 188143 - RNA, 1758 nt, Artificial Sequence; identical to SEQ ID NO: 186705
  derived and/or modified CDS sequence (opt4) from hemagglutinin__InfluenzaB__AHL93752

SEQ ID NO: 188144 - RNA, 1758 nt, Artificial Sequence; identical to SEQ ID NO: 188130
  derived and/or modified CDS sequence (opt4) from hemagglutinin__InfluenzaB__AHL93763

SEQ ID NO: 188145 - RNA, 1758 nt, Artificial Sequence; identical to SEQ ID NO: 186668
  derived and/or modified CDS sequence (opt4) from hemagglutinin__InfluenzaB__AHL93774

SEQ ID NO: 188146 - RNA, 1758 nt, Artificial Sequence; identical to SEQ ID NO: 188130
  derived and/or modified CDS sequence (opt4) from hemagglutinin__InfluenzaB__AHL93785

SEQ ID NO: 188147 - RNA, 1758 nt, Artificial Sequence; identical to SEQ ID NO: 186743
  derived and/or modified CDS sequence (opt4) from hemagglutinin__InfluenzaB__AHL93796

SEQ ID NO: 188148 - RNA, 1758 nt, Artificial Sequence; identical to SEQ ID NO: 186668
  derived and/or modified CDS sequence (opt4) from hemagglutinin__InfluenzaB__AHL93818

SEQ ID NO: 188149 - RNA, 1758 nt, Artificial Sequence
  derived and/or modified CDS sequence (opt4) from hemagglutinin__InfluenzaB__AHL93829
augaaggccaucaucgugcugcugaugguggugaccagcaacgccgacagaaucugcaccggcaucaccagcagcaacagcccccacaucgugaagaccgccacccagggcgaggugaacgugaccggcgugaucccccugaccaccacccccaccaagagccacuucgccaaccugaagggcaccgagaccagaggcaagcugugccccaagugccugaacugcaccgaccuggacguggcccugggcagacccaagugcaccggcaagauccccagcgccagagugagcauccugcacgaggugagacccgugaccagcggcugcuuccccaucaugcacgacagaaccaagaucagacagcugcccaaccugcugagaggcuacgagcacaucagacugagcacccacaacgugaucaacaccgagaacgcccccggcggccccuacaagaucggcaccagcggcagcugccccaacaucaccaacggcaacggcuucuucgccaccauggccugggccgugcccaagaacgacaagaacaagaccgccaccaacccccugaccaucgaggugcccuacaucugcaccgagggcgaggaccagaucaccguguggggcuuccacagcgacaacgagacccagauggccaagcuguacggcgacagcaagccccagaaguucaccagcagcgccaacggcgugaccacccacuacgugagccagaucggcggcuuccccaaccagaccgaggacggcggccugccccagagcggcagaaucgugguggacuacauggugcagaagagcggcaagaccggcaccaucaccuaccagagaggcauccugcugccccagaagguguggugcgccagcggcagaagcaaggugaucaagggcagccugccccugaucggcgaggccgacugccugcacgagaaguacggcggccugaacaagagcaagcccuacuacaccggcgagcacgccaaggccaucggcaacugccccaucugggugaagaccccccugaagcuggccaacggcaccaaguacagaccccccgccaagcugcugaaggagagaggcuucuucggcgccaucgccggcuuccuggagggcggcugggagggcaugaucgccggcuggcacggcuacaccagccacggcgcccacggcguggccguggccgccgaccugaagagcacccaggaggccaucaacaagaucaccaagaaccugaacagccugagcgagcuggaggugaagaaccugcagagacugagcggcgccauggacgagcugcacaacgagauccuggagcuggacgagaagguggacgaccugagagccgacaccaucagcagccagaucgagcuggccgugcugcugagcaacgagggcaucaucaacagcgaggacgagcaccugcuggcccuggagagaaagcugaagaagaugcugggccccagcgccguggagaucggcaacggcugcuucgagaccaagcacaagugcaaccagaccugccuggacagaaucgccgccggcaccuucgacgccggcgaguucagccugcccaccuucgacagccugaacaucaccgccgccagccugaacgacgacggccuggacaaccacaccauccugcuguacuacagcaccgccgccagcagccuggccgugacccugaugaucgccaucuucgugguguacauggugagcagagacaacgugagcugcagcaucugccuguga

SEQ ID NO: 188150 - RNA, 1758 nt, Artificial Sequence; identical to SEQ ID NO: 187049
  derived and/or modified CDS sequence (opt4) from hemagglutinin__InfluenzaB__AHL93840

SEQ ID NO: 188151 - RNA, 1758 nt, Artificial Sequence; identical to SEQ ID NO: 186743
  derived and/or modified CDS sequence (opt4) from hemagglutinin__InfluenzaB__AHL93851

SEQ ID NO: 188152 - RNA, 1758 nt, Artificial Sequence; identical to SEQ ID NO: 186743
  derived and/or modified CDS sequence (opt4) from hemagglutinin__InfluenzaB__AHL93862

SEQ ID NO: 188153 - RNA, 1758 nt, Artificial Sequence
  derived and/or modified CDS sequence (opt4) from hemagglutinin__InfluenzaB__AHL93873
augaaggccaucaucgugcugcugaugguggugaccagcaacgccgacagaaucugcaccggcaucaccagcagcaacagcccccacaucgugaagaccgccacccagggcgaggugaacgugaccggcgugaucccccugaccaccacccccaccaagagccacuucgccaaccugaagggcaccgagaccagaggcgagcugugccccaagugccugaacugcaccgaccuggacguggcccugggcagacccaagugcaccggcaagauccccagcgccagagugagcauccugcacgaggugagacccgugaccagcggcugcuuccccaucaugcacgacagaaccaagaucagacagcugcccaaccugcugagaggcuacgagcacaucagacugagcacccacaacgugaucaacgccgagaacgcccccggcggccccuacaagaucggcaccagcggcagcugccccaacaucaccaacggcaacggcuucuucgccaccauggccugggccgugcccaagaacgacaagaacaagaccgccaccaacccccugaccaucgaggugcccuacaucugcaccgagggcgaggaccagaucaccguguggggcuuccacagcgacaacgagacccagauggccaagcuguacggcgacagcaagccccagaaguucaccagcagcgccaacggcgugaccacccacuacgugagccagaucggcggcuuccccaaccagaccgaggacggcggccugccccagagcggcagaaucgugguggacuacauggugcagaagagcggcaagaccggcaccaucaccuaccagagaggcauccugcugccccagaagguguggugcgccagcggcagaagcaaggugaucaagggcagccugccccugaucggcgaggccgacugccugcacgagaaguacggcggccugaacaagagcaagcccuacuacaccggcgagcacgccaaggccaucggcaacugccccaucugggugaagaccccccugaagcuggccaacggcaccaaguacagaccccccgccaagcugcugaaggagagaggcuucuucggcgccaucgccggcuuccuggagggcggcugggagggcaugaucgccggcuggcacggcuacaccagccacggcgcccacggcguggccguggccgccgaccugaagagcacccaggaggccaucaacaagaucaccaagaaccugaacagccugagcgagcuggaggugaagaaccugcagagacugagcggcgccauggacgagcugcacaacgagauccuggagcuggacgagaagguggacgaccugagagccgacaccaucagcagccagaucgagcuggccgugcugcugagcaacgagggcaucaucaacagcgaggacgagcaccugcuggcccuggagagaaagcugaagaagaugcugggccccagcgccguggagaucggcaacggcugcuucgagaccaagcacaagugcaaccagaccugccuggacagaaucgccgccggcaccuucgacgccggcgaguucagccugcccaccuucgacagccugaacaucaccgccgccagccugaacgacgacggccuggacaaccacaccauccugcuguacuacagcaccgccgccagcagccuggccgugacccugaugaucgccaucuucgugguguacauggugagcagagacaacgugagcugcagcaucugccuguga

SEQ ID NO: 188154 - RNA, 1758 nt, Artificial Sequence; identical to SEQ ID NO: 186743
  derived and/or modified CDS sequence (opt4) from hemagglutinin__InfluenzaB__AHL93884

SEQ ID NO: 188155 - RNA, 1758 nt, Artificial Sequence; identical to SEQ ID NO: 186743
  derived and/or modified CDS sequence (opt4) from hemagglutinin__InfluenzaB__AHL93895

SEQ ID NO: 188156 - RNA, 1758 nt, Artificial Sequence; identical to SEQ ID NO: 186743
  derived and/or modified CDS sequence (opt4) from hemagglutinin__InfluenzaB__AHL93906

SEQ ID NO: 188157 - RNA, 1758 nt, Artificial Sequence; identical to SEQ ID NO: 186743
  derived and/or modified CDS sequence (opt4) from hemagglutinin__InfluenzaB__AHL93917

SEQ ID NO: 188158 - RNA, 1758 nt, Artificial Sequence; identical to SEQ ID NO: 186668
  derived and/or modified CDS sequence (opt4) from hemagglutinin__InfluenzaB__AHL93928

SEQ ID NO: 188159 - RNA, 1758 nt, Artificial Sequence; identical to SEQ ID NO: 186705
  derived and/or modified CDS sequence (opt4) from hemagglutinin__InfluenzaB__AHL93939

SEQ ID NO: 188160 - RNA, 1758 nt, Artificial Sequence; identical to SEQ ID NO: 186743
  derived and/or modified CDS sequence (opt4) from hemagglutinin__InfluenzaB__AHL93950

SEQ ID NO: 188161 - RNA, 1758 nt, Artificial Sequence; identical to SEQ ID NO: 186705
  derived and/or modified CDS sequence (opt4) from hemagglutinin__InfluenzaB__AHL93961

SEQ ID NO: 188162 - RNA, 1758 nt, Artificial Sequence
  derived and/or modified CDS sequence (opt4) from hemagglutinin__InfluenzaB__AHL93972
augaaggccaucaucgugcugcugaugguggugaccagcaccgccgacagaaucugcaccggcaucaccagcagcaacagcccccacguggugaagaccgccacccagggcgaggugaacgugaccggcgugaucccccugaccaccacccccaccaagagccacuucgccaaccugaagggcaccgagaccagaggcaagcugugccccaagugccugaacugcaccgaccuggacguggcccugggcagacccaagugcaccggcaagauccccagcgccagagugagcauccugcacgaggugagacccgugaccagcggcugcuuccccaucaugcacgacagaaccaagaucagacagcugcccaaccugcugagaggcuacgagcacaucagacugagcacccacaacgugaucaacgccgagaacgcccccggcggccccuacaagaucggcaccagcggcagcugccccaacgugaccaacggcaacggcuucuucgccaccauggccugggccgugcccaagaacgacaagaacaagaccgccaccaacccccugaccaucgaggugcccuacaucugcaccgagggcgaggaccagaucaccguguggggcuuccacagcgacaacgagacccagauggccaagcuguacggcgacagcaagccccagaaguucaccagcagcgccaacggcgugaccacccacuacgugagccagaucggcggcuuccccaaccagaccgaggacggcggccugccccagagcggcagaaucgugguggacuacauggugcagaagagcggcaagaccggcaccaucaccuaccagagaggcauccugcugccccagaagguguggugcgccagcggcagaagcaaggugaucaagggcagccugccccugaucggcgaggccgacugccugcacgagaaguacggcggccugaacaagagcaagcccuacuacaccggcgagcacgccaaggccgugggcaacugccccaucugggugaagaccccccugaagcuggccaacggcaccaaguacagaccccccgccaagcugcugaaggagagaggcuucuucggcgccaucgccggcuuccuggagggcggcugggagggcaugaucgccggcuggcacggcuacaccagccacggcgcccacggcguggccguggccgccgaccugaagagcacccaggaggccaucaacaagaucaccaagaaccugaacagccugagcgagcuggaggugaagaaccugcagagacugagcggcgccauggacgagcugcacaacgagauccuggagcuggacgagaagguggacgaccugagagccgacaccaucagcagccagaucgagcuggccgugcugcugagcaacgagggcaucaucaacagcgaggacgagcaccugcuggcccuggagagaaagcugaagaagaugcugggccccagcgccguggagaucggcaacggcugcuucgagaccaagcacaagugcaaccagaccugccuggacagaaucgccgccggcaccuucgacgccggcgaguucagccugcccaccuucgacagccugaacaucaccgccgccagccugaacgacgacggccuggacaaccacaccauccugcuguacuacagcaccgccgccagcagccuggccgugacccugaugaucgccaucuucgugguguacauggugagcagagacaacgugagcugcagcaucugccuguga

SEQ ID NO: 188163 - RNA, 1758 nt, Artificial Sequence; identical to SEQ ID NO: 186668
  derived and/or modified CDS sequence (opt4) from hemagglutinin__InfluenzaB__AHL93983

SEQ ID NO: 188164 - RNA, 1755 nt, Artificial Sequence
  derived and/or modified CDS sequence (opt4) from hemagglutinin__InfluenzaB__AHL93994
augaaggccaucaucgugcugcugaugguggugaccagcaacgccgacagaaucugcaccggcaucaccagcagcaacagcccccacguggugaagaccgccacccagggcgaggugaacgugaccggcgugaucccccugaccaccacccccaagaagagcuacuucgccaaccugaagggcaccaagaccagaggcaagcugugccccgacugccugaacugcaccgaccuggacguggcccugggcagacccaugugcgugggcaccacccccagcgccaaggccagcauccugcacgaggugagacccgugaccagcggcugcuuccccaucaugcacgacagaaccaagaucagacagcuggccaaccugcugagaggcuacgagaacaucagacugagcacccagaacgugaucgacgccgagaaggcccccggcggccccuacagacugggcaccagcggcagcugccccaacgccaccagcaagagcggcuucuucgccaccauggccugggccgugcccaaggacaacaacaagaacgccaccaacccccugaccguggaggugcccuacaucugcgccgagggcgaggaccagaucaccguguggggcuuccacagcgacaacaagacccagaugaagaaccuguacggcgacagcaacccccagaaguucaccagcagcgccaacggcgugaccacccacuacgugagccagaucggcggcuuccccgaccagaccgaggacggcggccugccccagagcggcagaaucgugguggacuacaugaugcagaagcccggcaagaccggcaccaucguguaccagagaggcgugcugcugccccagaagguguggugcgccagcggcagaagcaaggugaucaagggcagccugccccugaucggcgaggccgacugccugcacgagaaguacggcggccugaacaagagcaagcccuacuacaccggcgagcacgccaaggccaucggcaacugccccaucugggugaagaccccccugaagcuggccaacggcaccaaguacagaccccccgccaagcugcugaaggagagaggcuucuucggcgccaucgccggcuuccuggagggcggcugggagggcaugaucgccggcuggcacggcuacaccagccacggcgcccacggcguggccguggccgccgaccugaagagcacccaggaggccaucaacaagaucaccaagaaccugaacagccugagcgagcuggaggugaagaaccugcagagacugagcggcgccauggacgagcugcacaacgagauccuggagcuggacgagaagguggacgaccugagagccgacaccaucagcagccagaucgagcuggccgugcugcugagcaacgagggcaucaucaacagcgaggacgagcaccugcuggcccuggagagaaagcugaagaagaugcugggccccagcgccguggacaucggcaacggcugcuucgagaccaagcacaagugcaaccagaccugccuggacagaaucgccgccggcaccuucaacgccggcgaguucagccugcccaccuucgacagccugaacaucaccgccgccagccugaacgacgacggccuggacaaccacaccauccugcuguacuacagcaccgccgccagcagccuggccgugacccugaugcuggccaucuucaucguguacaugaucagcagagacaacgugagcugcagcaucugccuguga

SEQ ID NO: 188165 - RNA, 1758 nt, Artificial Sequence; identical to SEQ ID NO: 186743
  derived and/or modified CDS sequence (opt4) from hemagglutinin__InfluenzaB__AHL94005

SEQ ID NO: 188166 - RNA, 1758 nt, Artificial Sequence; identical to SEQ ID NO: 186743
  derived and/or modified CDS sequence (opt4) from hemagglutinin__InfluenzaB__AHL94016

SEQ ID NO: 188167 - RNA, 1758 nt, Artificial Sequence
  derived and/or modified CDS sequence (opt4) from hemagglutinin__InfluenzaB__AHL94027
augaaggccaucaucgugcugcugaugguggugaccagcaacgccgacagaaucugcaccggcaucaccagcagcaacagcccccacaucgugaagaccgccacccagggcgaggugaacgugaccggcgugaucccccugaccaccacccccaccaagagccacuucgccaaccugaagggcaccgagaccagaggcaagcugugccccaagugccugaacugcaccgaccuggacguggcccugggcagacccaagugcaccggcaagauccccagcgccagagugagcauccugcacgaggugagacccgugaccagcggcugcuuccccaucaugcacgacagaaccaagaucagacagcugcccaaccugcugagaggcuacgagcacaucagacugagcacccacaacgugaucaacgccgagaacgcccccggcggccccuacaagaucggcaccagcggcagcugccccaacaucaccaacggcaacggcuucuucgccaccauggccugggccgugcccaagaacgacaagaacaagaccgccaccaacccccugaccaucgaggugcccuacaucugcaccgagggcgaggaccagaucaccguguggggcuuccacagcgacaacgagacccagauggccaagcuguacggcgacagcaagccccagaaguucaccagcagcgccaacggcgugaccacccacuacgugagccagaucggcggcuuccccaaccagaccgaggacggcggccugccccagagcggcagaaucgugguggacuacauggugcagaagagcggcaagaccggcaccaucaccuaccagaugggcgugcugcugccccagaagguguggugcgccagcggcagaagcaaggugaucaagggcagccugccccugaucggcgaggccgacugccugcacgagaaguacggcggccugaacaagagcaagcccuacuacaccggcgagcacgccaaggccaucggcaacugccccaucugggugaagaccccccugaagcuggccaacggcaccaaguacagaccccccgccaagcugcugaaggagagaggcuucuucggcgccaucgccggcuuccuggagggcggcugggagggcaugaucgccggcuggcacggcuacaccagccacggcgcccacggcguggccguggccgccgaccugaagagcacccaggaggccaucaacaagaucaccaagaaccugaacagccugagcgagcuggaggugaagaaccugcagagacugagcggcgccauggacgagcugcacaacgagauccuggagcuggacgagaagguggacgaccugagagccgacaccaucagcagccagaucgagcuggccgugcugcugagcaacgagggcaucaucaacagcgaggacgagcaccugcuggcccuggagagaaagcugaagaagaugcugggccccagcgccguggagaucggcaacggcugcuucgagaccaagcacaagugcaaccagaccugccuggacagaaucgccgccggcaccuucgacgccggcgaguucagccugcccaccuucgacagccugaacaucaccgccgccagccugaacgacgacggccuggacaaccacaccauccugcuguacuacagcaccgccgccagcagccuggccgugacccugaugaucgccaucuucgugguguacauggugagcagagacaacgugagcugcagcaucugccuguga

SEQ ID NO: 188168 - RNA, 1758 nt, Artificial Sequence; identical to SEQ ID NO: 186705
  derived and/or modified CDS sequence (opt4) from hemagglutinin__InfluenzaB__AHL94038

SEQ ID NO: 188169 - RNA, 1758 nt, Artificial Sequence; identical to SEQ ID NO: 186668
  derived and/or modified CDS sequence (opt4) from hemagglutinin__InfluenzaB__AHL94049

SEQ ID NO: 188170 - RNA, 1758 nt, Artificial Sequence; identical to SEQ ID NO: 186743
  derived and/or modified CDS sequence (opt4) from hemagglutinin__InfluenzaB__AHL94060

SEQ ID NO: 188171 - RNA, 1758 nt, Artificial Sequence
  derived and/or modified CDS sequence (opt4) from hemagglutinin__InfluenzaB__AHL94071
augaaggccaucaucgugcugcugaugguggugaccagcaacgccgacagaaucugcaccggcaucaccagcagcaacagcccccacaucgugaagaccgccacccagggcgaggugaacgugaccggcgugaucccccugaccaccacccccaccaagagccacuucgccaaccugaagggcaccgagaccagaggcaagcugugccccaagugccugaacugcaccgaccuggacguggcccugggcagacccaagugcaccggcaagauccccagcgccagagugagcauccugcacgaggugagacccgugaccagcggcugcuuccccaucaugcacgacagaaccaagaucagacagcugcccaaccugcugagaggcuacgagcacaucagacugagcacccacaacgugaucaacgccgagaacgcccccggcggccccuacaagaucggcaccagcggcagcugccccaacaucaccaacggcaacggcuucuucgccaccauggccugggccgugcccaagaacgacaagaacaagaccgccaccaacccccugaccaucgaggugcccuacaucugcaccgagggcgaggaccagaucaccguguggggcuuccacagcgacaacgagacccagauggccaagcuguacggcgacagcaagccccagaaguucaccagcagcgccaacggcgugaccacccacuacgugagccagaucggcggcuuccccaaccagaccgaggacggcggccugccccagagcggcagaaucgugguggacuacaugaugcagaagagcggcaagaccggcaccaucaccuaccagagaggcauccugcugccccagaagguguggugcgccagcggcagaagcaaggugaucaagggcagccugccccugaucggcgaggccgacugccugcacgagaaguacggcggccugaacaagagcaagcccuacuacaccggcgagcacgccaaggccaucggcaacugccccaucugggugaagaccccccugaagcuggccaacggcaccaaguacagaccccccgccaagcugcugaaggagagaggcuucuucggcgccaucgccggcuuccuggagggcggcugggagggcaugaucgccggcuggcacggcuacaccagccacggcgcccacggcguggccguggccgccgaccugaagagcacccaggaggccaucagcaagaucaccaagaaccugaacagccugagcgagcuggaggugaagaaccugcagagacugagcggcgccauggacgagcugcacaacgagauccuggagcuggacgagaagguggacgaccugagagccgacaccaucagcagccagaucgagcuggccgugcugcugagcaacgagggcaucaucaacagcgaggacgagcaccugcuggcccuggagagaaagcugaagaagaugcugggccccagcgccguggagaucggcaacggcugcuucgagaccaagcacaagugcaaccagaccugccuggacagaaucgccgccggcaccuucgacgccggcgaguucagccugcccaccuucgacagccugaacaucaccgccgccagccugaacgacgacggccuggacaaccacaccauccugcuguacuacagcaccgccgccagcagccuggccgugacccugaugaucgccaucuucgugguguacauggugagcagagacaacgugagcugcagcaucugccuguga

SEQ ID NO: 188172 - RNA, 1755 nt, Artificial Sequence
  derived and/or modified CDS sequence (opt4) from hemagglutinin__InfluenzaB__AHL94082
augaaggccaucaucgugcugcugaugguggugaccagcaacgccgacagaaucugcaccggcaucaccagcagcaacagcccccacguggugaagaccgccacccagggcgaggugaacgugaccggcgugaucccccugaccaccacccccaccaagagcuacuucgccaaccugaagggcaccagaaccagaggcaagcugugccccgacugccugaacugcaccgaccuggacguggcccugggcagacccaugugcgugggcaccacccccagcgccaaggccagcauccugcacgagaucagacccgugaccagcggcugcuuccccaucaugcacgacagaaccaagaucagacagcugcccaaccugcugagaggcuacgagaacaucagacugagcacccagaacgugaucgacgccgagaaggcccccggcggccccuacagacugggcaccagcggcagcugccccaacgccaccagcaagaucggcuucuucgccaccauggccugggccgugcccaaggacaacuacaagaacgccaccaacccccugaccguggaggugcccuacaucugcaccgagggcgaggaccagaucaccguguggggcuuccacagcgacaacaagacccagaugaagaaccuguacggcgacagcaacccccagaaguucaccagcagcgccaacggcgugaccacccacuacgugagccagaucggcgacuuccccgaccagaccgaggacggcggccugccccagagcggcagaaucgugguggacuacaugaugcagaagcccggcaagaccggcaccaucguguaccagagaggcgugcugcugccccagaagguguggugcgccagcggcagaagcaaggugaucaagggcagccugccccugaucggcgaggccgacugccugcacgagaaguacggcggccugaacaagagcaagcccuacuacaccggcgagcacgccaaggccaucggcaacugccccaucugggugaagaccccccugaagcuggccaacggcaccaaguacagaccccccgccaagcugcugaaggagagaggcuucuucggcgccaucgccggcuuccuggagggcggcugggagggcaugaucgccggcuggcacggcuacaccagccacggcgcccacggcguggccguggccgccgaccugaagagcacccaggaggccaucaacaagaucaccaagaaccugaacagccugagcgagcuggaggugaagaaccugcagagacugagcggcgccauggacgagcugcacaacgagauccuggagcuggacgagaagguggacgaccugagagccgacaccaucagcagccagaucgagcuggccgugcugcugagcaacgagggcaucaucaacagcgaggacgagcaccugcuggcccuggagagaaagcugaagaagaugcugggccccagcgccguggacaucggcaacggcugcuucgagaccaagcacaagugcaaccagaccugccuggacagaaucgccgccggcaccuucaacgccggcgaguucagccugcccaccuucgacagccugaacaucaccgccgccagccugaacgacgacggccuggacaaccacaccauccugcuguacuacagcaccgccgccagcagccuggccgugacccugaugcuggccaucuucaucguguacauggugagcagagacaacgugagcugcagcaucugccuguga

SEQ ID NO: 188173 - RNA, 1758 nt, Artificial Sequence; identical to SEQ ID NO: 186705
  derived and/or modified CDS sequence (opt4) from hemagglutinin__InfluenzaB__AHL94093

SEQ ID NO: 188174 - RNA, 1758 nt, Artificial Sequence; identical to SEQ ID NO: 186743
  derived and/or modified CDS sequence (opt4) from hemagglutinin__InfluenzaB__AHL94102

SEQ ID NO: 188175 - RNA, 1758 nt, Artificial Sequence
  derived and/or modified CDS sequence (opt4) from hemagglutinin__InfluenzaB__AHL94113
augaaggccaucaucgugcugcugaugguggugaccagcaacgccgacagaaucugcaccggcaucaccagcagcaacagcccccacaucgugaagaccgccacccagggcgaggugaacgugaccggcgugaucccccugaccaccacccccaccaagagccacuucgccaaccugaagggcaccgagaccagaggcaagcugugccccaagugccugaacugcaccgaccuggacguggcccugggcagacccaagugcaccggcaagauccccagcgccagagugagcauccugcacgaggugagacccgugaccagcggcugcuuccccaucaugcacgacagaaccaagaucagacagcugcccaaccugcugagaggcuacgagcacaucagacugagcacccacaacgugaucaacgccgagaacgcccccggcggccccuacaagaucggcaccagcggcagcugccugaacaucaccaacggcaacggcuucuucgccaccauggccugggccgugcccaagaacgacaagaacaagaccgccaccaacccccugaccaucgaggugcccuacaucugcaccgagggcgaggaccagaucaccguguggggcuuccacagcgacaacgagacccagauggccaagcuguacggcgacagcaagccccagaaguucaccagcagcgccaacggcgugaccacccacuacgugagccagaucggcggcuuccccaaccagaccgaggacggcggccugccccagagcggcagaaucgugguggacuacauggugcagaagagcggcaagaccggcaccaucaccuaccagagaggcauccugcugccccagaagguguggugcgccagcggcagaagcaaggugaucaagggcagccugccccugaucggcgaggccgacugccugcacgagaaguacggcggccugaacaagagcaagcccuacuacaccggcgagcacgccaaggccaucggcaacugccccaucugggugaagaccccccugaagcuggccaacggcaccaaguacagaccccccgccaagcugcugaaggagagaggcuucuucggcgccaucgccggcuuccuggagggcggcugggagggcaugaucgccggcuggcacggcuacaccagccacggcgcccacggcguggccguggccgccgaccugaagagcacccaggaggccaucaacaagaucaccaagaaccugaacagccugagcgagcuggaggugaagaaccugcagagacugagcggcgccauggacgagcugcacaacgagauccuggagcuggacgagaagguggacgaccugagagccgacaccaucagcagccagaucgagcuggccgugcugcugagcaacgagggcaucaucaacagcgaggacgagcaccugcuggcccuggagagaaagcugaagaagaugcugggccccagcgccguggagaucggcaacggcugcuucgagaccaagcacaagugcaaccagaccugccuggacagaaucgccgccggcaccuucgacgccggcgaguucagccugcccaccuucgacagccugaacaucaccgccgccagccugaacgacgacggccuggacaaccacaccauccugcuguacuacagcaccgccgccagcagccuggccgugacccugaugaucgccaucuucgugguguacauggugagcagagacaacgugagcugcagcaucugccuguga

SEQ ID NO: 188176 - RNA, 1758 nt, Artificial Sequence
  derived and/or modified CDS sequence (opt4) from hemagglutinin__InfluenzaB__AHL94124
augaaggccaucaucgugcugcugaugguggugaccagcaacgccgacagaaucugcaccggcaucaccagcagcaacagcccccacaucgugaagaccgccacccagggcgaggugaacgugaccggcgugaucccccugaccaccacccccaccaagagccacuucgccaaccugaagggcaccgagaccagaggcaagcugugccccaagugccugaacugcaccgaccuggacguggcccugggcagacccaagugcaccggcaagauccccagcgccagagugagcauccugcacgagaucagacccgugaccagcggcugcuuccccaucaugcacgacagaaccaagaucagacagcugcccaaccugcugagaggcuacgagcacaucagacugagcacccacaacgugaucaacgccgagaacgcccccggcggccccuacaagaucggcaccagcggcagcugccccaacaucaccaacggcaacggcuucuucgccaccauggccugggccgugcccaagaacgacaagaacaagaccgccaccaacccccugaccaucgaggugcccuacaucugcaccgagggcgaggaccagaucaccguguggggcuuccacagcgacaacgagacccagauggccaagcuguacggcgacagcaagccccagaaguucaccagcagcgccaacggcgugaccacccacuacgugagccagaucggcggcuuccccaaccagaccgaggacggcggccugccccagagcggcagaaucgugguggacuacauggugcagaagagcggcaagaccggcaccaucaccuaccagagaggcauccugcugccccagaagguguggugcgccagcggcagaagcaaggugaucaagggcagccugccccugaucggcgaggccgacugccugcacgagaaguacggcggccugaacaagagcaagcccuacuacaccggcgagcacgccaaggccaucggcaacugccccaucugggugaagaccccccugaagcuggccaacggcaccaaguacagaccccccgccaagcugcugaaggagagaggcuucuucggcgccaucgccggcuuccuggagggcggcugggagggcaugaucgccggcuggcacggcuacaccagccacggcgcccacggcguggccguggccgccgaccugaagagcacccaggaggccaucaacaagaucaccaagaaccugaacagccugagcgagcuggaggugaagaaccugcagagacugagcggcgccauggacgagcugcacaacgagauccuggagcuggacgagaagguggacgaccugagagccgacaccaucagcagccagaucgagcuggccgugcugcugagcaacgagggcaucaucaacagcgaggacgagcaccugcuggcccuggagagaaagcugaagaagaugcugggccccagcgccguggagaucggcaacggcugcuucgagaccaagcacaagugcaaccagaccugccuggacagaaucgccgccggcaccuucgacgccggcgaguucagccugcccaccuucgacagccugaacaucaccgccgccagccugaacgacgacggccuggacaaccacaccauccugcuguacuacagcaccgccgccagcagccuggccgugacccugaugaucgccaucuucgugguguacauggugagcagagacaacgugagcugcagcaucugccuguga

SEQ ID NO: 188177 - RNA, 1758 nt, Artificial Sequence; identical to SEQ ID NO: 186668
  derived and/or modified CDS sequence (opt4) from hemagglutinin__InfluenzaB__AHL94135

SEQ ID NO: 188178 - RNA, 1758 nt, Artificial Sequence; identical to SEQ ID NO: 186668
  derived and/or modified CDS sequence (opt4) from hemagglutinin__InfluenzaB__AHL94146

SEQ ID NO: 188179 - RNA, 1758 nt, Artificial Sequence; identical to SEQ ID NO: 186743
  derived and/or modified CDS sequence (opt4) from hemagglutinin__InfluenzaB__AHL94157

SEQ ID NO: 188180 - RNA, 1758 nt, Artificial Sequence; identical to SEQ ID NO: 186743
  derived and/or modified CDS sequence (opt4) from hemagglutinin__InfluenzaB__AHL94168

SEQ ID NO: 188181 - RNA, 1758 nt, Artificial Sequence; identical to SEQ ID NO: 186668
  derived and/or modified CDS sequence (opt4) from hemagglutinin__InfluenzaB__AHL94179

SEQ ID NO: 188182 - RNA, 1758 nt, Artificial Sequence; identical to SEQ ID NO: 186668
  derived and/or modified CDS sequence (opt4) from hemagglutinin__InfluenzaB__AHL94190

SEQ ID NO: 188183 - RNA, 1758 nt, Artificial Sequence
  derived and/or modified CDS sequence (opt4) from hemagglutinin__InfluenzaB__AHL94201
augaaggccaucaucgugcugcugaugguggugaccagcaacgccgacagaaucugcaccggcaucaccagcagcaacagcccccacaucgugaagaccgccacccagggcgaggugaacgugaccggcgugaucccccugaccaccacccccaccaagagccacuucgccaaccugaagggcaccgagaccagaggcaagcugugccccaagugccugaacugcaccgaccuggacguggcccugggcagacccaagugcaccggcaagauccccagcgccagagugagcauccugcacgaggugagacccgugaccagcggcugcuuccccaucaugcacgacagaaccaagaucagacagcugcccaaccugcugagaggcuacgagcacaucagacugagcacccacaacgugaucaacgccgagaacgcccccggcggccccuacaagaucggcaccagcggcagcugccccaacaucaccaacggcaacggcuucuucgagaccauggccugggccgugcccaagaacgacaagaacaagaccgccaccaacccccugaccaucgaggugcccuacaucugcaccgagggcgaggaccagaucaccguguggggcuuccacagcgacaacgagacccagauggccaagcuguacggcgacagcaagccccagaaguucaccagcagcgccaacggcgugaccacccacuacgugagccagaucggcggcuuccccaaccagaccgaggacggcggccugccccagagcggcagaaucgugguggacuacauggugcagaagagcggcaagaccggcaccaucaccuaccagagaggcauccugcugccccagaagguguggugcgccagcggcagaagcaaggugaucaagggcagccugccccugaucggcgaggccgacugccugcacgagaaguacggcggccugaacaagagcaagcccuacuacaccggcgagcacgccaaggccaucggcaacugccccaucugggugaagaccccccugaagcuggccaacggcaccaaguacagaccccccgccaagcugcugaaggagagaggcuucuucggcgccaucgccggcuuccuggagggcggcugggagggcaugaucgccggcuggcacggcuacaccagccacggcgcccacggcguggccguggccgccgaccugaagagcacccaggaggccaucaacaagaucaccaagaaccugaacagccugagcgagcuggaggugaagaaccugcagagacugagcggcgccauggacgagcugcacaacgagauccuggagcuggacgagaagguggacgaccugagagccgacaccaucagcagccagaucgagcuggccgugcugcugagcaacgagggcaucaucaacagcgaggacgagcaccugcuggcccuggagagaaagcugaagaagaugcugggccccagcgccguggagaucggcaacggcugcuucgagaccaagcacaagugcaaccagaccugccuggacagaaucgccgccggcaccuucgacgccggcgaguucagccugcccaccuucgacagccugaacaucaccgccgccagccugaacgacgacggccuggacaaccacaccauccugcuguacuacagcaccgccgccagcagccuggccgugacccugaugaucgccaucuucgugguguacauggugagcagaaacaacgugagcugcagcaucugccuguga

SEQ ID NO: 188184 - RNA, 1758 nt, Artificial Sequence
  derived and/or modified CDS sequence (opt4) from hemagglutinin__InfluenzaB__AHL94212
augaaggccaucaucgugcugcugaugguggugaccagcaacgccgacagaaucugcaccggcaucaccagcagcaacagcccccacguggugaagaccgccacccagggcgaggugaacgugaccggcgugaucccccugaccaccacccccaccaagagccacuucgccaaccugaagggcaccgagaccagaggcaagcugugccccaagugccugaacugcaccgaccuggacguggcccugggcagacccaagugcaccggcaagauccccagcgccagagugagcauccugcacgaggugagacccgugaccagcggcugcuuccccaucaugcacgacagaaccaagaucagacagcugcccaaccugcugagaggcuacgagcacaucagacugagcacccacaacgugaucaacgccgagaacgcccccggcggccccuacaagaucggcaccagcggcagcugccccaacgugaccaacggcaacggcuucuucgccaccauggccugggccgugcccaagaacgacaagaacaagaccgccaccaacccccugaccaucgaggugcccuacaucugcaccgagggcgaggaccaggugaccguguggggcuuccacagcgacaacgagacccagauggccaagcuguacggcgacagcaagccccagaaguucaccagcagcgccaacggcgugaccacccacuacgugagccagaucggcggcuuccccaaccagaccgaggacggcggccugccccagagcggcagaaucgugguggacuacauggugcagaagagcggcaagaccggcaccaucaccuaccagagaggcauccugcugccccagaagguguggugcgccagcggcagaagcaaggugaucaagggcagccugccccugaucggcgaggccgacugccugcacgagaaguacggcggccugaacaagagcaagcccuacuacaccggcgagcacgccaaggccaucggcaacugccccaucugggugaagaccccccugaagcuggccaacggcaccaaguacagaccccccgccaagcugcugaaggagagaggcuucuucggcgccaucgccggcuuccuggagggcggcugggagggcaugaucgccggcuggcacggcuacaccagccacggcgcccacggcguggccguggccgccgaccugaagagcacccaggaggccaucaacaagaucaccaagaaccugaacagccugagcgagcuggaggugaagaaccugcagagacugagcggcgccauggacgagcugcacaacgagauccuggagcuggacgagaagguggacgaccugagagccgacaccaucagcagccagaucgagcuggccgugcugcugagcaacgagggcaucaucaacagcgaggacgagcaccugcuggcccuggagagaaagcugaagaagaugcugggccccagcgccguggagaucggcaacggcugcuucgagaccaagcacaagugcaaccagaccugccuggacagaaucgccgccggcaccuucgacgccggcgaguucagccugcccaccuucgacagccugaacaucaccgccgccagccugaacgacgacggccuggacaaccacaccauccugcuguacuacagcaccgccgccagcagccuggccgugacccugaugaucgccaucuucgugguguacauggugagcagagacaacgugagcugcagcaucugccuguga

SEQ ID NO: 188185 - RNA, 1758 nt, Artificial Sequence; identical to SEQ ID NO: 186743
  derived and/or modified CDS sequence (opt4) from hemagglutinin__InfluenzaB__AHL94220

SEQ ID NO: 188186 - RNA, 1758 nt, Artificial Sequence; identical to SEQ ID NO: 186743
  derived and/or modified CDS sequence (opt4) from hemagglutinin__InfluenzaB__AHL94231

SEQ ID NO: 188187 - RNA, 1758 nt, Artificial Sequence
  derived and/or modified CDS sequence (opt4) from hemagglutinin__InfluenzaB__AHL94242
augaaggccaucaucgugcugcugaugguggugaccagcaacgccgacagaaucugcaccggcaucaccagcagcaacagcccccacguggugaagaccgccacccagggcgaggugaacgugaccggcgugaucccccugaccaccacccccaccaagagccacuucgccaaccugaagggcaccgagaccagaggcaagcugugccccaagugccugaacugcaccgaccuggacguggcccugggcagacccaagugcaccggcaagauccccagcgccagagugagcauccugcacgaggugagacccgugaccagcggcugcuuccccaucaugcacgacagaaccaagaucagacagcugcccaaccugcugagaggcuacgagcacaucagacugagcacccacaacgugaucaacgccgagaacgcccccggcggccccuacaagaucggcaccagcggcagcugccccaacgugaccaacggcaacggcuucuucgccaccauggccugggccgugcccaagaacgacaagaacaagaccgccaccaacccccugaccaucgaggugcccuacaucugcaccgagggcgaggaccagaucaccguguggggcuuccacagcgacaacgagacccagauggccaagcuguacggcgacagcaagccccagaaguucaccagcagcgccaacggcgugaccacccacuacgugagccagaucggcggcuuccccaaccagaccgaggacggcggccugccccagagcggcagaaucgugguggacuacauggugcagaagagcggcaagaccggcaccaucaccuaccagagaggcauccugcugccccagaagguguggugcgccaacggcagaagcaaggugaucaagggcagccugccccugaucggcgaggccgacugccugcacgagaaguacggcggccugaacaagagcaagcccuacuacaccggcgagcacgccaaggccaucggcaacugccccaucugggugaagaccccccugaagcuggccaacggcaccaaguacagaccccccgccaagcugcugaaggagagaggcuucuucggcgccaucgccggcuuccuggagggcggcugggagggcaugaucgccggcuggcacggcuacaccagccacggcgcccacggcguggccguggccgccgaccugaagagcacccaggaggccaucaacaagaucaccaagaaccugaacagccugagcgagcuggaggugaagaaccugcagagacugagcggcgccauggacgagcugcacaacgagauccuggagcuggacgagaagguggacgaccugagagccgacaccaucagcagccagaucgagcuggccgugcugcugagcaacgagggcaucaucaacagcgaggacgagcaccugcuggcccuggagagaaagcugaagaagaugcugggccccagcgccguggagaucggcaacggcugcuucgagaccaagcacaagugcaaccagaccugccuggacagaaucgccgccggcaccuucgacgccggcgaguucagccugcccaccuucgacagccugaacaucaccgccgccagccugaacgacgacggccuggacaaccacaccauccugcuguacuacagcaccgccgccagcagccuggccgugacccugaugaucgccaucuucgugguguacauggugagcagagacaacgugagcugcagcaucugccuguga

SEQ ID NO: 188188 - RNA, 1758 nt, Artificial Sequence; identical to SEQ ID NO: 186705
  derived and/or modified CDS sequence (opt4) from hemagglutinin__InfluenzaB__AHL94253

SEQ ID NO: 188189 - RNA, 1755 nt, Artificial Sequence
  derived and/or modified CDS sequence (opt4) from hemagglutinin__InfluenzaB__AHL94274
augaaggccaucaucgugcugcugaugguggugaccagcaacgccgacagaaucugcaccggcaucaccagcagcaacagcccccacguggugaagaccgccacccagggcgaggugaacgugaccggcgugaucccccugaccaccacccccaccaagagcuacuucgccaaccugaagggcaccagaaccagaggcaagcugugccccgacugccugaacugcaccgaccuggacguggcccugggcagacccaugugcgugggcaccacccccagcgccaaggccagcauccugcacgaggugagacccgugaccagcggcugcuuccccaucaugcacgacagaaccaagaucagacagcugcccaaccugcugagaggcuacgagaagaucagacugagcacccagaacgugaucgacgccgagaaggcccccggcggccccuacagacugggcaccagcggcagcugccccaacgccaccagcaagaucggcuucuucgccaccauggccugggccgugcccaaggacaacuacaagaacgccaccaacccccugaccguggaggugcccuacaucugcaccgagggcgaggaccagaucaccguguggggcuuccacagcgacaacaagacccagaugaagagccuguacggcgacagcaacccccagaaguucaccagcagcgccaacggcgugaccacccacuacgugagccagaucggcgacuuccccgaccagaccgaggacggcggccugccccagagcggcagaaucgugguggacuacaugaugcagaagcccggcaagaccggcaccaucguguaccagagaggcgugcugcugccccagaagguguggugcgccagcggcagaagcaaggugaucaagggcagccugccccugaucggcgaggccgacugccugcacgaggaguacggcggccugaacaagagcaagcccuacuacaccggcaagcacgccaaggccaucggcaacugccccaucugggugaagaccccccugaagcuggccaacggcaccaaguacagaccccccgccaagcugcugaaggagagaggcuucuucggcgccaucgccggcuuccuggagggcggcugggagggcaugaucgccggcuggcacggcuacaccagccacggcgcccacggcguggccguggccgccgaccugaagagcacccaggaggccaucaacaagaucaccaagaaccugaacagccugagcgagcuggaggugaagaaccugcagagacugagcggcgccauggacgagcugcacaacgagauccuggagcuggacgagaagguggacgaccugagagccgacaccaucagcagccagaucgagcuggccgugcugcugagcaacgagggcaucaucaacagcgaggacgagcaccugcuggcccuggagagaaagcugaagaagaugcugggccccagcgccguggacaucggcaacggcugcuucgagaccaagcacaagugcaaccagaccugccuggacagaaucgccgccggcaccuucaacgccggcgaguucagccugcccaccuucgacagccugaacaucaccgccgccagccugaacgacgacggccuggacaaccacaccauccugcuguacuacagcaccgccgccagcagccuggccgugacccugaugcuggccaucuucaucguguacauggugagcagagacaacgugagcugcagcaucugccuguga

SEQ ID NO: 188190 - RNA, 1755 nt, Artificial Sequence; identical to SEQ ID NO: 188189
  derived and/or modified CDS sequence (opt4) from hemagglutinin__InfluenzaB__AHL94295

SEQ ID NO: 188191 - RNA, 1755 nt, Artificial Sequence
  derived and/or modified CDS sequence (opt4) from hemagglutinin__InfluenzaB__AHL94306
augaaggccaucaucgugcugcugaugguggugaccagcaacgccgacagaaucugcaccggcaucaccagcagcaacagcccccacguggugaagaccgccacccagggcgaggugaacgugaccggcgccaucccccugaccaccacccccaccaagagcuacuucgccaaccugaagggcaccagaaccagaggcaagcugugccccgacugccugaacugcaccgaccuggacguggcccugggcagacccaugugcgugggcaccacccccagcgccaaggccagcauccugcacgaggugagacccgugaccagcggcugcuuccccaucaugcacgacagaaccaagaucagacagcugcccaaccugcugagaggcuacgagaacaucagacugagcacccagaacgugaucgacgccgagaaggcccccggcggccccuacagacugggcaccagcggcagcugccccaacgccaccagcaagaucggcuucuucgccaccauggccugggccgugcccaaggacaacuacaagaacgccaccaacccccagaccguggaggugcccuacaucugcaccgagggcgaggaccagaucaccguguggggcuuccacagcgacaacaagacccagaugaagaaccuguacggcgacagcaacccccagaaguucaccagcagcgccaacggcgugaccacccacuacgugagccagaucggcgacuuccccgaccagaccgaggacggcggccugccccagagcggcagaaucgugguggacuacauggugcagaagcccggcaagaccggcaccaucguguaccagagaggcgugcugcugccccagaagguguggugcgccagcggcagaagcaaggugaucaagggcagccugccccugaucggcgaggccgacugccugcacgagaaguacggcggccugaacaagagcaagcccuacuacaccggcgagcacgccaaggccaucggcaacugccccaucugggugaagaccccccugaagcuggccaacggcaccaaguacagaccccccgccaagcugcugaaggagagaggcuucuucggcgccaucgccggcuuccuggagggcggcugggagggcaugaucgccggcuggcacggcuacaccagccacggcgcccacggcguggccguggccgccgaccugaagagcacccaggaggccaucaacaagaucaccaagaaccugaacagccugagcgagcuggaggugaagaaccugcagagacugagcggcgccauggacgagcugcacaacgagauccuggagcuggacgagaagguggacgaccugagagccgacaccaucagcagccagaucgagcuggccgugcugcugagcaacgagggcaucaucaacagcgaggacgagcaccugcuggcccuggagagaaagcugaagaagaugcugggccccagcgccguggacaucggcaacggcugcuucgagaccaagcacaagugcaaccagaccugccuggacagaaucgccgccggcaccuucaacgccggcgaguucagccugcccaccuucgacagccugaacaucaccgccgccagccugaacgacgacggccuggacaaccacaccauccugcuguacuacagcaccgccgccagcagccuggccgugacccugaugcuggccaucuucaucguguacauggugagcagagacaacgugagcugcagcaucugccuguga

SEQ ID NO: 188192 - RNA, 1755 nt, Artificial Sequence
  derived and/or modified CDS sequence (opt4) from hemagglutinin__InfluenzaB__AHL94317
augaaggccaucaucgugcugcugaugguggugaccagcaacgccgacagaaucugcaccggcaucaccagcagcaacagcccccacguggugaagaccgccacccagggcgaggugaacgugaccggcgccaucccccugaccaccacccccaccaagagcuacuucgccaaccugaagggcaucagaaccagaggcaagcugugccccgacugccugaacugcaccgaccuggacguggcccugggcagacccaugugcgugggcaccacccccagcgccaaggccagcauccugcacgaggugagacccgugaccagcggcugcuuccccaucaugcacgacagaaccaagaucagacagcugcccaaccugcugagaggcuacgagaacaucagacugagcacccagaacgugaucgacgccgagaaggcccccggcggccccuacagacugggcaccagcggcagcugccccaacgccaccagcaagaucggcuucuucgccaccauggccugggccgugcccagagacaacuacaagaacgccaccaacccccagaccguggaggugcccuacaucugcaccgagggcgaggaccagaucaccguguggggcuuccacagcgacaacaagacccagaugaagaaccuguacggcgacagcaacccccagaaguucaccagcagcgccaacggcgugaccacccacuacgugagccagaucggcgacuuccccgaccagaccgaggacggcggccugccccagagcggcagaaucgugguggacuacauggugcagaagcccggcaagaccggcaccaucguguaccagagaggcgugcugcugccccagaagguguggugcgccagcggcagaagcaaggugaucaagggcagccugccccugaucggcgaggccgacugccugcacgagaaguacggcggccugaacaagagcaagcccuacuacaccggcgagcacgccaaggccaucggcaacugccccaucugggugaagaccccccugaagcuggccaacggcaccaaguacagaccccccgccaagcugcugaaggagagaggcuucuucggcgccaucgccggcuuccuggagggcggcugggagggcaugaucgccggcuggcacggcuacaccagccacggcgcccacggcguggccguggccgccgaccugaagagcacccaggaggccaucaacaagaucaccaagaaccugaacagccugagcgagcuggaggugaagaaccugcagagacugagcggcgccauggacgagcugcacaacgagauccuggagcuggacgagaagguggacgaccugagagccgacaccaucagcagccagaucgagcuggccgugcugcugagcaacgagggcaucaucaacagcgaggacgagcaccugcuggcccuggagagaaagcugaagaagaugcugggccccagcgccguggacaucggcaacggcugcuucgagaccaagcacaagugcaaccagaccugccuggacagaaucgccgccggcaccuucaacgccggcgaguucagccugcccaccuucgacagccugaacaucaccgccgccagccugaacgacgacggccuggacaaccacaccauccugcuguacuacagcaccgccgccagcagccuggccgugacccugaugcuggccaucuucaucguguacauggugagcagagacaacgugagcugcagcaucugccuguga

SEQ ID NO: 188193 - RNA, 1755 nt, Artificial Sequence; identical to SEQ ID NO: 188191
  derived and/or modified CDS sequence (opt4) from hemagglutinin__InfluenzaB__AHL94328

SEQ ID NO: 188194 - RNA, 1755 nt, Artificial Sequence; identical to SEQ ID NO: 188189
  derived and/or modified CDS sequence (opt4) from hemagglutinin__InfluenzaB__AHL94339

SEQ ID NO: 188195 - RNA, 1758 nt, Artificial Sequence
  derived and/or modified CDS sequence (opt4) from hemagglutinin__InfluenzaB__AHL94350
augaaggccaucaucgugcugcugaugguggugaccagcaacgccgacagaaucugcaccggcaucaccagcagcaacagcccccacguggugaagaccgccacccagggcgaggugaacgugaccggcgugaucccccugaccaccacccccaccaagagccacuucgccaaccugaagggcaccgagaccagaggcaagcugugccccaagugccugaacugcaccgaccuggacguggcccugggcagacccaagugcaccggcaagauccccagcgccagagugagcauccugcacgaggugagacccgugaccagcggcugcuuccccaucaugcacgacagaaccaagaucagacagcugcccaaccugcugagaggcuacgagcacaucagacugagcacccacaacgugaucaacgccgagaacgcccccggcggccccuacaagaucggcaccagcggcagcugccccaacgugaccaacggcaacggcuucuucgccaccauggccugggccgugcccaagaacgacaagaacaagaccgccaccaacccccugaccaucgaggugcccuacaucugcaccgagggcgaggaccagaucaccguguggggcuuccacagcgacaacgagacccagauggccaagcuguacggcgacagcaacccccagaaguucaccagcagcgccaacggcgugaccacccacuacgugagccagaucggcggcuuccccaaccagaccgaggacggcggccugccccagagcggcagaaucgugguggacuacauggugcagaagagcggcaagaccggcaccaucaccuaccagagaggcauccugcugccccagaagguguggugcgccagcggcagaagcaaggugaucaagggcagccugccccugaucggcgaggccgacugccugcacgagaaguacggcggccugaacaagagcaagcccuacuacaccggcgagcacgccaaggccaucggcaacugccccaucugggugaagaccccccugaagcuggccaacggcaccaaguacagaccccccgccaagcugcugaaggagagaggcuucuucggcgccaucgccggcuuccuggagggcggcugggagggcaugaucgccggcuggcacggcuacaccagccacggcgcccacggcguggccguggccgccgaccugaagagcacccaggaggccaucaacaagaucaccaagaaccugaacagccugagcgagcuggaggugaagaaccugcagagacugagcggcgccauggacgagcugcacaacgagauccuggagcuggacgagaagguggacgaccugagagccgacaccaucagcagccagaucgagcuggccgugcugcugagcaacgagggcaucaucaacagcgaggacgagcaccugcuggcccuggagagaaagcugaagaagaugcugggccccagcgccguggagaucggcaacggcugcuucgagaccaagcacaagugcaaccagaccugccuggacagaaucgccgccggcaccuucgacgccggcgaguucagccugcccaccuucgacagccugaacaucaccgccgccagccugaacgacgacggccuggacaaccacaccauccugcuguacuacagcaccgccgccagcagccuggccgugacccugaugaucgccaucuucgugguguacauggugagcaaggacaacgugagcugcagcaucugccuguga

SEQ ID NO: 188196 - RNA, 1758 nt, Artificial Sequence
  derived and/or modified CDS sequence (opt4) from hemagglutinin__InfluenzaB__AHL94361
augaaggccaucaucgugcugcugaugguggugaccagcaacgccgacagaaucugcaccggcaucaccagcagcaacagcccccacguggugaagaccgccacccagggcgaggugaacgugaccggcgugaucccccugaccaccacccccaccaagagccacuucgccaaccugaagggcaccgagaccagaggcaagcugugccccaagugccugaacugcaccgaccuggacguggcccugggcagacccaagugcaccggcaagauccccagcgccagagugagcauccugcacgaggugagacccgugaccagcggcugcuuccccaucaugcacgacagaaccaagaucagacagcugcccaaccugcugagaggcuacgagcacaucagacugagcacccacaacgugaucaacgccgagaacgcccccggcggccccuacaagaucggcaccagcggcagcugccccaacgugaccaacggcaacggcuucuucgccaccauggccugggccgugcccaagaacgacaagaacaagaccgccaccaacccccugaccaucgaggugcccuacaucugcaccgagggcgaggaccagaucaccguguggggcuuccacagcgacaacgagacccagauggccaagcuguacggcgacagcaacccccagaaguucaccagcagcgccaacggcgugaccacccacuacgugagccagaucggcggcuuccccaaccagaccgaggacggcggccugccccagagcggcagaaucgugguggacuacauggugcagaagagcggcaagaccggcaccaucgccuaccagagaggcauccugcugccccagaagguguggugcgccagcggcagaagcaaggugaucaagggcagccugccccugaucggcgaggccgacugccugcacgagaaguacggcggccugaacaagagcaagcccuacuacaccggcgagcacgccaaggccaucggcaacugccccaucugggugaagaccccccugaagcuggccaacggcaccaaguacagaccccccgccaagcugcugaaggagagaggcuucuucggcgccaucgccggcuuccuggagggcggcugggagggcaugaucgccggcuggcacggcuacaccagccacggcgcccacggcguggccguggccgccgaccugaagagcacccaggaggccaucaacaagaucaccaagaaccugaacagccugagcgagcuggaggugaagaaccugcagagacugagcggcgccauggacgagcugcacaacgagauccuggagcuggacgagaagguggacgaccugagagccgacaccaucagcagccagaucgagcuggccgugcugcugagcaacgagggcaucaucaacagcgaggacgagcaccugcuggcccuggagagaaagcugaagaagaugcugggccccagcgccguggagaucggcaacggcugcuucgagaccaagcacaagugcaaccagaccugccuggacagaaucgccgccggcaccuucgacgccggcgaguucagccugcccaccuucgacagccugaacaucaccgccgccagccugaacgacgacggccuggacaaccacaccauccugcuguacuacagcaccgccgccagcagccuggccgugacccugaugaucgccaucuucgugguguacauggugagcagagacagcgugagcugcagcaucugccuguga

SEQ ID NO: 188197 - RNA, 1758 nt, Artificial Sequence
  derived and/or modified CDS sequence (opt4) from hemagglutinin__InfluenzaB__AHL94383
augaaggccaucaucgugcugcugaugguggugaccagcaacgccgacagaaucugcaccggcaucaccagcagcaacagcccccacguggugaagaccgccacccagggcgaggugaacgugaccggcgugaucccccugaccaccacccccaccaagagccacuucgccaaccugaagggcaccgagaccagaggcaagcugugccccaagugccugaacugcaccgaccuggacguggcccugggcagacccaagugcaccggcaagauccccagcgccagagugagcauccugcacgaggugagacccgugaccagcggcugcuuccccaucaugcacgacagaaccaagaucagacagcugcccaaccugcugagaggcuacgagcacaucagacugagcacccacaacgugaucaacgccgagaacgcccccggcggccccuacaagaucggcaccagcggcagcugccccaacgugaccaacggcaacggcuucuucgccaccauggccugggccgugcccaagaacgacaagaacaagaccgccaccaacccccugaccaucgaggugcccuacaucugcaccgagggcgaggaccagaucaccguguggggcuuccacagcgacaacgagacccagauggagaagcuguacggcgacagcaagccccagaaguucaccagcagcgccaacggcgugaccacccacuacgugagccagaucggcggcuuccccaaccagaccgaggacggcggccugccccagagcggcagaaucgugguggacuacauggugcagaagagcggcaagaccggcaccaucaccuaccagagaggcauccugcugccccagaagguguggugcgccagcggcagaagcaaggugaucaagggcagccugccccugaucggcgaggccgacugccugcacgagaaguacggcggccugaacaagagcaagcccuacuacaccggcgagcacgccaaggccaucggcaacugccccaucugggugaagaccccccugaagcuggccaacggcaccaaguacagaccccccgccaagcugcugaaggagagaggcuucuucggcgccaucgccggcuuccuggagggcggcugggagggcaugaucgccggcuggcacggcuacaccagccacggcgcccacggcguggccguggccgccgaccugaagagcacccaggaggccaucaacaagaucaccaagaaccugaacagccugagcgagcuggaggugaagaaccugcagagacugagcggcgccauggacgagcugcacaacgagauccuggagcuggacgagaagguggacgaccugagagccgacaccaucagcagccagaucgagcuggccgugcugcugagcaacgagggcaucaucaacagcgaggacgagcaccugcuggcccuggagagaaagcugaagaagaugcugggccccagcgccguggagaucggcaacggcugcuucgagaccaagcacaagugcaaccagaccugccuggacagaaucgccgccggcaccuucgacgccggcgaguucagccugcccaccuucgacagccugaacaucaccgccgccagccugaacgacgacggccuggacaaccacaccauccugcuguacuacagcaccgccgccagcagccuggccgugacccugaugaucgccaucuucgugguguacauggugagcagagacaacgugagcugcagcaucugccuguga

SEQ ID NO: 188198 - RNA, 1758 nt, Artificial Sequence; identical to SEQ ID NO: 186705
  derived and/or modified CDS sequence (opt4) from hemagglutinin__InfluenzaB__AHL94394

SEQ ID NO: 188199 - RNA, 1758 nt, Artificial Sequence
  derived and/or modified CDS sequence (opt4) from hemagglutinin__InfluenzaB__AHL94405
augaaggccaucaucgugcugcugaugguggugaccagcaacgccgacagaaucugcaccggcaucaccagcagcaacagcccccacguggugaagaccgccacccagggcgaggugaacgugaccggcgugaucccccugaccaccacccccaccaagagccacuucgccaaccugaagggcaccgagaccagaggcaagcugugccccaagugccugaacugcaccgaccuggacguggcccugggcagacccaagugcaccggcaagauccccagcgccagagugagcauccugcacgaggugagacccgugaccagcggcugcuuccccaucaugcacgacagaaccaagaucagacagcugcccaaccugcugagaggcuacgagcacaucagacugagcacccacaacgugaucaacgccgagaacgcccccggcggccccuacaagaucggcaccagcggcagcugccccaacgugaccaacggcaacggcuucuucgccaccauggccugggccgugcccaagaacgacaagaacaagaccgccaccaacccccugaccaucgaggugcccuacaucugcaccgagggcgaggaccagaucaccguguggggcuuccacagcgacaacgagacccagauggccaagcuguacggcgacagcaagccccagaaguucaccagcagcgccaacggcgugaccacccacuacgugagccagaucggcggcuuccccaaccagaccgaggacggcggccugccccagagcggcagaaucgugguggacuacauggugcagaagagcggcaagaccggcaccaucaccuaccagagaggcauccugcugccccagaagguguggugcgccagcggcagaagcaaggugaucaagggcagccugccccugaucggcgaggccgacugccugcacgagaaguacggcggccugaacaagagcaagcccuacuacaccggcgagcacgccaaggccaucggcaacugccccaucugggugaagaccccccugaagcuggccaacggcaccaaguacagaccccccgccaagcugcugaaggagagaggcuucuucggcgccaucgccggcuuccuggagggcggcugggagggcaugaucgccggcuggcacggcuacaccagccacggcgcccacggcguggccguggccgccgaccugaagagcacccaggaggccaucaacaagaucaccaagaaccugaacagccugagcgagcuggaggugaagaaccugcagagacugagcggcgccauggacgagcugcacaacgagauccuggagcuggacgagaagguggacgaccugagagccgacaccaucagcagccagaucgagcuggccgugcugcugagcaacgagggcaucaucaacagcgaggacgagcaccugcuggcccuggagagaaagcugaagaagaugcugggccccagcgccguggagaucggcaacggcugcuucgagaccaagcacaagugcaaccagaccugccuggacagaaucgccgccggcaccuucaacgccggcgaguucagccugcccaccuucgacagccugaacaucaccgccgccagccugaacgacgacggccuggacaaccacaccauccugcuguacuacagcaccgccgccagcagccuggccgugacccugaugaucgccaucuucgugguguacauggugagcagagacaacgugagcugcagcaucugccuguga

SEQ ID NO: 188200 - RNA, 1758 nt, Artificial Sequence; identical to SEQ ID NO: 186705
  derived and/or modified CDS sequence (opt4) from hemagglutinin__InfluenzaB__AHL94416

SEQ ID NO: 188201 - RNA, 1755 nt, Artificial Sequence; identical to SEQ ID NO: 186914
  derived and/or modified CDS sequence (opt4) from hemagglutinin__InfluenzaB__AHL94427

SEQ ID NO: 188202 - RNA, 1755 nt, Artificial Sequence
  derived and/or modified CDS sequence (opt4) from hemagglutinin__InfluenzaB__AHL94438
augaaggccaucaucgugcugcugaugguggugaccagcaacgccgacagaaucugcaccggcaucaccagcagcaacagcccccacguggugaagaccgccacccagggcgaggugaacgugaccggcgccaucccccugaccaccacccccaccaagagcuacuucgccaaccugaagggcaccagaaccagaggcaagcugugccccgacugccugaacugcaccgaccuggacguggcccugggcagacccaugugcgugggcaccacccccagcgccaaggccagcauccugcacgaggugagacccgugaccagcggcugcuuccccaucaugcacgacagaaccaagaucagacagcugcccaaccugcugagaggcuacgagaacaucagacugagcacccagaacgugaucgacgccgagaaggcccccggcggccccuacagacugggcaccagcggcagcugccccaacgccaccagcaagaucggcuucuucgagaccauggccugggccgugcccaaggacaacuacaagaacgccaccaacccccagaccguggaggugcccuacaucugcaccgagggcgaggaccagaucaccguguggggcuuccacagcgacaacaagacccagaugaagaaccuguacggcgacagcaacccccagaaguucaccagcagcgccaacggcgugaccacccacuacgugagccagaucggcgacuuccccgaccagaccgaggacggcggccugccccagagcggcagaaucgugguggacuacauggugcagaagcccggcaagaccggcaccaucguguaccagagaggcgugcugcugccccagaagguguggugcgccagcggcagaagcaaggugaucaagggcagccugccccugaucggcgaggccgacugccugcacgagaaguacggcggccugaacaagagcaagcccuacuacaccggcgagcacgccaaggccaucggcaacugccccaucugggugaagaccccccugaagcuggccaacggcaccaaguacagaccccccgccaagcugcugaaggagagaggcuucuucggcgccaucgccggcuuccuggagggcggcugggagggcaugaucgccggcuggcacggcuacaccagccacggcgcccacggcguggccguggccgccgaccugaagagcacccaggaggccaucaacaagaucaccaagaaccugaacagccugagcgagcuggaggugaagaaccugcagagacugagcggcgccauggacgagcugcacaacgagauccuggagcuggacgagaagguggacgaccugagagccgacaccaucagcagccagaucgagcuggccgugcugcugagcaacgagggcaucaucaacagcgaggacgagcaccugcuggcccuggagagaaagcugaagaagaugcugggccccagcgccguggacaucggcaacggcugcuucgagaccaagcacaagugcaaccagaccugccuggacagaaucgccgccggcaccuucaacgccggcgaguucagccugcccaccuucgacagccugaacaucaccgccgccagccugaacgacgacggccuggacaaccacaccauccugcuguacuacagcaccgccgccagcagccuggccgugacccugaugcuggccaucuucaucguguacauggugagcagagacaacgugagcugcagcaucugccuguga

SEQ ID NO: 188203 - RNA, 1755 nt, Artificial Sequence
  derived and/or modified CDS sequence (opt4) from hemagglutinin__InfluenzaB__AHL94460
augaaggccaucaucgugcugcugaugguggugaccagcaacgccgacagaaucugcaccggcaucaccagcagcaacagcccccacguggugaagaccgccacccagggcgaggugaacgugaccggcgccaucccccugaccaccacccccaccaagagcuacuucgccaaccugaagggcaccagaaccagaggcaagcugugccccgacugccugaacugcaccgaccuggacguggcccugggcagacccaugugcgugggcaccacccccagcgccaaggccagcauccugcacgaggugagacccgugaccagcggcugcuuccccaucaugcacgacagaaccaagaucagacagcugcccaaccugcugagaggcuacgagaacaucagacugagcacccagaacgugaucgacgccgagaaggcccccggcggccccuacagacugggcaccagcggcagcugccccaacgccaccagcaagaucggcuucuucgccaccauggccugggccgugcccaaggacaacuacaagaacgccaccaacccccagaccguggaggugcccuacaucugcaccgaggaggaggaccagaucaccguguggggcuuccacagcgacaacaagacccagaugaagaaccuguacggcgacagcaacccccagaaguucaccagcagcgccaacggcgugaccacccacuacgugagccagaucggcgacuuccccgaccagaccgaggacggcggccugccccagagcggcagaaucgugguggacuacauggugcagaagcccggcaagaccggcaccaucguguaccagagaggcgugcugcugccccagaagguguggugcgccagcggcagaagcaaggugaucaagggcagccugccccugaucggcgaggccgacugccugcacgagaaguacggcggccugaacaagagcaagcccuacuacaccggcgagcacgccaaggccaucggcaacugccccaucugggugaagaccccccugaagcuggccaacggcaccaaguacagaccccccgccaagcugcugaaggagagaggcuucuucggcgccaucgccggcuuccuggagggcggcugggagggcaugaucgccggcuggcacggcuacaccagccacggcgcccacggcguggccguggccgccgaccugaagagcacccaggaggccaucaacaagaucaccaagaaccugaacagccugagcgagcuggaggugaagaaccugcagagacugagcggcgccauggacgagcugcacaacgagauccuggagcuggacgagaagguggacgaccugagagccgacaccaucagcagccagaucgagcuggccgugcugcugagcaacgagggcaucaucaacagcgaggacgagcaccugcuggcccuggagagaaagcugaagaagaugcugggccccagcgccguggacaucggcaacggcugcuucgagaccaagcacaagugcaaccagaccugccuggacagaaucgccgccggcaccuucaacgccggcgaguucagccugcccaccuucgacagccugaacaucaccgccgccagccugaacgacgacggccuggacaaccacaccauccugcuguacuacagcaccgccgccagcagccuggccgugacccugaugcuggccaucuucaucguguacauggugagcagagacaacgugagcugcagcaucugccuguga

SEQ ID NO: 188204 - RNA, 1755 nt, Artificial Sequence
  derived and/or modified CDS sequence (opt4) from hemagglutinin__InfluenzaB__AHL94471
augaaggccaucaucgugcugcugaugguggugaccagcaacgccgacagaaucugcaccggcaucaccagcagcaacagcccccacguggugaagaccgccacccagggcgaggugaacgugaccggcgugaucccccugaccaccacccccaccaagagcuacuucgccaaccugaagggcaccagaaccagaggcaagcugugccccgacugccugaacugcaccgaccuggacguggcccugggcagacccaugugcgugggcaccacccccagcgccaaggccagcauccugcacgaggugagacccgugaccagcggcugcuuccccaucaugcacgacagaaccaagaucagacagcugcccaaccugcugagaggcuacgagaagaucagacugagcacccagaacgugaucgacgccgagaaggcccccggcggccccuacagacugggcaccagcggcagcugccccaacgccaccagcaagaucggcuucuucgccaccauggccugggccgugcccaaggacaacuacaagaacgccaccaacccccugaccguggaggugcccuacaucugcaccgagggcgaggaccagaucaccguguggggcuuccacagcgacaacaagacccagaugaagagccuguacggcgacagcaacccccagaaguucaccagcagcgccaacggcgugaccacccacuacgugagccagaucggcgacuuccccgaccagaccgaggacggcggccugccccagagcggcagaaucgugguggacuacaugaugcagaagcccggcaagaccggcaccaucguguaccagagaggcgugcugcugccccagaagguguggugcgccagcggcagaagcaaggugaucaagggcagccugccccugaucggcgaggccgacugccugcacgaggaguacggcggccugaacaagagcaagcccuacuacaccggcaagcacgccaaggccaucggcaacugccccaucugggugaagaccccccugaagcuggccaacggcaccaaguacagaccccccgccaagcugcugaaggagagaggcuucuucggcgccaucgccggcuuccuggagggcggcugggagggcaugaucgccggcuggcacggcuacaccagccacggcgcccacggcguggccguggccgccgaccugaagagcacccaggaggccaucaacaagaucaccaagaaccugaacagccugagcgagcuggaggugaagaaccugcagagacugagcggcgccauggacgagcugcacaacgagauccuggagcuggacgagaagguggacgaccugagagccgacaccaucagcagccagaucgagcuggccgugcugcugagcaacgagggcaucaucaacagcgaggacgagcaccugcuggcccuggagagaaagcugaagaagaugcugggccccagcgccguggacaucggcaacggcugcuucgagaccaagcacaagugcaaccagaccugccuggacagaaucgccgccggcaccuucaacgccggcgaguucagccugcccaccuucgacagccugaacaucaccgccgccagccugaacgacgacggccuggacaaccacaccauccugcuguacuacagcaccgccgccagcagccuggccgugacccugaugcuggccaucuucaucguguacauggugagcagagacaacaucagcugcagcaucugccuguga

SEQ ID NO: 188205 - RNA, 1758 nt, Artificial Sequence
  derived and/or modified CDS sequence (opt4) from hemagglutinin__InfluenzaB__AHL94482
augaaggccaucaucgugcugcugaugguggugaccagcaacgccgacagaaucugcaccggcaucaccagcagcaacagcccccacguggugaagaccgccacccagggcgaggugaacgugaccggcgugaucccccugaccaccacccccaccaagagccacuucgccaaccugaagggcaccgagaccagaggcaagcugugccccaagugccugaacugcaccgaccuggacguggcccugggcagacccaagugcaccggcaagauccccagcgccagagugagcauccugcacgaggugagacccgugaccagcggcugcuuccccaucaugcacgacagaaccaagaucagacagcugcccaaccugcugagaggcuacgagcacaucagacugagcacccacaacgugaucaacgccgagaacgcccccggcggccccuacaagaucggcaccagcggcagcugccccaacgugaccaacggcaacggcuucuucaccaccauggccugggccgugcccaagaacgacaagaacaagaccgccaccaacccccugaccaucgaggugcccuacaucugcaccgagggcgaggaccagaucaccguguggggcuuccacagcgacaacgagacccagauggccaagcuguacggcgacagcaagccccagaaguucaccagcagcgccaacggcgugaccacccacuacgugagccagaucggcggcuuccccaaccagaccgaggacggcggccugccccagagcggcagaaucgugguggacuacauggugcagaagagcggcaagaccggcaccaucaccuaccagagaggcauccugcugccccagaagguguggugcgccagcggcagaagcaaggugaucaagggcagccugccccugaucggcgaggccgacugccugcacgagaaguacggcggccugaacaagagcaagcccuacuacaccggcgagcacgccaaggccaucggcaacugccccaucugggugaagaccccccugaagcuggccaacggcaccaaguacagaccccccgccaagcugcugaaggagagaggcuucuucggcgccaucgccggcuuccuggagggcggcugggagggcaugaucgccggcuggcacggcuacaccagccacggcgcccacggcguggccguggccgccgaccugaagagcacccaggaggccaucaacaagaucaccaagaaccugaacagccugagcgagcuggaggugaagaaccugcagagacugagcggcgccauggacgagcugcacaacgagauccuggagcuggacgagaagguggacgaccugagagccgacaccaucagcagccagaucgagcuggccgugcugcugagcaacgagggcaucaucaacagcgaggacgagcaccugcuggcccuggagagaaagcugaagaagaugcugggccccagcgccguggagaucggcaacggcugcuucgagaccaagcacaagugcaaccagaccugccuggacagaaucgccgccggcaccuucgacgccggcgaguucagccugcccaccuucgacagccugaacaucaccgccgccagccugaacgacgacggccuggacaaccacaccauccugcuguacuacagcaccgccgccagcagccuggccgugacccugaugaucgccaucuucgugguguacauggugagcagagacaacgugagcugcagcaucugccuguga

SEQ ID NO: 188206 - RNA, 1755 nt, Artificial Sequence; identical to SEQ ID NO: 188189
  derived and/or modified CDS sequence (opt4) from hemagglutinin__InfluenzaB__AHL94493

SEQ ID NO: 188207 - RNA, 1755 nt, Artificial Sequence; identical to SEQ ID NO: 188191
  derived and/or modified CDS sequence (opt4) from hemagglutinin__InfluenzaB__AHL94504

SEQ ID NO: 188208 - RNA, 1758 nt, Artificial Sequence
  derived and/or modified CDS sequence (opt4) from hemagglutinin__InfluenzaB__AHL94515
augaaggccaucaucgugcugcugaugguggugaccagcaacgccgacagaaucugcaccggcaucaccagcagcaacagcccccacguggugaagaccgccacccagggcgaggugaacgugaccggcgugaucccccugaccaccacccccaccaagagccacuucgccaaccugaagggcaccgagaccagaggcaagcugugccccaagugccugaacugcaccgaccuggacguggcccugggcagacccaagugcaccggcaagauccccagcgccagagugagcauccugcacgaggugagacccgugaccagcggcugcuuccccaucaugcacgacagaaccaagaucagacagcugcccaaccugcugagaggcuacgagcacaucagacugagcaccuacaacgugaucaacgccgaggacgcccccggcggccccuacaagaucggcaccagcggcagcugccccaacgugaccaacggcaacggcuucuucgccaccauggccugggccgugcccaagaacgacaagaacaagaccgccaccaacccccugaccaucgaggugcccuacaucugcaccgagggcgaggaccagaucaccguguggggcuuccacagcgacaacgagacccagauggagaagcuguacggcgacagcaagccccagaaguucaccagcagcgccaacggcgugaccacccacuacgugagccagaucggcggcuuccccaaccagaccgaggacggcggccugccccagagcggcagaaucgugguggacuacauggugcagaagagcggcaagaccggcaccaucaccuaccagagaggcauccugcugccccagaagguguggugcgccagcggcagaagcaaggugaucaagggcagccugccccugaucggcgaggccgacugccugcacgagaaguacggcggccugaacaagagcaagcccuacuacaccggcgagcacgccaaggccaucggcaacugccccaucugggugaagaccccccugaagcuggccaacggcaccaaguacagaccccccgccaagcugcugaaggagagaggcuucuucggcgccaucgccggcuuccuggagggcggcugggagggcaugaucgccggcuggcacggcuacaccagccacggcgcccacggcguggccguggccgccgaccugaagagcacccaggaggccaucaacaagaucaccaagaaccugaacagccugagcgagcuggaggugaagaaccugcagagacugagcggcgccauggacgagcugcacaacgagauccuggagcuggacgagaagguggacgaccugagagccgacaccaucagcagccagaucgagcuggccgugcugcugagcaacgagggcaucaucaacagcgaggacgagcaccugcuggcccuggagagaaagcugaagaagaugcugggccccagcgccguggagaucggcaacggcugcuucgagaccaagcacaagugcaaccagaccugccuggacagaaucgccgccggcaccuucgacgccggcgaguucagccugcccaccuucgacagccugaacaucaccgccgccagccugaacgacgacggccuggacaaccacaccauccugcuguacuacagcaccgccgccagcagccuggccgugacccugaugaucgccaucuucgugguguacauggugagcagagacaacgugagcugcagcaucugccuguga

SEQ ID NO: 188209 - RNA, 1755 nt, Artificial Sequence; identical to SEQ ID NO: 188191
  derived and/or modified CDS sequence (opt4) from hemagglutinin__InfluenzaB__AHL94526

SEQ ID NO: 188210 - RNA, 1758 nt, Artificial Sequence
  derived and/or modified CDS sequence (opt4) from hemagglutinin__InfluenzaB__AHL94537
augaaggccaucaucgugcugcugaugguggugaccagcaacgccgacagaaucugcaccggcaucaccagcagcaacagcccccacguggugaagaccgccacccagggcgaggugaacgugaccggcgugaucccccugaccaccacccccaccaagagccacuucgccaaccugaagggcaccgagaccagaggcaagcugugccccaagugccugaacugcaccgaccuggacguggcccugggcagacccaagugcaccggcaagauccccagcgccagagugagcauccugcacgaggugagacccgugaccagcggcugcuuccccaucaugcacgacagaaccaagaucagacagcugcccaaccugcugagaggcuacgagcacaucagacugagcacccacaacgugaucaacgccgagaacgcccccggcggccccuacaagaucggcaccagcggcagcugccccaacgugaccaacggcaacggcuucuucgccaccauggccugggccgugcccaagaacgacaagaacaagaccgccaccaacccccugaccaucgaggugcccuacaucugcaccgagggcgaggaccagaucaccguguggggcuuccacagcgacaacgagacccagauggccaagcuguacggcgacagcaacccccagaaguucaccagcagcgccaacggcgugaccacccacuacaucagccagaucggcggcuuccccaaccagaccgaggacggcggccugccccagagcggcagaaucgugguggacuacauggugcagaagagcggcaagaccggcaccaucaccuaccagagaggcauccugcugccccagaagguguggugcgccagcggcagaagcaaggugaucaagggcagccugccccugaucggcgaggccgacugccugcacgagaaguacggcggccugaacaagagcaagcccuacuacaccggcgagcacgccaaggccaucggcaacugccccaucugggugaagaccccccugaagcuggccaacggcaccaaguacagaccccccgccaagcugcugaaggagagaggcuucuucggcgccaucgccggcuuccuggagggcggcugggagggcaugaucgccggcuggcacggcuacaccagccacggcgcccacggcguggccguggccgccgaccugaagagcacccaggaggccaucaacaagaucaccaagaaccugaacagccugagcgagcuggaggugaagaaccugcagagacugagcggcgccauggacgagcugcacaacgagauccuggagcuggacgagaagguggacgaccugagagccgacaccaucagcagccagaucgagcuggccgugcugcugagcaacgagggcaucaucaacagcgaggacgagcaccugcuggcccuggagagaaagcugaagaagaugcugggccccagcgccguggagaucggcaacggcugcuucgagaccaagcacaagugcaaccagaccugccuggacagaaucgccgccggcaccuucgacgccggcgaguucagccugcccaccuucgacagccugaacaucaccgccgccagccugaacgacgacggccuggacaaccacaccauccugcuguacuacagcaccgccgccagcagccuggccgugacccugaugaucgccaucuucgugguguacauggugagcagagacaacgugagcugcagcaucugccuguga

SEQ ID NO: 188211 - RNA, 1755 nt, Artificial Sequence
  derived and/or modified CDS sequence (opt4) from hemagglutinin__InfluenzaB__AHL94548
augaaggccaucaucgugcugcugaugguggugaccagcaacgccgacagaaucugcaccggcaucaccagcagcaacagcccccacguggugaagaccgccacccagggcgaggugaacgugaccggcgugaucccccugaccaccacccccaucaagagcuacuucgccaaccugaagggcaccaagaccagaggcaagcugugccccgacugccugaacugcaccgaccuggacguggcccugggcagacccaugugcgugggcaccacccccagcgccaaggccagcauccugcacgaggugagacccgugaccagcggcugcuuccccaucaugcacgacagaaccaagaucagacagcuggccaaccugcugagaggcuacgagaacaucagacugagcacccagaacgugaucgacgccgagagagcccccggcggccccuacagacugggcaccagcggcagcugccccaacgccaccagcaagagcggcuucuucgccaccauggccugggccgugcccaaggacaacaacaagaacgccaccaacccccugaccguggaggugcccuacaucugcgccgagggcgaggaccagaucaccguguggggcuuccacagcgacaacaagacccagaugaagaaccuguacggcgacagcaacccccagaaguucaccagcagcgccaacggcgugaccacccacuacgugagccagaucggcggcuuccccgaccagaccgaggacggcggccugccccagagcggcagaaucgugguggacuacaugaugcagaagcccggcaagaccggcaccaucguguaccagagaggcgugcugcugccccagaagguguggugcgccagcggcagaagcaaggugaucaagggcagccugccccugaucggcgaggccgacugccugcacgagaaguacggcggccugaacaagagcaagcccuacuacaccggcgagcacgccaaggccaucggcaacugccccaucugggugaagaccccccugaagcuggccaacggcaccaaguacagaccccccgccaagcugcugaaggagagaggcuucuucggcgccaucgccggcuuccuggagggcggcugggagggcaugaucgccggcuggcacggcuacaccagccacggcgcccacggcguggccguggccgccgaccugaagagcacccaggaggccaucaacaagaucaccaagaaccugaacagccugagcgagcuggaggugaagaaccugcagagacugagcggcgccauggacgagcugcacaacgagauccuggagcuggacgagaagguggacgaccugagagccgacaccaucagcagccagaucgagcuggccgugcugcugagcaacgagggcaucaucaacagcgaggacgagcaccugcuggcccuggagagaaagcugaagaagaugcugggccccagcgccguggacaucggcaacggcugcuucgagaccaagcacaagugcaaccagaccugccuggacagaaucgccgccggcaccuucaacgccggcgaguucagccugcccaccuucgacagccugaacaucaccgccgccagccugaacgacgacggccuggacaaccacaccauccugcuguacuacagcaccgccgccagcagccuggccgugacccugaugcuggccaucuucaucguguacauggugagcagagacaacgugagcugcagcaucugccuguga

SEQ ID NO: 188212 - RNA, 1755 nt, Artificial Sequence; identical to SEQ ID NO: 188189
  derived and/or modified CDS sequence (opt4) from hemagglutinin__InfluenzaB__AHL94559

SEQ ID NO: 188213 - RNA, 1755 nt, Artificial Sequence; identical to SEQ ID NO: 186914
  derived and/or modified CDS sequence (opt4) from hemagglutinin__InfluenzaB__AHL94570

SEQ ID NO: 188214 - RNA, 1755 nt, Artificial Sequence; identical to SEQ ID NO: 186914
  derived and/or modified CDS sequence (opt4) from hemagglutinin__InfluenzaB__AHL94581

SEQ ID NO: 188215 - RNA, 1755 nt, Artificial Sequence; identical to SEQ ID NO: 186914
  derived and/or modified CDS sequence (opt4) from hemagglutinin__InfluenzaB__AHL94592

SEQ ID NO: 188216 - RNA, 1758 nt, Artificial Sequence
  derived and/or modified CDS sequence (opt4) from hemagglutinin__InfluenzaB__AHL94603
augaaggccaucaucgugcugcugaugguggugaccagcaacgccgacagaaucugcaccggcaucaccagcagcaacagcccccacguggugaagaccgccacccagggcgaggugaacgugaccggcgugaucccccugaccaccacccccaccaagagccacuucgccaaccugaagggcaccgagaccagaggcaagcugugccccaagugccugaacugcaccgaccuggacguggcccugggcagacccaagugcaccggcaagauccccagcgccagagugagcauccugcacgaggugagacccgugaccagcggcugcuuccccaucaugcacgacagaaccaagaucagacagcugcccaaccugcugagaggcuacgagaacaucagacugagcacccacaacgugaucaacgccgagaacgcccccggcggccccuacaagaucggcaccagcggcagcugccccaacgugaccaacggcaacggcuucuucgccaccauggccugggccgugcccaagaacgacaagaacaagaccgccaccaacccccugaccaucgaggugcccuacaucugcaccgagggcgaggaccagaucaccguguggggcuuccacagcgacaacgagacccagauggccaagcuguacggcgacagcaagccccagaaguucaccagcagcgccaacggcgugaccacccacuacgugagccagaucggcggcuuccccaaccagaccgaggacggcggccugccccagagcggcagaaucgugguggacuacauggugcagaagagcggcaagaccggcaccaucaccuaccagagaggcauccugcugccccagaagguguggugcgccagcggcagaagcaaggugaucaagggcagccugccccugaucggcgaggccgacugccugcacgagaaguacggcggccugaacaagagcaagcccuacuacaccggcgagcacgccaaggccaucggcaacugccccaucugggugaagaccccccugaagcuggccaacggcaccaaguacagaccccccgccaagcugcugaaggagagaggcuucuucggcgccaucgccggcuuccuggagggcggcugggagggcaugaucgccggcuggcacggcuacaccagccacggcgcccacggcguggccguggccgccgaccugaagagcacccaggaggccaucaacaagaucaccaagaaccugaacagccugagcgagcuggaggugaagaaccugcagagacugagcggcgccauggacgagcugcacaacgagauccuggagcuggacgagaagguggacgaccugagagccgacaccaucagcagccagaucgagcuggccgugcugcugagcaacgagggcaucaucaacagcgaggacgagcaccugcuggcccuggagagaaagcugaagaagaugcugggccccagcgccguggagaucggcaacggcugcuucgagaccaagcacaagugcaaccagaccugccuggacagaaucgccgccggcaccuucgacgccggcgaguucagccugcccaccuucgacagccugaacaucaccgccgccagccugaacgacgacggccuggacaaccacaccauccugcuguacuacagcaccgccgccagcagccuggccgugacccugaugaucgccaucuucgugguguacauggugagcagagacaacgugagcugcagcaucugccuguga

SEQ ID NO: 188217 - RNA, 1758 nt, Artificial Sequence
  derived and/or modified CDS sequence (opt4) from hemagglutinin__InfluenzaB__AHL94614
augaaggccaucaucgugcugcugaugguggugaccagcaacgccgacagaaucugcaccggcaucaccagcagcaacagcccccacguggugaagaccgccacccagggcgaggugaacgugaccggcgugaucccccugaccaccacccccaccaagagccacuucgccaaccugaagggcaccgagaccagaggcaagcugugccccaagugccugaacugcaccgaccuggacguggcccugggcagacccaagugcaccggcaagauccccagcgccagagugagcauccugcacgaggugagacccgugaccagcggcugcuuccccaucaugcacgacagaaccaagaucagacagcugcccaaccugcugagaggcuacgagcacaucagacugagcacccacaacgugaucaacgccgagaacgcccccggcggccccuacaagaucggcaccagcggcagcugccccaacgugaccaacggcaacggcuucuucgccaccauggccugggccgugcccaagaacgacaagaacaagaccgccaccaacccccugaccaucgaggugcccuacaucugcaccgagggcgaggaccagaucaccguguggggcuuccacagcgacaacgagacccagauggccaagcuguacggcgacagcaagccccagaaguucaccagcagcgccaacggcgugaccacccacuacgugagccagaucggcggcuuccccaaccagaccgaggacggcggccugccccagagcggcagaaucgugguggacuacauggugcagaagagcggcaagaccggcaccaucaccuaccagagaggcauccugcugccccagaagguguggugcgccagcggcagaagcaaggugaucaagggcagccugccccugaucggcgaggccgacugccugcacgagaaguacggcggccugaacaagagcaagcccuacuacaccggcgagcacgccaaggccaucggcaacugccccaucugggugaagaccccccugaagcuggccaacggcaccaaguacagaccccccgccaagcugcugaaggagagaggcuucuucggcgccaucgccggcuuccuggagggcggcugggagggcaugaucgccggcuggcacggcuacaucagccacggcgcccacggcguggccguggccgccgaccugaagagcacccaggaggccaucaacaagaucaccaagaaccugaacagccugagcgagcuggaggugaagaaccugcagagacugagcggcgccauggacgagcugcacaacgagauccuggagcuggacgagaagguggacgaccugagagccgacaccaucagcagccagaucgagcuggccgugcugcugagcaacgagggcaucaucaacagcgaggacgagcaccugcuggcccuggagagaaagcugaagaagaugcugggccccagcgccguggagaucggcaacggcugcuucgagaccaagcacaagugcaaccagaccugccuggacagaaucgccgccggcaccuucgacgccggcgaguucagccugcccaccuucgacagccugaacaucaccgccgccagccugaacgacgacggccuggacaaccacaccauccugcuguacuacagcaccgccgccagcagccuggccgugacccugaugaucgccaucuucgugguguacauggugagcagagacaacgugagcugcagcaucugccuguga

SEQ ID NO: 188218 - RNA, 1755 nt, Artificial Sequence; identical to SEQ ID NO: 188191
  derived and/or modified CDS sequence (opt4) from hemagglutinin__InfluenzaB__AHL94624

SEQ ID NO: 188219 - RNA, 1758 nt, Artificial Sequence
  derived and/or modified CDS sequence (opt4) from hemagglutinin__InfluenzaB__AHL94646
augaaggccaucaucgugcugcugaugguggugaccagcaacgccgacagaaucugcaccggcaucaccagcagcaacagcccccacguggugaagaccgccacccagggcgaggugaacgugaccggcgugaucccccugaccaccacccccaccaagagccacuucgccaaccugaagggcaccgagaccagaggcaagcugugccccaagugccugaacugcaccgaccuggacguggcccugggcagacccaagugcaccggcaagauccccagcgccagagugagcauccugcacgaggugagacccgugaccagcggcugcuuccccaucaugcacgacagaaccaagaucagacagcugcccaaccugcugagaggcuacgagcacaucagacugagcacccacaacgugaucaacgccgagaacgcccccggcggccccuacaagaucggcaccagcggcagcugccugaacgugaccaacggcaacggcuucuucgccaccauggccugggccgugcccaagaacgacaagaacaagaccgccaccaacccccugaccaucgaggugcccuacaucugcaccgagggcgaggaccagaucaccguguggggcuuccacagcgacaacgagacccagauggccaagcuguacggcgacagcaagccccagaaguucaccagcagcgccaacggcgugaccacccacuacgugagccagaucggcggcuuccccaaccagaccgaggacggcggccugccccagagcggcagaaucgugguggacuacauggugcagaagagcggcaagaccggcaccaucaccuaccagagaggcauccugcugccccagaagguguggugcgccagcggcagaagcaaggugaucaagggcagccugccccugaucggcgaggccgacugccugcacgagaaguacggcggccugaacaagagcaagcccuacuacaccggcgagcacgccaaggccaucggcaacugccccaucugggugaagaccccccugaagcuggccaacggcaccaaguacagaccccccgccaagcugcugaaggagagaggcuucuucggcgccaucgccggcuuccuggagggcggcugggagggcaugaucgccggcuggcacggcuacaccagccacggcgcccacggcguggccguggccgccgaccugaagagcacccaggaggccaucaacaagaucaccaagaaccugaacagccugagcgagcuggaggugaagaaccugcagagacugagcggcgccauggacgagcugcacaacgagauccuggagcuggacgagaagguggacgaccugagagccgacaccaucagcagccagaucgagcuggccgugcugcugagcaacgagggcaucaucaacagcgaggacgagcaccugcuggcccuggagagaaagcugaagaagaugcugggccccagcgccguggagaucggcaacggcugcuucgagaccaagcacaagugcaaccagaccugccuggacagaaucgccgccggcaccuucgacgccggcgaguucagccugcccaccuucgacagccugaacaucaccgccgccagccugaacgacgacggccuggacaaccacaccauccugcuguacuacagcaccgccgccagcagccuggccgugacccugaugaucgccaucuucgugguguacauggugagcagagacaacgugagcugcagcaucugccuguga

SEQ ID NO: 188220 - RNA, 1758 nt, Artificial Sequence
  derived and/or modified CDS sequence (opt4) from hemagglutinin__InfluenzaB__AHL94657
augaaggccaucaucgugcugcugaugguggugaccagcaacgccgacagaaucugcaccggcaucaccagcagcaacagcccccacguggugaagaccgccacccagggcgaggugaacgugaccggcgugaucccccugaccaccacccccaccaagagccacuucgccaaccugaagggcaccgagaccagaggcaagcugugccccaagugccccaacugcaccgaccuggacguggcccugggcagacccaagugcaccggcaagauccccagcgccagagugagcauccugcacgaggugagacccgugaccagcggcugcuuccccaucaugcacgacagaaccaagaucagacagcugcccaaccugcugagaggcuacgagcacaucagacugagcacccacaacgugaucaacgccgagagcgcccccggcggccccuacaagaucggcaccagcggcagcugccccaacgugaccaacggcaacggcuucuucgccaccauggccugggccgugcccaagaacgacaagaacaagaccgccaccgacccccugaccaucgaggugcccuacaucugcaccgagggcgaggaccagaucaccguguggggcuuccacagcgacaacgagacccagauggccaagcuguacggcgacagcaagccccagaaguucaccagcagcgccaacggcgugaccacccacuacgugagccagaucggcggcuuccccaaccagaccgaggacggcggccugccccagagcggcagaaucgugguggacuacauggugcagaagagcggcaagaccggcaccaucaccuaccagagaggcauccugcugccccagaagguguggugcgccagcggcagaagcaaggugaucaagggcagccugccccugaucggcgaggccgacugccugcacgagaaguacggcggccugaacaagagcaagcccuacuacaccggcgagcacgccaaggccaucggcaacugccccaucugggugaagaccccccugaagcuggccaacggcaccaaguacagaccccccgccaagcugcugaaggagagaggcuucuucggcgccaucgccggcuuccuggagggcggcugggagggcaugaucgccggcuggcacggcuacaccagccacggcgcccacggcguggccguggccgccgaccugaagagcacccaggaggccaucaacaagaucaccaagaaccugaacagccugagcgagcuggaggugaagaaccugcagagacugagcggcgccauggacgagcugcacaacgagauccuggagcuggacgagaagguggacgaccugagagccgacaccaucagcagccagaucgagcuggccgugcugcugagcaacgagggcaucaucaacagcgaggacgagcaccugcuggcccuggagagaaagcugaagaagaugcugggccccagcgccguggagaucggcaacggcugcuucgagaccaagcacaagugcaaccagaccugccuggacagaaucgccgccggcaccuucgacgccggcgaguucagccugcccaccuucgacagccugaacaucaccgccgccagccugaacgacgacggccuggacaaccacaccauccugcuguacuacagcaccgccgccagcagccuggccgugacccugaugaucgccaucuucgugguguacauggugagcagagacaacgugagcugcagcaucugccuguga

SEQ ID NO: 188221 - RNA, 1755 nt, Artificial Sequence; identical to SEQ ID NO: 188191
  derived and/or modified CDS sequence (opt4) from hemagglutinin__InfluenzaB__AHL94668

SEQ ID NO: 188222 - RNA, 1755 nt, Artificial Sequence; identical to SEQ ID NO: 188191
  derived and/or modified CDS sequence (opt4) from hemagglutinin__InfluenzaB__AHL94679

SEQ ID NO: 188223 - RNA, 1758 nt, Artificial Sequence; identical to SEQ ID NO: 188216
  derived and/or modified CDS sequence (opt4) from hemagglutinin__InfluenzaB__AHL94690

SEQ ID NO: 188224 - RNA, 1758 nt, Artificial Sequence
  derived and/or modified CDS sequence (opt4) from hemagglutinin__InfluenzaB__AHL94701
augaaggccaucaucgugcugcugaugguggugaccagcaacgccgacagaaucugcaccggcaucaccagcagcaacagcccccacguggugaagaccgccacccagggcgaggugaacgugaccggcgugaucccccugaccaccacccugaccaagagccacuucgccaaccugaagggcaccgagaccagaggcaagcugugccccaagugccugaacugcaccgaccuggacguggcccugggcagacccaagugcaccggcaagauccccagcgccagagugagcauccugcacgaggugagacccgugaccagcggcugcuuccccaucaugcacgacagaaccaagaucagacagcugcccaaccugcugagaggcuacgagcacaucagacugagcacccacaacgugaucaacgccgagaacgcccccggcggccccuacaagaucggcaccagcggcagcugccugaacgugaccaacggcaacggcuucuucgccaccauggccugggccgugcccaagaacgacaagaacaagaccgccaccaacccccugaccaucgaggugcccuacaucugcaccgagggcgaggaccagaucaccguguggggcuuccacagcgacaacgagacccagauggccaagcuguacggcgacagcaagccccagaaguucaccagcagcgccaacggcgugaccacccacuacgugagccagaucggcggcuuccccaaccagaccgaggacggcggccugccccagagcggcagaaucgugguggacuacauggugcagaagagcggcaagaccggcaccaucaccuaccagagaggcauccugcugccccagaagguguggugcgccagcggcagaagcaaggugaucaagggcagccugccccugaucggcgaggccgacugccugcacgagaaguacggcggccugaacaagagcaagcccuacuacaccggcgagcacgccaaggccaucggcaacugccccaucugggugaagaccccccugaagcuggccaacggcaccaaguacagaccccccgccaagcugcugaaggagagaggcuucuucggcgccaucgccggcuuccuggagggcggcugggagggcaugaucgccggcuggcacggcuacaccagccacggcgcccacggcguggccguggccgccgaccugaagagcacccaggaggccaucaacaagaucaccaagaaccugaacagccugagcgagcuggaggugaagaaccugcagagacugagcggcgccauggacgagcugcacaacgagauccuggagcuggacgagaagguggacgaccugagagccgacaccaucagcagccagaucgagcuggccgugcugcugagcaacgagggcaucaucaacagcgaggacgagcaccugcuggcccuggagagaaagcugaagaagaugcugggccccagcgccguggagaucggcaacggcugcuucgagaccaagcacaagugcaaccagaccugccuggacagaaucgccgccggcaccuucgacgccggcgaguucagccugcccaccuucgacagccugaacaucaccgccgccagccugaacgacgacggccuggacaaccacaccauccugcuguacuacagcaccgccgccagcagccuggccgugacccugaugaucgccaucuucgugguguacauggugagcagagacaacgugagcugcagcaucugccuguga

SEQ ID NO: 188225 - RNA, 1755 nt, Artificial Sequence; identical to SEQ ID NO: 188189
  derived and/or modified CDS sequence (opt4) from hemagglutinin__InfluenzaB__AHL94712

SEQ ID NO: 188226 - RNA, 1758 nt, Artificial Sequence; identical to SEQ ID NO: 188220
  derived and/or modified CDS sequence (opt4) from hemagglutinin__InfluenzaB__AHL94723

SEQ ID NO: 188227 - RNA, 1755 nt, Artificial Sequence; identical to SEQ ID NO: 188189
  derived and/or modified CDS sequence (opt4) from hemagglutinin__InfluenzaB__AHL94734

SEQ ID NO: 188228 - RNA, 1758 nt, Artificial Sequence
  derived and/or modified CDS sequence (opt4) from hemagglutinin__InfluenzaB__AHL94745
augaaggccaucaucgugcugcugaugguggugaccagcaacgccgacagaaucugcaccggcaucaccagcagcaacagcccccacguggugaagaccgccacccagggcgaggugaacgugaccggcgugaucccccugaccaccacccccaccaagagccacuucgccaaccugaagggcaccgagaccagaggcaagcugugccccaagugccugaacugcaccgaccuggacguggcccugggcagacccaagugcaccggcaagauccccagcgccagagugagcauccugcacgaggugagacccgugaccagcggcugcuuccccaucaugcacgacagaaccaagaucagacagcugcccaaccugcugagaggcuacgagcacaucagacugagcacccacaacgugaucaacgccgagaacgcccccggcggccccuacaagaucggcaccagcggcagcugccugaacgugaccaacggcaacggcuucuucgccaccauggccugggccgugcccaagaacgacaagaacaagaccgccaccaacccccugaccaucgaggugcccuacaucugcaccgagggcgaggaccagaucaccguguggggcuuccacagcgacaacgagacccagauggccaagcuguacggcgacagcaagccccagaaguucaccagcagcgccaacggcgugaccacccacuacgugagccagaucggcggcuuccccaaccagaccgaggacggcggccugccccagagcggcagaaucgugguggacuacauggugcagaagagcggcaagaccggcaccaucaccuaccagagaggcauccugcugccccagaagguguggugcgccagcggcagaagcaaggugaucaagggcagccugccccugaucggcgaggccgacugccugcacgagaaguacggcggccugaacaagagcaagcccuacuacaccggcgagcacgccaaggccaucggcaacugccccaucugggugaagaccccccugaagcuggccaacggcaccaaguacagaccccccgccaagcugcugaaggagagaggcuucuucggcgccaucgccggcuuccuggagggcggcugggagggcaugaucgccggcuggcacggcuacaccagccacggcgcccacggcguggccguggccgccgaccugaagagcacccaggaggccaucaacaagaucaccaagaaccugaacagccugagcgagcuggaggugaagaaccugcagagacugagcggcgccauggacgagcugcacaacgagauccuggagcuggacgagaagguggacgaccugagagccgacaccaucagcagccagaucgagcuggccgugcugcugagcaacgagggcaucaucaacagcgaggacgagcaccugcuggcccuggagagaaagcugaagaagaugcugggccccagcgccguggagaucggcaacggcugcuucgagaccaagcacaagugcaaccagaccugccuggacagaaucgccgccggcaccuucgacgccggcgaguucagccugcccaccuucgacagccugaacaucaccgccgccagccugaacggcgacggccuggacaaccacaccauccugcuguacuacagcaccgccgccagcagccuggccgugacccugaugaucgccaucuucgugguguacauggugagcagagacaacgugagcugcagcaucugccuguga

SEQ ID NO: 188229 - RNA, 1755 nt, Artificial Sequence; identical to SEQ ID NO: 186914
  derived and/or modified CDS sequence (opt4) from hemagglutinin__InfluenzaB__AHL94756

SEQ ID NO: 188230 - RNA, 1758 nt, Artificial Sequence; identical to SEQ ID NO: 188219
  derived and/or modified CDS sequence (opt4) from hemagglutinin__InfluenzaB__AHL94766

SEQ ID NO: 188231 - RNA, 1755 nt, Artificial Sequence
  derived and/or modified CDS sequence (opt4) from hemagglutinin__InfluenzaB__AHL94777
augaaggccaucaucgugcugcugaugguggugaccagcaacgccgacagaaucugcaccggcaucaccagcagcaacagcccccacguggugaagaccgccacccagggcgaggugaacgugaccggcgccaucccccugaccaccacccccaccaagagcuacuucgccaaccugaagggcaccagaaccagaggcaagcugugccccgacugcuucaacugcaccgaccuggacguggcccugggcagacccaugugcgugggcaccacccccagcgccaaggccagcauccugcacgaggugagacccgugaccagcggcugcuuccccaucaugcacgacagaaccaagaucagacagcugcccaaccugcugagaggcuacgagaacaucagacugagcacccagaacgccaucgacgccgagaaggcccccggcggccccuacagacugggcaccagcggcagcugccccaacgccaccagcaagaucggcuucuucgccaccauggccugggccgugcccaaggacaacuacaagaacgccaccaacccccagaccguggaggugcccuacaucugcaccgagggcgaggaccagaucaccguguggggcuuccacagcgacaacaagacccagaugaagaaccuguacggcgacagcaacccccagaaguucaccagcagcgccaacggcgugaccacccacuacgugagccagaucggcgacuuccccgaccagaccgaggacggcggccugccccagagcggcagaaucgugguggacuacauggugcagaagcccggcaagaccggcaccaucguguaccagagaggcgugcugcugccccagaagguguggugcgccagcggcagaagcaaggugaucaagggcagccugccccugaucggcgaggccgacugccugcacgagaaguacggcggccugaacaagagcaagcccuacuacaccggcgagcacgccaaggccaucggcaacugccccaucugggugaagaccccccugaagcuggccaacggcaccaaguacagaccccccgccaagcugcugaaggagagaggcuucuucggcgccaucgccggcuuccuggagggcggcugggagggcaugaucgccggcuggcacggcuacaccagccacggcgcccacggcguggccguggccgccgaccugaagagcacccaggaggccaucaacaagaucaccaagaaccugaacagccugagcgagcuggaggugaagaaccugcagagacugagcggcgccauggacgagcugcacaacgagauccuggagcuggacgagaagguggacgaccugagagccgacaccaucagcagccagaucgagcuggccgugcugcugagcaacgagggcaucaucaacagcgaggacgagcaccugcuggcccuggagagaaagcugaagaagaugcugggccccagcgccguggacaucggcaacggcugcuucgagaccaagcacaagugcaaccagaccugccuggacagaaucgccgccggcaccuucaacgccggcgaguucagccugcccaccuucgacagccugaacaucaccgccgccagccugaacgacgacggccuggacaaccacaccauccugcuguacuacagcaccgccgccagcagccuggccgugacccugaugcuggccaucuucaucguguacauggugagcagagacaacgugagcugcagcaucugccuguga

SEQ ID NO: 188232 - RNA, 1758 nt, Artificial Sequence; identical to SEQ ID NO: 188216
  derived and/or modified CDS sequence (opt4) from hemagglutinin__InfluenzaB__AHL94797

SEQ ID NO: 188233 - RNA, 1755 nt, Artificial Sequence
  derived and/or modified CDS sequence (opt4) from hemagglutinin__InfluenzaB__AHL94808
augaaggccaucaucgugcugcugaugguggugaccagcaacgccgacagaaucugcaccggcaucaccagcagcaacagcccccacguggugaagaccgccacccagggcgaggugaacgugaccggcgccaucccccugaccaccacccccaccaagagcuacuucgccaaccugaagggcaucagaaccagaggcaagcugugccccgacugccugaacugcaccgaccuggacguggcccugggcagacccaugugcgugggcaccacccccagcgccaaggccagcauccugcacgaggugagacccgugaccagcggcugcuuccccaucaugcacgacagaaccaagaucagacagcugcccaaccugcugagaggcuacgagaacaucagacugagcacccagaacgugaucgacgccgagaaggcccccggcggccccuacagacugggcaccagcggcagcugccccaacgccaccagcaagaucggcuucuucgccaccauggccugggccgugcccaaggacaacuacaagaacgccaccaacccccagaccguggaggugcccuacaucugcaccgagggcgaggaccagaucaccguguggggcuuccacagcgacaacaagacccagaugaagaaccuguacggcgacagcaacccccagaaguucaccagcagcgccaacggcgugaccacccacuacgugagccagaucggcgacuuccccgaccagaccgaggacggcggccugccccagagcggcagaaucgugguggacuacauggugcagaagcccggcaagaccggcaccaucguguaccagagaggcgugcugcugccccagaagguguggugcgccagcggcagaagcaaggugaucaagggcagccugccccugaucggcgaggccgacugccugcacgagaaguacggcggccugaacaagagcaagcccuacuacaccggcgagcacgccaaggccaucggcaacugccccaucugggugaagaccccccugaagcuggccaacggcaccaaguacagaccccccgccaagcugcugaaggagagaggcuucuucggcgccaucgccggcuuccuggagggcggcugggagggcaugaucgccggcuggcacggcuacaccagccacggcgcccacggcguggccguggccgccgaccugaagagcacccaggaggccaucaacaagaucaccaagaaccugaacagccugagcgagcuggaggugaagaaccugcagagacugagcggcgccauggacgagcugcacaacgagauccuggagcuggacgagaagguggacgaccugagagccgacaccaucagcagccagaucgagcuggccgugcugcugagcaacgagggcaucaucaacagcgaggacgagcaccugcuggcccuggagagaaagcugaagaagaugcugggccccagcgccguggacaucggcaacggcugcuucgagaccaagcacaagugcaaccagaccugccuggacagaaucgccgccggcaccuucaacgccggcgaguucagccugcccaccuucgacagccugaacaucaccgccgccagccugaacgacgacggccuggacaaccacaccauccugcuguacuacagcaccgccgccagcagccuggccgugacccugaugcuggccaucuucaucguguacauggugagcagagacaacgugagcugcagcaucugccuguga

SEQ ID NO: 188234 - RNA, 1755 nt, Artificial Sequence
  derived and/or modified CDS sequence (opt4) from hemagglutinin__InfluenzaB__AHL94817
augaaggccaucaucgugcugcugaugguggugaccagcaacgccgacagaaucugcaccggcaucaccagcagcaacagcccccacguggugaagaccgccacccagggcgaggugaacgugaccggcgccaucccccugaccaccacccccaccaagagcuacuucgccaaccugaagggcaccagaaccagaggcaagcugugccccgacugccugaacugcaccgaccuggacguggcccugggcagacccaugugcgugggcaccacccccagcgccaaggccagcauccugcacgaggugagacccgugaccagcggcugcuuccccaucaugcacgacagaaccaagaucagacagcugcccaaccugcugagaggcuacgagaacaucagacugagcacccagaacgugaucgacgccgagaaggcccccggcggccccuacagacugggcaccagcggcagcugccccaacgccaccagcaagaucggcuucuucgccaccauggccugggccgugcccaaggacaacuacaagaacgccaccaacccccagaccguggaggugcccuacaucugcaccgagggcgaggaccagaucaccguguggggcuuccacagcgacaacaagacccagaugaagaaccuguacggcgacagcaacccccagaaguucaccagcagcgccaacggcgugaccacccacuacgugagccagaucggcgacuuccccgaccagaccgaggacggcggccugccccagagcggcagaaucgugguggacuacauggugcagaagcccggcaagaccggcaccaucguguaccagagaggcgugcugcugccccagaagguguggugcgccagcggcagaagcaaggugaucaagggcagccugccccugaucggcgaggccgacugccugcacgagaaguacggcggccugaacaagagcaagcccuacuacaccggcgagcacgccaaggccaucggcaacugccccaucugggugaagaccccccugaagcuggccaacggcaccaaguacagaccccccgccaagcugcugaaggagagaggcuucuucggcgccaucgccggcuuccuggagggcggcugggagggcaugaucgccggcuggcacggcuacaccagccacggcgcccacggcguggccguggccgccgaccugaagagcacccaggaggccaucaacaagaucaccaagaaccugaacagccugagcgagcuggaggugaagaaccugcagagacugagcggcgccauggacgagcugcacaacgagaucaucgagcuggacgagaagguggacgaccugagagccgacaccaucagcagccagaucgagcuggccgugcugcugagcaacgagggcaucaucaacagcgaggacgagcaccugcuggcccuggagagaaagcugaagaagaugcugggccccagcgccguggacaucggcaacggcugcuucgagaccaagcacaagugcaaccagaccugccuggacagaaucgccgccggcaccuucaacgccggcgaguucagccugcccaccuucgacagccugaacaucaccgccgccagccugaacgacgacggccuggacaaccacaccauccugcuguacuacagcaccgccgccagcagccuggccgugacccugaugcuggccaucuucaucguguacauggugagcagagacaacgugagcugcagcaucugccuguga

SEQ ID NO: 188235 - RNA, 1758 nt, Artificial Sequence; identical to SEQ ID NO: 187925
  derived and/or modified CDS sequence (opt4) from hemagglutinin__InfluenzaB__AHL94827

SEQ ID NO: 188236 - RNA, 1755 nt, Artificial Sequence
  derived and/or modified CDS sequence (opt4) from hemagglutinin__InfluenzaB__AHL94837
augaaggccaucaucgugcugcugaugguggugaccagcaacgccgacagaaucugcaccggcaucaccagcagcaacagcccccacguggugaagaccgccacccagggcgaggugaacgugaccggcgugaucccccugaccaccacccccgccaagagcuacuucgccaaccugaagggcaccagaaccagaggcaagcugugccccgacugccugaacugcaccgaccuggacguggcccugggcagacccaugugcgugggcaccacccccagcgccaaggccagcauccugcacgaggugagacccgugaccagcggcugcuuccccaucaugcacgacagaaccaagaucagacagcugcccaaccugcugagaggcuacgagaacaucagacugagcacccagaacgugaucgacgccgagaaggcccccggcggccccuacaagcugggcaccagcggcagcugccccaacgccaccagcaagaucggcuucuucgccaccauggccugggccgugcccaaggacaacuacaagaacgccaccaacccccugaccguggaggugcccuacaucugcaaggagggcgaggaccagaucaccguguggggcuuccacagcgacaacaagacccagaugaagaaccuguacggcgacagcaacccccagaaguucaccagcagcgccaacggcgugaccacccacuacgugagccagaucggcgacuuccccgaccagaccgaggacggcggccugccccagagcggcagaaucgugguggacuacaugaugcagaagcccggcaagaccggcaccaucguguaccagagaggcgugcugcugccccagaagguguggugcgccagcggcagaagcaaggugaucaagggcagccugccccugaucggcgaggccgacugccugcacgaggaguacggcggccugaacaagagcaagcccuacuacaccggcaagcacgccaaggccaucggcaacugccccaucugggugaagaccccccugaagcuggccaacggcaccaaguacagaccccccgccaagcugcugaaggagagaggcuucuucggcgccaucgccggcuuccuggagggcggcugggagggcaugaucgccggcuggcacggcuacaccagccacggcgcccacggcguggccguggccgccgaccugaagagcacccaggaggccaucaacaagaucaccaagaaccugaacagccugagcgagcuggaggugaagaaccugcagagacugagcggcgccauggacgagcugcacaacgagauccuggagcuggacgagaagguggacgaccugagagccgacaccaucagcagccagaucgagcuggccgugcugcugagcaacgagggcaucaucaacagcgaggacgagcaccugcuggcccuggagagaaagcugaagaagaugcugggccccagcgccguggacaucggcaacggcugcuucgagaccaagcacaagugcaaccagaccugccuggacagaaucgccgccggcaccuucaacgccggcgaguucagccugcccaccuucgacagccugaacaucaccgccgccagccugaacgacgacggccuggacaaccacaccauccugcuguacuacagcaccgccgccagcagccuggccgugacccugaugcuggccaucuucaucguguacauggugagcagagacaacgugagcugcagcaucugccuguga

SEQ ID NO: 188237 - RNA, 1755 nt, Artificial Sequence; identical to SEQ ID NO: 186914
  derived and/or modified CDS sequence (opt4) from hemagglutinin__InfluenzaB__AHL94847

SEQ ID NO: 188238 - RNA, 1758 nt, Artificial Sequence
  derived and/or modified CDS sequence (opt4) from hemagglutinin__InfluenzaB__AHL94858
augaaggccaucaucgugcugcugaugguggugaccagcaacgccgacagaaucugcaccggcaucaccagcagcaacagcccccacguggugaagaccgccacccagggcgaggugaacgugaccggcgugaucccccugaccaccacccccaccaagagccacuucgccaaccugaagggcaccgagaccagaggcaagcugugccccaagugccugaacugcaccgaccuggacguggcccugggcagacccaagugcaccggcaacauccccagcgccagagugagcauccugcacgaggugagacccgugaccagcggcugcuuccccaucaugcacgacagaaccaagaucagacagcugcccaaccugcugagaggcuacgagcacaucagacugagcacccacaacgugaucaacgccgagaacgcccccggcggccccuacaagaucggcaccagcggcagcugccccaacgugaccaacggcaacggcuucuucgccaccauggccugggccgugcccaagaacgacaacaacaagaccgccaccaacagccugaccaucgaggugcccuacaucugcaccgagggcgaggaccagaucaccguguggggcuuccacagcgacaacgagacccagauggccaagcuguacggcgacagcaagccccagaaguucaccagcagcgccaacggcgugaccacccacuacgugagccagaucggcggcuuccccaaccagaccgaggacggcggccugccccagagcggcagaaucgugguggacuacauggugcagaagagcggcaaggccggcaccaucaccuaccagagaggcauccugcugccccagaagguguggugcgccagcggcagaagcaaggugaucaagggcagccugccccugaucggcgaggccgacugccugcacgagaaguacggcggccugaacaagagcaagcccuacuacaccggcgagcacgccaaggccaucggcaacugccccaucugggugaagaccccccugaagcuggccaacggcaccaaguacagaccccccgccaagcugcugaaggagagaggcuucuucggcgccaucgccggcuuccuggagggcggcugggagggcaugaucgccggcuggcacggcuacaccagccacggcgcccacggcguggccguggccgccgaccugaagagcacccaggaggccaucaacaagaucaccaagaaccugaacagccugagcgagcuggaggugaagaaccugcagagacugagcggcgccauggacgagcugcacaacgagauccuggagcuggacgagaagguggacgaccugagagccgacaccaucagcagccagaucgagcuggccgugcugcugagcaacgagggcaucaucaacagcgaggacgagcaccugcuggcccuggagagaaagcugaagaagaugcugggccccagcgccguggagaucggcaacggcugcuucgagaccaagcacaagugcaaccagaccugccuggacagaaucgccgccggcaccuucgacgccggcgaguucagccugcccaccuucgacagccugaacaucaccgccgccagccugaacgacgacggccuggacaaccacaccauccugcuguacuacagcaccgccgccagcagccuggccgugacccugaugaucgccaucuucgugguguacauggugagcagagacaacgugagcugcagcaucugccuguga

SEQ ID NO: 188239 - RNA, 1755 nt, Artificial Sequence; identical to SEQ ID NO: 186880
  derived and/or modified CDS sequence (opt4) from hemagglutinin__InfluenzaB__AHL94869

SEQ ID NO: 188240 - RNA, 1758 nt, Artificial Sequence; identical to SEQ ID NO: 187049
  derived and/or modified CDS sequence (opt4) from hemagglutinin__InfluenzaB__AHL94880

SEQ ID NO: 188241 - RNA, 1758 nt, Artificial Sequence; identical to SEQ ID NO: 187382
  derived and/or modified CDS sequence (opt4) from hemagglutinin__InfluenzaB__AHL94889

SEQ ID NO: 188242 - RNA, 1758 nt, Artificial Sequence; identical to SEQ ID NO: 187049
  derived and/or modified CDS sequence (opt4) from hemagglutinin__InfluenzaB__AHL94900

SEQ ID NO: 188243 - RNA, 1758 nt, Artificial Sequence
  derived and/or modified CDS sequence (opt4) from hemagglutinin__InfluenzaB__AHL94911
augaaggccaucaucgugcugcugaugguggugaccagcaacgccgacagaaucugcaccggcaucaccagcagcaacagcccccacguggugaagaccgccacccagggcgaggugaacgugaccggcgugaucccccugaccaccacccccaccaagagccacuucgccaaccugaagggcaccgagaccagaggcaagcugugccccaagugccccaacugcaccgaccuggacguggcccugggcagacccaagugcaccggcaagauccccagcgccagagugagcauccugcacgaggugagacccgugaccagcggcugcuuccccaucaugcacgacagaaccaagaucagacagcugcccaaccugcugagaggcuacgagcacaucagacugagcacccacaacgugaucaacgccgagaacgcccccggcggccccuacaagaucggcaccagcggcagcugccccaacgugaccaacggcaacggcuucuucgccaccauggccugggccgugcccaagaacgacaagaacaagaccgccaccaacccccugaccaucgaggugcccuacaucugcaccgagggcgaggaccagaucaccguguggggcuuccacagcgacaacgagacccagauggccaagcuguacggcgacagcaagccccagaaguucaccagcagcgccaacggcgugaccacccacuacgugagccagaucggcggcuuccccaaccagaccgaggacggcggccugccccagagcggcagaaucgugguggacuacauggugcagaagagcggcagaaccggcaccaucaccuaccagagaggcauccugcugccccagaagguguggugcgccagcggcagaagcaaggugaucaagggcagccugccccugaucggcgaggccgacugccugcacgagaaguacggcggccugaacaagagcaagcccuacuacaccggcgagcacgccaaggccaucggcaacugccccaucugggugaagaccccccugaagcuggccaacggcaccaaguacagaccccccgccaagcugcugaaggagagaggcuucuucggcgccaucgccggcuuccuggagggcggcugggagggcaugaucgccggcuggcacggcuacaccagccacggcgcccacggcguggccguggccgccgaccugaagagcacccaggaggccaucaacaagaucaccaagaaccugaacagccugagcgagcuggaggugaagaaccugcagagacugagcggcgccauggacgagcugcacaacgagauccuggagcuggacgagaagguggacgaccugagagccgacaccaucagcagccagaucgagcuggccgugcugcugagcaacgagggcaucaucaacagcgaggacgagcaccugcuggcccuggagagaaagcugaagaagaugcugggccccagcgccguggagaucggcaacggcugcuucgagaccaagcacaagugcaaccagaccugccuggacagaaucgccgccggcaccuucgacgccggcgaguucagccugcccaccuucgacagccugaacaucaccgccgccagccugaacgacgacggccuggacaaccacaccauccugcuguacuacagcaccgccgccagcagccuggccgugacccugaugaucgccaucuucgugguguacauggugagcagagacaacgugagcugcagcaucugccuguga

SEQ ID NO: 188244 - RNA, 1758 nt, Artificial Sequence; identical to SEQ ID NO: 187049
  derived and/or modified CDS sequence (opt4) from hemagglutinin__InfluenzaB__AHL94922

SEQ ID NO: 188245 - RNA, 1758 nt, Artificial Sequence
  derived and/or modified CDS sequence (opt4) from hemagglutinin__InfluenzaB__AHL94933
augaaggccaucaucgugcugcugaugguggugaccagcaacgccgacagaaucugcaccggcaucaccagcagcaacagcccccacguggugaagaccgccacccagggcgaggugaacgugaccggcgugaucccccugaccaccacccccaccaagagccacuucgccaaccugaagggcaccgagaccagaggcaagcugugccccaagugccugaacugcaccgaccuggacguggcccugggcagacccaagugcaccggcaagauccccagcgccagagugagcauccugcacgaggugagacccgugaccagcggcugcuuccccaucaugcacgacagaaccaagaucagacagcugcccaaccugcugagaggcuacgagcacaucagacugagcacccacaacgugaucaacgccgagaacgcccccggcggccccuacaagaucggcaccagcggcagcugccccaacaucaccaacggcaacggcuucuucgccaccauggccugggccgugcccaagaacgacaagaacaagaccgccaccaacccccugaccaucgaggugcccuacaucugcaccgagggcgaggaccagaucaccguguggggcuuccacagcgacaacgagacccagauggccaagcuguacggcgacagcaagccccagaaguucaccagcagcgccaacggcgugaccacccacuacgugagccagaucggcggcuuccccaaccagaccgaggacggcggccugccccagagcggcagaaucgugguggacuacauggugcagaagagcggcaaggccggcaccaucaccuaccagagaggcauccugcugccccagaagguguggugcgccagcggcagaagcaaggugaucaagggcagccugccccugaucggcgaggccgacugccugcacgagaaguacggcggccugaacaagagcaagcccuacuacaccggcgagcacgccaaggccaucggcaacugccccaucugggugaagaccccccugaagcuggccaacggcaccaaguacagaccccccgccaagcugcugaaggagagaggcuucuucggcgccaucgccggcuuccuggagggcggcugggagggcaugaucgccggcuggcacggcuacaccagccacggcgcccacggcguggccguggccgccgaccugaagagcacccaggaggccaucaacaagaucaccaagaaccugaacagccugagcgagcuggaggugaagaaccugcagagacugagcggcgccauggacgagcugcacaacgagauccuggagcuggacgagaagguggacgaccugagagccgacaccaucagcagccagaucgagcuggccgugcugcugagcaacgagggcaucaucaacagcgaggacgagcaccugcuggcccuggagagaaagcugaagaagaugcugggccccagcgccguggagaucggcaacggcugcuucgagaccaagcacaagugcaaccagaccugccuggacagaaucgccgccggcaccuucgacgccggcgaguucagccugcccaccuucgacagccugaacaucaccgccgccagccugaacgacgacggccuggacaaccacaccauccugcuguacuacagcaccgccgccagcagccuggccgugacccugaugaucgccaucuucgugguguacauggugagcagagacaacgugagcugcagcaucugccuguga

SEQ ID NO: 188246 - RNA, 1758 nt, Artificial Sequence; identical to SEQ ID NO: 188130
  derived and/or modified CDS sequence (opt4) from hemagglutinin__InfluenzaB__AHL94944

SEQ ID NO: 188247 - RNA, 1758 nt, Artificial Sequence; identical to SEQ ID NO: 186743
  derived and/or modified CDS sequence (opt4) from hemagglutinin__InfluenzaB__AHL94955

SEQ ID NO: 188248 - RNA, 1758 nt, Artificial Sequence; identical to SEQ ID NO: 186743
  derived and/or modified CDS sequence (opt4) from hemagglutinin__InfluenzaB__AHL94965

SEQ ID NO: 188249 - RNA, 1758 nt, Artificial Sequence; identical to SEQ ID NO: 186743
  derived and/or modified CDS sequence (opt4) from hemagglutinin__InfluenzaB__AHL94975

SEQ ID NO: 188250 - RNA, 1755 nt, Artificial Sequence; identical to SEQ ID NO: 186914
  derived and/or modified CDS sequence (opt4) from hemagglutinin__InfluenzaB__AHM00986

SEQ ID NO: 188251 - RNA, 1758 nt, Artificial Sequence; identical to SEQ ID NO: 186947
  derived and/or modified CDS sequence (opt4) from hemagglutinin__InfluenzaB__AHM00997

SEQ ID NO: 188252 - RNA, 1758 nt, Artificial Sequence
  derived and/or modified CDS sequence (opt4) from hemagglutinin__InfluenzaB__AHM01008
augaaggccaucaucgugcugcugaugguggugaccagcaacgccgacagaaucugcaccggcaucaccagcagcaacagcccccacguggugaagaccgccacccagggcgaggugaacgugaccggcgugaucccccugaccaccacccccaccaagagccacuucgccaaccugaagggcaccgagaccagaggcaagcugugccccaagugccugaacugcaccgaccuggacguggcccugggcagacccaagugcaccggcaagauccccagcgccagagugagcauccugcacgaggugagacccgugaccagcggcugcuuccccaucaugcacgacagaaccaagaucagacagcugcccaaccugcugagaggcuacgagcacaucagacugagcacccacaacgugaucaacgccgaggacgcccccggcggccccuacaagaucggcaccagcggcagcugccccaacgugaccaacggcaacggcuucuucgccaccauggccuggaccgugcccaagaacgacaagaacaagaccgccaccaacccccugaccaucgaggugcccuacaucugcaccgagggcgaggaccagaucaccguguggggcuuccacagcgacaacgagacccagauggccaagcuguacggcgacagcaagccccagaaguucaccagcagcgccaacggcgugaccacccacuacgugagccagaucggcggcuuccccaaccagaccgaggacggcggccugccccagagcggcagaaucgugguggacuacauggugcagaagagcggcaagaccggcaccaucaccuaccagagaggcauccugcugccccagaagguguggugcgccagcggcagaagcaaggugaucaagggcagccugccccugaucggcgaggccgacugccugcacgagaaguacggcggccugaacaagagcaagcccuacuacaccggcgagcacgccaaggccaucggcaacugccccaucugggugaagaccccccugaagcuggccaacggcaccaaguacagaccccccgccaagcugcugaaggagagaggcuucuucggcgccaucgccggcuuccuggagggcggcugggagggcaugaucgccggcuggcacggcuacaccagccacggcgcccacggcguggccguggccgccgaccugaagagcacccaggaggccaucaacaagaucaccaagaaccugaacagccugagcgagcuggaggugaagaaccugcagagacugagcggcgccauggacgagcugcacaacgagauccuggagcuggacgagaagguggacgaccugagagccgacaccaucagcagccagaucgagcuggccgugcugcugagcaacgagggcaucaucaacagcgaggacgagcaccugcuggcccuggagagaaagcugaagaagaugcugggccccagcgccguggagaucggcaacggcugcuucgagaccaagcacaagugcaaccagaccugccuggacagaaucgccgccggcaccuucgacgccggcgaguucagccugcccaccuucgacagccugaacaucaccgccgccagccugaacgacgacggccuggacaaccacaccauccugcuguacuacagcaccgccgccagcagccuggccgugacccugaugaucgccaucuucgugguguacauggugagcagagacaacgugagcugcagcaucugccuguga

SEQ ID NO: 188253 - RNA, 1758 nt, Artificial Sequence; identical to SEQ ID NO: 186947
  derived and/or modified CDS sequence (opt4) from hemagglutinin__InfluenzaB__AHM01019

SEQ ID NO: 188254 - RNA, 1758 nt, Artificial Sequence; identical to SEQ ID NO: 186947
  derived and/or modified CDS sequence (opt4) from hemagglutinin__InfluenzaB__AHM01030

SEQ ID NO: 188255 - RNA, 1758 nt, Artificial Sequence
  derived and/or modified CDS sequence (opt4) from hemagglutinin__InfluenzaB__AHM01041
augaaggccaucaucgugcugcugaugguggugaccagcaacgccgacagaaucugcaccggcaucaccagcagcaacagcccccacguggugaagaccgccacccagggcgaggugaacgugaccggcgugaucccccugaccaccacccccaccaagagccacuucgccaaccugaagggcaccgagaccagaggcaagcugugccccaagugccugaacugcaccgaccuggacguggcccugggcagacccaagugcaccggcaagauccccagcgccagagugagcauccugcacgaggugagacccgugaccagcggcugcuuccccaucaugcacgacagaaccaagaucagacagcugcccaaccugcugagaggcuacgagcacaucagacugagcacccacaacgugaucaacgccgaggacgcccccggcggccccuacaagaucggcaccagcggcagcugccccaacgugaccaacggcaacggcuucuucgccaccauggccugggccgugcccaagaacgacaagaacaagaccgccaccaacccccugaccaucgaggugcccuacaucugcaccgagggcgaggaccagaucaccguguggggcuuccacagcgacaacgagacccagauggccaagcuguacggcgacagcaagccccagaaguucaccagcagcgccaacggcgugaccacccacuacgugagccagaucggcggcuuccccaaccagaccgaggacggcggccugccccagagcggcagaaucgugguggacuacauggugcagaagagcgagaagaccggcaccaucaccuaccagagaggcauccugcugccccagaagguguggugcgccagcggcagaagcaaggugaucaagggcagccugccccugaucggcgaggccgacugccugcacgagaaguacggcggccugaacaagagcaagcccuacuacaccggcgagcacgccaaggccaucggcaacugccccaucugggugaagaccccccugaagcuggccaacggcaccaaguacagaccccccgccaagcugcugaaggagagaggcuucuucggcgccaucgccggcuuccuggagggcggcugggagggcaugaucgccggcuggcacggcuacaccagccacggcgcccacggcguggccguggccgccgaccugaagagcacccaggaggccaucaacaagaucaccaagaaccugaacagccugagcgagcuggaggugaagaaccugcagagacugagcggcgccauggacgagcugcacaacgagauccuggagcuggacgagaagguggacgaccugagagccgacaccaucagcagccagaucgagcuggccgugcugcugagcaacgagggcaucaucaacagcgaggacgagcaccugcuggcccuggagagaaagcugaagaagaugcugggccccagcgccguggagaucggcaacggcugcuucgagaccaagcacaagugcaaccagaccugccuggacagaaucgccgccggcaccuucgacgccggcgaguucagccugcccaccuucgacagccugaacaucaccgccgccagccugaacgacgacggccuggacaaccacaccauccugcuguacuacagcaccgccgccagcagccuggccgugacccugaugaucgccaucuucgugguguacauggugagcagagacaacgugagcugcagcaucugccuguga

SEQ ID NO: 188256 - RNA, 1758 nt, Artificial Sequence
  derived and/or modified CDS sequence (opt4) from hemagglutinin__InfluenzaB__AHM01052
augaaggccaucaucgugcugcugaugguggugaccagcaacgccgacagaaucugcaccggcaucaccagcagcaacagcccccacguggugaagaccgccacccagggcgaggugaacgugaccggcgugaucccccugaccaccacccccaccaagagccacuucgccaaccugaagggcaccgagaccagaggcaagcugugccccaagugccugaacugcaccgaccuggacguggcccugggcagacccaagugcaccggcaagauccccagcgccagagugagcauccugcacgaggugagacccgugaccagcggcugcuuccccaucaugcacgacagaaccaagaucagacagcugcccaaccugcugagaggcuacgagcacaucagacugagcacccacaacgugaucaacgccgagaacgcccccggcggccccuacaagaucggcaccagcggcagcugccccaacgugaccaacggcaacggcuucuucgccaccauggccugggccgugcccaagaacgacaagaacaagaccgccaccaacccccugaccaucgaggugcccuacaucugcaccgagggcgaggaccagaucaccguguggggcuuccacagcgacaacgagacccagauggccaagcuguacggcgacagcaagccccagaaguucaccagcagcgccaacggcgugaccacccacuacgugagccagaucggcggcuuccccaaccagaccgaggacggcggccugccccagagcggcagaaucgugguggacuacauggugcagaagagcggcaagaccggcaccaucaccuaccagagaggcauccugcugccccagaagguguggugcgccagcggcagaagcaaggugaucaagggcagccugccccugaucggcgaggccgacugccugcacgagaaguacggcggccugaacaagagcaagcccuacuacaccggcgagcacgccaaggccaucggcaacugccccaucugggugaagaccccccugaagcuggccaacggcaccaaguacagaccccccgccaagcugcugaaggagagaggcuucuucggcgccaucgccggcuuccuggagggcggcugggagggcaugaucgccggcuggcacggcuacaccagccacggcgcccacggcguggccguggccgccgaccugaagagcacccaggaggccaucaacaagaucaccaagaaccugaacagccugagcgagcuggaggugaagaaccugcagagacugagcggcgccauggacgagcugcacaacgagauccuggagcuggacgagaagguggacgaccugagagccgacaccaucagcagccagaucgagcuggccgugcugcugagcaacgagggcaucaucaacagcgaggacgagcaccugcuggcccuggagagaaagcugaagaagaugcugggccccagcgccguggagaucggcaacggcugcuucgagaccaagcacaagugcaaccagaccugccuggacagaaucgccgccggcaccuucgacgccggcgaguucagccugcccaccuucgacagccugaacaucaccgccgccagccugaacgacgacggccuggacaaccacaccaucaugcuguacuacagcaccgccgccagcagccuggccgugacccugaugaucgccaucuucgugguguacauggugagcagagacaacgugagcugcagcaucugccuguga

SEQ ID NO: 188257 - RNA, 1758 nt, Artificial Sequence; identical to SEQ ID NO: 186947
  derived and/or modified CDS sequence (opt4) from hemagglutinin__InfluenzaB__AHM01063

SEQ ID NO: 188258 - RNA, 1755 nt, Artificial Sequence; identical to SEQ ID NO: 186914
  derived and/or modified CDS sequence (opt4) from hemagglutinin__InfluenzaB__AHM01074

SEQ ID NO: 188259 - RNA, 1755 nt, Artificial Sequence
  derived and/or modified CDS sequence (opt4) from hemagglutinin__InfluenzaB__AHM01096
augaaggccaucaucgugcugcugaugguggugaccagcaacgccgacagaaucugcaccggcaucaccagcagcaacagcccccacguggugaagaccgccacccagggcgaggugaacgugaccggcgugaucccccugaccaccacccccaccaagagcuacuucgccaaccugaagggcaccaagaccagaggcaagcugugccccgacugccugaacugcaccgaccuggacguggcccugggcagacccaugugcgugggcaccacccccagcgccaaggccagcauccugcacgaggugagacccgugaccagcggcugcuuccccaucaugcacgacagaaccaagaucagacagcuggccaaccugcugagaggcuacgagaacaucagacugagcacccagaacgugaucgacgccgagaaggcccccggcggccccuacagacugggcaccagcggcagcugccccaacgccaccagcaagagcggcuucuucgccaccauggccugggccgugcccaaggacaacaacaagaacgccaccaacccccugaccguggaggugcccuacaucugcgccgagggcgaggaccagaucaccguguggggcuuccacagcgacaacaagacccagaugaagaaccuguacggcgacagcaacccccagaaguucaccagcagcgccaacggcgugaccacccacuacgugagccagaucggcggcuuccccgaccagaccgaggacggcggccugccccagagcggcagaaucgugguggacuacaugaugcagaagcccggcaagaccggcaccaucguguaccagagaggcauccugcugccccagaagguguggugcgccagcggcagaagcaaggugaucaagggcagccugccccugaucggcgaggccgacugccugcacgagaaguacggcggccugaacaagagcaagcccuacuacaccggcgagcacgccaaggccaucggcaacugccccaucugggugaagaccccccugaagcuggccaacggcaccaaguacagaccccccgccaagcugcugaaggagagaggcuucuucggcgccaucgccggcuuccuggagggcggcugggagggcaugaucgccggcuggcacggcuacaccagccacggcgcccacggcguggccguggccgccgaccugaagagcacccaggaggccaucaacaagaucaccaagaaccugaacagccugagcgagcuggaggugaagaaccugcagagacugagcggcgccauggacgagcugcacaacgagauccuggagcuggacgagaagguggacgaccugagagccgacaccaucagcagccagaucgagcuggccgugcugcugagcaacgagggcaucaucaacagcgaggacgagcaccugcuggcccuggagagaaagcugaagaagaugcugggccccagcgccguggacaucggcaacggcugcuucgagaccaagcacaagugcaaccagaccugccuggacagaaucgccgccggcaccuucaacgccggcgaguucagccugcccaccuucgacagccugaacaucaccgccgccagccugaacgacgacggccuggacaaccacaccauccugcuguacuacagcaccgccgccagcagccuggccgugacccugaugcuggccaucuucaucguguacauggugagcagagacaacgugagcugcagcaucugccuguga

SEQ ID NO: 188260 - RNA, 1758 nt, Artificial Sequence; identical to SEQ ID NO: 186947
  derived and/or modified CDS sequence (opt4) from hemagglutinin__InfluenzaB__AHM01107

SEQ ID NO: 188261 - RNA, 1758 nt, Artificial Sequence
  derived and/or modified CDS sequence (opt4) from hemagglutinin__InfluenzaB__AHM01118
augaaggccaucaucgugcugcugaugguggugaccagcaacgccgacagaaucugcaccggcaucaccagcagcaacagcccccacguggugaagaccgccacccagggcgaggugaacgugaccggcgugaucccccugaccaccacccccaccaagagccacuucgccaaccugaagggcaccgagaccagaggcaagcugugccccaagugccugaacugcaccgaccuggacguggcccugggcagacccaagugcaccggcaagauccccagcgccagagugagcauccugcacgaggugagacccgugaccagcggcugcuuccccaucaugcacgacagaaccaagaucagacagcugcccaaccugcugagaggcuacgagcacaucagacugagcacccacaacgugaucaacgccgaggacgcccccggcggccccuacaagaucggcaccagcggcagcugccccaacgugaccaacggcaacggcuucuucgccaccauggccugggccgugcccaagaacgacaagaacaagaccgccaccaacccccugaccaucgaggugcccuacaucugcaccgagggcgaggaccagaucaccguguggggcuuccacagcgacaacgagacccagauggccaagcuguacggcgacagcaagccccagaaguucaccagcagcgccaacggcgugaccacccacuacgugagccagaucggcggcuuccccaaccagaccgaggacggcggccugccccagagcggcagaaucgugguggacuacauggugcagaagagcggcaagaccggcaccaucaccuaccagagaggcauccugcugccccagaagguguggugcgccagcggcagaagcaaggugaucaagggcagccugccccugaucggcgaggccgacugccugcacgagaaguacggcggccugaacaagagcaagcccuacuacaccggcgagcacgccaaggccaucggcaacugccccaucugggugaagaccccccugaagcuggccaacggcaccaaguacagaccccccgccaagcugcugaaggagagaggcuucuucggcgccaucgccggcuuccuggagggcggcugggagggcaugaucgccggcuggcacggcuacaccagccacggcgcccacggcguggccguggccgccgaccugaagagcacccaggaggccaucaacaagaucaccaagaaccugaacagccugagcgagcuggaggugaagaaccugcagagacugagcggcgccauggacgagcugcacaacgagauccuggagcuggacgagaagguggacgaccugagagccgacaccaucagcagccagaucgagcuggccgugcugcugagcaacgagggcaucaucaacagcgaggacgagcaccugcuggcccuggagagaaagcugaagaagaugcugggccccagcgccguggagaucggcaacggcugcuucgagaccaagcacaagugcaaccagaccugccuggacagaaucgccgccggcaccuucgacgccggcgaguucagccugcccaccuucgacagccugaacaucaccgccgugagccugaacgacgacggccuggacaaccacaccauccugcuguacuacagcaccgccgccagcagccuggccgugacccugaugaucgccaucuucgugguguacauggugagcagagacaacgugagcugcagcaucugccuguga

SEQ ID NO: 188262 - RNA, 1758 nt, Artificial Sequence; identical to SEQ ID NO: 186947
  derived and/or modified CDS sequence (opt4) from hemagglutinin__InfluenzaB__AHM01129

SEQ ID NO: 188263 - RNA, 1758 nt, Artificial Sequence
  derived and/or modified CDS sequence (opt4) from hemagglutinin__InfluenzaB__AHM01140
augaaggccaucaucgugcugcugaugguggugaccagcaacgccgacagaaucugcaccggcaucaccagcagcaacagcccccacguggugaagaccgccacccagggcgaggugaacgugaccggcgugaucccccugaccaccacccccaccaagagccacuucgccaaccugaagggcaccgagaccagaggcaagcugugccccaagugccugaacugcaccgaccuggacguggcccugggcagacccaagugcaccggcaagauccccagcgccagagugagcauccugcacgaggugagacccgugaccagcggcugcuuccccaucaugcacgacagaaccaagaucagacagcugcccaaccugcugagaggcuacgagcacaucagacugagcgcccacaacgugaucaacgccgagaacgcccccggcggccccuacaagaucggcaccagcggcagcugccccaacgugaccaacggcaacggcuucuucgccaccauggccugggccgugcccaagaacgacaagaacaagaccgccaccaacccccugaccaucgaggugcccuacaucugcaccgagggcgaggaccagaucaccguguggggcuuccacagcgacaacgagacccagauggccaagcuguacggcgacagcaagccccagaaguucaccagcagcgccaacggcgugaccacccacuacgugagccagaucggcggcuuccccaaccagaccgaggacggcggccugccccagagcggcagaaucgugguggacuacauggugcagaagagcggcaagaccggcaccaucaccuaccagagaggcauccugcugccccagaagguguggugcgccagcggcagaagcaaggugaucaagggcagccugccccugaucggcgaggccgacugccugcacgagaaguacggcggccugaacaagagcaagcccuacuacaccggcgagcacgccaaggccaucggcaacugccccaucugggugaagaccccccugaagcuggccaacggcaccaaguacagaccccccgccaagcugcugaaggagagaggcuucuucggcgccaucgccggcuuccuggagggcggcugggagggcaugaucgccggcuggcacggcuacaccagccacggcgcccacggcguggccguggccgccgaccugaagagcacccaggaggccaucaacaagaucaccaagaaccugaacagccugagcgagcuggaggugaagaaccugcagagacugagcggcgccauggacgagcugcacaacgagauccuggagcuggacgagaagguggacgaccugagagccgacaccaucagcagccagaucgagcuggccgugcugcugagcaacgagggcaucaucaacagcgaggacgagcaccugcuggcccuggagagaaagcugaagaagaugcugggccccagcgccguggagaucggcaacggcugcuucgagaccaagcacaagugcaaccagaccugccuggacagaaucgccgccggcaccuucgacgccggcgaguucagccugcccaccuucgacagccugaacaucaccgccgccagccugaacgacgacggccuggacaaccacaccauccugcuguacuacagcaccgccgccagcagccuggccgugacccugaugaucgccaucuucgugguguacauggugagcagagacaacgugagcugcagcaucugccuguga

SEQ ID NO: 188264 - RNA, 1758 nt, Artificial Sequence; identical to SEQ ID NO: 186932
  derived and/or modified CDS sequence (opt4) from hemagglutinin__InfluenzaB__AHM01151

SEQ ID NO: 188265 - RNA, 1758 nt, Artificial Sequence
  derived and/or modified CDS sequence (opt4) from hemagglutinin__InfluenzaB__AHM01162
augaaggccaucaucgugcugcugaugguggugaccagcaacgccgacagaaucugcaccggcaucaccagcagcaacagcccccacguggugaagaccgccacccagggcgaggugaacgugaccggcgugaucccccugaccaccacccccaccaagagccacuucgccaaccugaagggcaccgagaccagaggcaagcugugccccaagugccugaacugcaccgaccuggacguggcccugggcagacccaagugcaccggcaagauccccagcgccagagugagcauccugcacgaggugagacccgugaccagcggcugcuuccccaucaugcacgacagaaccaagaucagacagcugcccaaccugcugagaggcuacgagcacaucagacugagcacccacaacgugaucaacgccaaggacgcccccggcggccccuacaagaucggcaccagcggcagcugccccaacgugaccaacggcaacggcuucuucgccaccauggccugggccgugcccaagaacgacaagaacaagaccgccaccaacccccugaccaucgaggugcccuacaucugcaccgagggcgaggaccagaucaccguguggggcuuccacagcgacaacgagacccagauggccaagcuguacggcgacagcaagccccagaaguucaccagcagcgccaacggcgugaccacccacuacgugagccagaucggcggcuuccccaaccagaccgaggacggcggccugccccagagcggcagaaucgugguggacuacauggugcagaagagcggcaagaccggcaccaucaccuaccagagaggcauccugcugccccagaagguguggugcgccagcggcagaagcaaggugaucaagggcagccugccccugaucggcgaggccgacugccugcacgagaaguacggcggccugaacaagagcaagcccuacuacaccggcgagcacgccaaggccaucggcaacugccccaucugggugaagaccccccugaagcuggccaacggcaccaaguacagaccccccgccaagcugcugaaggagagaggcuucuucggcgccaucgccggcuuccuggagggcggcugggagggcaugaucgccggcuggcacggcuacaccagccacggcgcccacggcguggccguggccgccgaccugaagagcacccaggaggccaucaacaagaucaccaagaaccugaacagccugagcgagcuggaggugaagaaccugcagagacugagcggcgccauggacgagcugcacaacgagauccuggagcuggacgagaagguggacgaccugagagccgacaccaucagcagccagaucgagcuggccgugcugcugagcaacgagggcaucaucaacagcgaggacgagcaccugcuggcccuggagagaaagcugaagaagaugcugggccccagcgccguggagaucggcaacggcugcuucgagaccaagcacaagugcaaccagaccugccuggacagaaucgccgccggcaccuucgacgccggcgaguucagccugcccaccuucgacagccugaacaucaccgccgccagccugaacgacgacggccuggacaaccacaccauccugcuguacuacagcaccgccgccagcagccuggccgugacccugaugaucgccaucuucgugguguacauggugagcagagacaacgugagcugcagcaucugccuguga

SEQ ID NO: 188266 - RNA, 1755 nt, Artificial Sequence; identical to SEQ ID NO: 186914
  derived and/or modified CDS sequence (opt4) from hemagglutinin__InfluenzaB__AHM01173

SEQ ID NO: 188267 - RNA, 1758 nt, Artificial Sequence
  derived and/or modified CDS sequence (opt4) from hemagglutinin__InfluenzaB__AHM01184
augaaggccaucaucgugcugcugaugguggugaccagcaacgccgacagaaucugcaccggcaucaccagcagcaacagcccccacguggugaagaccgccacccagggcgaggugaacgugaccggcgugaucacccugaccaccacccccaccaagagccacuucgccaaccugaagggcaccgagaccagaggcaagcugugccccaagugccugaacugcaccgaccuggacguggcccugggcagacccaagugcaccggcaagauccccagcgccagagugagcauccugcacgaggugagacccgugaccagcggcugcuuccccaucaugcacgacagaaccaagaucagacagcugcccaaccugcugagaggcuacgagcacaucagacugagcacccacaacgugaucaacgccgaggacgcccccggcggccccuacaagaucggcaccagcggcagcugccccaacgugaccaacggcaacggcuucuucgccaccauggccugggccgugcccaagaacgacaagaacaagaccgccaccaacccccugaccaucgaggugcccuacaucugcaccgagggcgaggaccagaucaccguguggggcuuccacagcgacaacgagacccagauggccaagcuguacggcgacagcaagccccagaaguucaccagcagcgccaacggcgugaccacccacuacgugagccagaucggcggcuuccccaaccagaccgaggacggcggccugccccagagcggcagaaucgugguggacuacauggugcagaagagcggcaagaccggcaccaucaccuaccagagaggcauccugcugccccagaagguguggugcgccagcggcagaagcaaggugaucaagggcagccugccccugaucggcgaggccgacugccugcacgagaaguacggcggccugaacaagagcaagcccuacuacaccggcgagcacgccaaggccaucggcaacugccccaucugggugaagaccccccugaagcuggccaacggcaccaaguacagaccccccgccaagcugcugaaggagagaggcuucuucggcgccaucgccggcuuccuggagggcggcugggagggcaugaucgccggcuggcacggcuacaccagccacggcgcccacggcguggccguggccgccgaccugaagagcacccaggaggccaucaacaagaucaccaagaaccugaacagccugagcgagcuggaggugaagaaccugcagagacugagcggcgccauggacgagcugcacaacgagauccuggagcuggacgagaagguggacgaccugagagccgacaccaucagcagccagaucgagcuggccgugcugcugagcaacgagggcaucaucaacagcgaggacgagcaccugcuggcccuggagagaaagcugaagaagaugcugggccccagcgccguggagaucggcaacggcugcuucgagaccaagcacaagugcaaccagaccugccuggacagaaucgccgccggcaccuucgacgccggcgaguucagccugcccaccuucgacagccugaacaucaccgccgccagccugaacgacgacggccuggacaaccacaccauccugcuguacuacagcaccgccgccagcagccuggccgugacccugaugaucgccaucuucgugguguacauggugagcagagacaacgugagcugcagcaucugccuguga

SEQ ID NO: 188268 - RNA, 1758 nt, Artificial Sequence; identical to SEQ ID NO: 188263
  derived and/or modified CDS sequence (opt4) from hemagglutinin__InfluenzaB__AHM01195

SEQ ID NO: 188269 - RNA, 1758 nt, Artificial Sequence
  derived and/or modified CDS sequence (opt4) from hemagglutinin__InfluenzaB__AHM01206
augaaggccaucaucgugcugcugaugguggugaccagcaacgccgacagaaucugcaccggcaucaccagcagcaacagcccccacguggugaagaccgccacccagggcgaggugaacgugaccggcgugaucccccugaccaccacccccaccaagagccacuucgccaaccugaagggcaccgagaccagaggcaagcugugccccaagugccugaacugcaccgaccuggacguggcccugggcagacccaagugcaccggcaagauccccagcgccagagugagcauccugcacgaggugagacccgugaccagcggcugcuuccccaucaugcacgacagaaccaagaucagacagcugcccaaccugcugagaggcuacgagcacaucagacugagcacccacaacgugaucaacgccgaggacgcccccggcggccccuacaagaucggcaccagcggcagcugccccaacgugaccaacggcaacggcuucuucgccaccauggccugggccgugcccaagaacgacaagaacaagaccgccaccaacccccugaccaucgaggugcccuacaucugcaccgagggcgaggaccagaucaccguguggggcuuccacagcgacaacgagacccagauggccaagcuguacggcgacagcaagccccagaaguucaccagcagcgccaacggcgugaccacccacuacgugagccagaucggcggcuuccccaaccagaccgaggacggcggccugccccagagcggcagaaucgugguggacuacauggugcagaagagcgagaagaccggcaccaucaccuaccagagaggcauccugcugccccagaagguguggugcgccagcggcagaagcaaggugaucaagggcagccugccccugaucggcgaggccgacugccugcacgagaaguacggcggccugaacaagagcaagcccuacuacaccggcgagcacgccaaggccaucggcaacugccccaucugggugaagaccccccugaagcuggccaacggcaccaaguacagaccccccgccaagcugcugaaggagagaggcuucuucggcgccaucgccggcuuccuggagggcggcugggagggcaugaucgccggcuggcacggcuacaccagccacggcgcccacggcguggccguggccgccgaccugaagagcacccaggaggccaucaacaagaucaccaagaaccugaacagccugagcgagcuggaggugaagaaccugcagagacugagcggcgccauggacgagcugcacaacgagauccuggagcuggacgagaagguggacgaccugagagccgacaccaucagcagccagaucgagcuggccgugcugcugagcaacgagggcaucaucaacagcgaggacgagcaccugcuggcccuggagagaaagcugaagaagaugcugggccccagcgccguggagaucggcaacggcugcuucgagaccaagcacaagugcaaccagaccugccuggacagaaucgccgccggcaccuucgacgccggcgaguucagccugcccaccuucgacagccugaacaucaccgccgccagccugaacgacgacggccugggcaaccacaccauccugcuguacuacagcaccgccgccagcagccuggccgugacccugaugaucgccaucuucgugguguacauggugagcagagacaacgugagcugcagcaucugccuguga

SEQ ID NO: 188270 - RNA, 1758 nt, Artificial Sequence; identical to SEQ ID NO: 186932
  derived and/or modified CDS sequence (opt4) from hemagglutinin__InfluenzaB__AHM01217

SEQ ID NO: 188271 - RNA, 1755 nt, Artificial Sequence; identical to SEQ ID NO: 186914
  derived and/or modified CDS sequence (opt4) from hemagglutinin__InfluenzaB__AHM01228

SEQ ID NO: 188272 - RNA, 1758 nt, Artificial Sequence; identical to SEQ ID NO: 186947
  derived and/or modified CDS sequence (opt4) from hemagglutinin__InfluenzaB__AHM01239

SEQ ID NO: 188273 - RNA, 1758 nt, Artificial Sequence; identical to SEQ ID NO: 186947
  derived and/or modified CDS sequence (opt4) from hemagglutinin__InfluenzaB__AHM01250

SEQ ID NO: 188274 - RNA, 1758 nt, Artificial Sequence
  derived and/or modified CDS sequence (opt4) from hemagglutinin__InfluenzaB__AHM01261
augaaggccaucaucgugcugcugaugguggugaccagcaacgccgacagaaucugcaccggcaucaccagcagcaacagcccccacguggugaagaccgccacccagggcgaggugaacgugaccggcgugaucccccugaccaccacccccaccaagagccacuucgccaaccugaagggcaccgagaccagaggcaagcugugccccaagugccugaacugcaccgaccuggacguggcccugggcagacccaagugcaccggcaagauccccagcgccagagugagcauccugcacgaggugagacccgugaccagcggcugcuuccccaucaugcacgacagaaccaagaucagacagcugcccaaccugcugagaggcuacgagcacaucagacugagcacccacaacgugaucaacgccgagaacgcccccggcggccccuacaagaucggcaccagcggcagcugccccaacgugaccaacggcaacggcuucuucgccaccauggccugggccgugcccaagaacgacaagaacaagaccgccaccaacccccugaccaucgaggugcccuacaucugcaccgagggcgaggaccagaucaccaucuggggcuuccacagcgacaacgagacccagauggccaagcuguacggcgacagcaacccccagaaguucaccagcagcgccaacggcgugaccacccacuacgugagccagaucggcggcuuccccaaccagaccgaggacggcggccugccccagagcggcagaaucgugguggacuacauggugcagaagagcggcaagaccggcaccaucaccuaccagagaggcauccugcugccccagaagguguggugcgccggcggcagaagcaaggugaucaagggcagccugccccugaucggcgaggccgacugccugcacgagaaguacggcggccugaacaagagcaagcccuacuacaccggcgagcacgccaaggccaucggcaacugccccaucugggugaagaccccccugaagcuggccaacggcaccaaguacagaccccccgccaagcugcugaaggagagaggcuucuucggcgccaucgccggcuuccuggagggcggcugggagggcaugaucgccggcuggcacggcuacaccagccacggcgcccacggcguggccguggccgccgaccugaagagcacccaggaggccaucaacaagaucaccaagaaccugaacagccugagcgagcuggaggugaagaaccugcagagacugagcggcgccauggacgagcugcacaacgagauccuggagcuggacgagaagguggacgaccugagagccgacaccaucagcagccagaucgagcuggccgugcugcugagcaacgagggcaucaucaacagcgaggacgagcaccugcuggcccuggagagaaagcugaagaagaugcugggccccagcgccguggagaucggcaacggcugcuucgagaccaagcacaagugcaaccagaccugccuggacagaaucgccgccggcaccuucgacgccggcgaguucagccugcccaccuucgacagccugaacaucaccgccgccagccugaacgacgacggccuggacaaccacaccauccugcuguacuacagcaccgccgccagcagccuggccgugacccugaugaucgccaucuucgugguguacauggugagcagagacaacgugagcugcagcaucugccuguga

SEQ ID NO: 188275 - RNA, 1755 nt, Artificial Sequence; identical to SEQ ID NO: 186914
  derived and/or modified CDS sequence (opt4) from hemagglutinin__InfluenzaB__AHM01272

SEQ ID NO: 188276 - RNA, 1758 nt, Artificial Sequence; identical to SEQ ID NO: 188263
  derived and/or modified CDS sequence (opt4) from hemagglutinin__InfluenzaB__AHM01283

SEQ ID NO: 188277 - RNA, 1758 nt, Artificial Sequence; identical to SEQ ID NO: 188263
  derived and/or modified CDS sequence (opt4) from hemagglutinin__InfluenzaB__AHM01294

SEQ ID NO: 188278 - RNA, 1755 nt, Artificial Sequence; identical to SEQ ID NO: 186914
  derived and/or modified CDS sequence (opt4) from hemagglutinin__InfluenzaB__AHM01305

SEQ ID NO: 188279 - RNA, 1758 nt, Artificial Sequence; identical to SEQ ID NO: 186947
  derived and/or modified CDS sequence (opt4) from hemagglutinin__InfluenzaB__AHM01316

SEQ ID NO: 188280 - RNA, 1758 nt, Artificial Sequence; identical to SEQ ID NO: 188263
  derived and/or modified CDS sequence (opt4) from hemagglutinin__InfluenzaB__AHM01327

SEQ ID NO: 188281 - RNA, 1758 nt, Artificial Sequence; identical to SEQ ID NO: 186947
  derived and/or modified CDS sequence (opt4) from hemagglutinin__InfluenzaB__AHM01338

SEQ ID NO: 188282 - RNA, 1758 nt, Artificial Sequence; identical to SEQ ID NO: 186947
  derived and/or modified CDS sequence (opt4) from hemagglutinin__InfluenzaB__AHM01349

SEQ ID NO: 188283 - RNA, 1758 nt, Artificial Sequence
  derived and/or modified CDS sequence (opt4) from hemagglutinin__InfluenzaB__AHM01360
augaaggccaucaucgugcugcugaugguggugaccagcaacgccgacagaaucugcaccggcaucaccagcagcaacagcccccacguggugaagaccgccacccagggcgaggugaacgugaccggcgugaucccccugaccaccacccccaccaagagccacuucgccaaccugaagggcaccgagaccagaggcaagcugugccccaagugccugaacugcaccgaccuggacguggcccugggcagacccaagugcaccggcaagauccccagcgccagagugagcauccugcacgaggugagacccgugaccagcggcugcuuccccaucaugcacgacagaaccaagaucagacagcugcccaaccugcugagaggcuacgagcacaucagacugagcacccacaacgugaucaacgccgagaacgcccccggcggccccuacaagaucggcaccagcggcagcugccccaacgugaccaacggcaacggcuucuucgccaccauggccugggccgugcccaagaacgacaagaacaagaccgccaccaacccccugaccaucgaggugcccuacaucugcaccaagggcgaggaccagaucaccguguggggcuuccacagcgacaacgagacccagauggccaagcuguacggcgacagcaacccccagaaguucaccagcagcgccaacggcgugaccacccacuacgugagccagaucggcggcuuccccaaccagaccgaggacggcggccugccccagagcggcagaaucgugguggacuacauggugcagaagagcggcaagaccggcaccaucaccuaccagagaggcauccugcugccccagaagguguggugcgccagcggcagaagcaaggugaucaagggcagccugccccugaucggcgaggccgacugccugcacgagaaguacggcggccugaacaagagcaagcccuacuacaccggcgagcacgccaaggccaucggcaacugccccaucugggugaagaccccccugaagcuggccaacggcaccaaguacagaccccccgccaagcugcugaaggagagaggcuucuucggcgccaucgccggcuuccuggagggcggcugggagggcaugaucgccggcuggcacggcuacaccagccacggcgcccacggcguggccguggccgccgaccugaagagcacccaggaggccaucaacaagaucaccaagaaccugaacagccugagcgagcuggaggugaagaaccugcagagacugagcggcgccauggacgagcugcacaacgagauccuggagcuggacgagaagguggacgaccugagagccgacaccaucagcagccagaucgagcuggccgugcugcugagcaacgagggcaucaucaacagcgaggacgagcaccugcuggcccuggagagaaagcugaagaagaugcugggccccagcgccguggagaucggcaacggcugcuucgagaccaagcacaagugcaaccagaccugccuggacagaaucgccgccggcaccuucgacgccggcgaguucagccugcccaccuucgacagccugaacaucaccgccgccagccugaacgacgacggccuggacaaccacaccauccugcuguacuacagcaccgccgccagcagccuggccgugacccugaugaucgccaucuucgugguguacauggugagcagagacaacgugagcugcagcaucugccuguga

SEQ ID NO: 188284 - RNA, 1755 nt, Artificial Sequence
  derived and/or modified CDS sequence (opt4) from hemagglutinin__InfluenzaB__AHM01371
augaaggccaucaucgugcugcugaugguggugaccagcaacgccgacagaaucugcaccggcaucaccagcagcaacagcccccacguggugaagaccgccacccagggcgaggugaacgugaccggcgugaucccccugaccaccacccccaccaagagcuacuucgccaaccugaagggcaccaagaccagaggcaagcugugccccgacugccugaacugcaccgaccuggacguggcccugggcagacccaugugcgugggcaccacccccagcgccaaggccagcauccugcacgaggugagacccgugaccagcggcugcuuccccaucaugcacgacagaaccaagaucagacagcuggccaaccugcugagaggcuacgagaacaucagacugagcacccagaacgugaucgacgccgagaaggcccccggcggccccuacagacugggcaccagcggcagcugccccaacgccaccagcaagaacggcuucuucgccaccauggccugggccgugcccaaggacaacaacaagaacgccaccaacccccugaccguggaggugcccuacaucugcgccgagggcgaggaccagaucgccguguggggcuuccacagcgacaacaagacccagaugaagaaccuguacggcgacagcaacccccagaaguucaccagcagcgccaacggcgugaccacccacuacgugagccagaucggcggcuuccccgaccagaccgaggacggcggccugccccagagcggcagaaucgugguggacuacaugaugcagaagcccggcaagaccggcaccaucguguaccagagaggcgugcugcugccccagaagguguggugcgccagcggcagaagcaaggugaucaagggcagccugccccugaucggcgaggccgacugccugcacgagaaguacggcggccugaacaagagcaagcccuacuacaccggcgagcacgccaaggccaucggcaacugccccaucugggugaagaccccccugaagcuggccaacggcaccaaguacagaccccccgccaagcugcugaaggagagaggcuucuucggcgccaucgccggcuuccuggagggcggcugggagggcaugaucgccggcuggcacggcuacaccagccacggcgcccacggcguggccguggccgccgaccugaagagcacccaggaggccaucaacaagaucaccaagaaccugaacagccugagcgagcuggaggugaagaaccugcagagacugagcggcgccauggacgagcugcacaacgagauccuggagcuggacgagaagguggacgaccugagagccgacaccaucagcagccagaucgagcuggccgugcugcugagcaacgagggcaucaucaacagcgaggacgagcaccugcuggcccuggagagaaagcugaagaagaugcugggccccagcgccguggacaucggcaacggcugcuucgagaccaagcacaagugcaaccagaccugccuggacagaaucgccgccggcaccuucaacgccggcgaguucagccugcccaccuucgacagccugaacaucaccgccgccagccugaacgacgacggccuggacaaccacaccauccugcuguacuacagcaccgccgccagcagccuggccgugacccugaugcuggccaucuucaucguguacauggugagcagagacaacgugagcugcagcaucugccuguga

SEQ ID NO: 188285 - RNA, 1755 nt, Artificial Sequence; identical to SEQ ID NO: 186914
  derived and/or modified CDS sequence (opt4) from hemagglutinin__InfluenzaB__AHM01382

SEQ ID NO: 188286 - RNA, 1758 nt, Artificial Sequence
  derived and/or modified CDS sequence (opt4) from hemagglutinin__InfluenzaB__AHM01393
augaaggccaucaucgugcugcugaugguggugaccagcaacgccgacagaaucugcaccggcaucaccagcagcaacagcccccacaucgugaagaccgccacccagggcgaggugaacgugaccggcgugaucccccugaccaccacccccaccaagagccacuucgccaaccugaagggcaccgagaccagaggcaagcugugccccaagugccugaacugcaccgaccuggacguggcccugggcagacccaagugcaccggcaagauccccagcgccagagugagcauccugcacgaggugagacccgugaccagcggcugcuuccccaucaugcacgacagaaccaagaucagacagcugcccaaccugcugagaggcuacgagcacaucagacugagcacccacaacgugaucaacgccgagaacgcccccggcggccccuacaagaucggcaccagcggcagcugccccaacgugaccaacggcaacggcuucuucgccaccauggccugggccgugcccaagaacgacaagaacaagaccgccaccaacccccugaccaucgaggugcccuacaucugcaccgagggcgaggaccagaucaccguguggggcuuccacagcgacaacgagacccagauggccaagcuguacggcgacagcaagccccagaaguucaccagcagcgccaacggcgugaccacccacuacgugagccagaucggcggcuuccccaaccagaccgaggacggcggccugccccagagcggcagaaucgugguggacuacauggugcagaagagcggcaagaccggcaccaucaccuaccagagaggcauccugcugccccagaagguguggugcgccagcggcagaagcaaggugaucaagggcagccugccccugaucggcgaggccgacugccugcacgagaaguacggcggccugaacaagagcaagcccuacuacaccggcgagcacgccaaggccaucggcaacugccccaucugggugaagaccccccugaagcuggccaacggcaccaaguacagaccccccgccaagcugcugaaggagagaggcuucuucggcgccaucgccggcuuccuggagggcggcugggagggcaugaucgccggcuggcacggcuacaccagccacggcgcccacggcguggccguggccgccgaccugaagagcacccaggaggccaucaacaagaucaccaagaaccugaacagccugagcgagcuggaggugaagaaccugcagagacugagcggcgccauggacgagcugcacaacgagauccuggagcuggacgagaagguggacgaccugagagccgacaccaucagcagccagaucgagcuggccgugcugcugagcaacgagggcaucaucaacagcgaggacgagcaccugcuggcccuggagagaaagcugaagaagaugcugggccccagcgccguggagaucggcaacggcugcuucgagaccaagcacaagugcaaccagaccugccuggacagaaucgccgccggcaccuucgacgccggcgaguucagccugcccaccuucgacagccugaacaucaccgccgccagccugaacgacgacggccuggacaaccacaccauccugcuguacuacagcaccgccgccagcagccuggccgugacccugaugaucgccaucuucgugguguacauggugagcagagacaacgugagcugcagcaucugccuguga

SEQ ID NO: 188287 - RNA, 1758 nt, Artificial Sequence; identical to SEQ ID NO: 186947
  derived and/or modified CDS sequence (opt4) from hemagglutinin__InfluenzaB__AHM01404

SEQ ID NO: 188288 - RNA, 1758 nt, Artificial Sequence
  derived and/or modified CDS sequence (opt4) from hemagglutinin__InfluenzaB__AHM01415
augaaggccaucaucgugcugcugaugguggugaccagcaacgccgacagaaucugcaccggcaucaccagcagcaacagcccccacguggugaagaccgccacccagggcgaggugaacgugaccggcgugaucccccugaccaccacccccaccaagagccacuucgccaaccugaagggcaccgagaccagaggcaagcugugccccaagugccugaacugcaccgaccuggacguggcccugggcagacccaagugcaccggcaagauccccagcgccagagugagcauccugcacgaggugagacccgugaccagcggcugcuuccccaucaugcacgacagaaccaagaucagacagcugcccaaccugcugagaggcuacgagcacaucagacugagcacccacaacgugaucaacgccgaggacgcccccggcggccccuacaagaucggcaccagcggcagcugccccaacgugaccaacggcaacggcuucuucgccaccauggccugggccgugcccaagaacgacaagaacaagaccgccaccaacccccugaccaucgaggugcccuacaucugcaccgagggcgaggaccagaucaccguguggggcuuccacagcgacaacgagacccagauggccaagcuguacggcgacagcaagccccagaaguucaccagcagcgccaacggcgugaccacccacuacgugagccagaucggcggcuuccccaaccagaccgaggacggcggccugccccagagcggcagaaucgugaucgacuacauggugcagaagagcggcaagaccggcaccaucaccuaccagagaggcauccugcugccccagaagguguggugcgccagcggcagaagcaaggugaucaagggcagccugccccugaucggcgaggccgacugccugcacgagaaguacggcggccugaacaagagcaagcccuacuacaccggcgagcacgccaaggccaucggcaacugccccaucugggugaagaccccccugaagcuggccaacggcaccaaguacagaccccccgccaagcugcugaaggagagaggcuucuucggcgccaucgccggcuuccuggagggcggcugggagggcaugaucgccggcuggcacggcuacaccagccacggcgcccacggcguggccguggccgccgaccugaagagcacccaggaggccaucaacaagaucaccaagaaccugaacagccugagcgagcuggaggugaagaaccugcagagacugagcggcgccauggacgagcugcacaacgagauccuggagcuggacgagaagguggacgaccugagagccgacaccaucagcagccagaucgagcuggccgugcugcugagcaacgagggcaucaucaacagcgaggacgagcaccugcuggcccuggagagaaagcugaagaagaugcugggccccagcgccguggagaucggcaacggcugcuucgagaccaagcacaagugcaaccagaccugccuggacagaaucgccgccggcaccuucgacgccggcgaguucagccugcccaccuucgacagccugaacaucaccgccgccagccugaacgacgacggccuggacaaccacaccauccugcuguacuacagcaccgccgccagcagccuggccgugacccugaugaucgccaucuucgugguguacauggugagcagagacaacgugagcugcagcaucugccuguga

SEQ ID NO: 188289 - RNA, 1758 nt, Artificial Sequence
  derived and/or modified CDS sequence (opt4) from hemagglutinin__InfluenzaB__AHM01426
augaaggccaucaucgugcugcugaugguggugaccagcaacgccgacagaaucugcaccggcaucaccagcagcaacagcccccacguggugaagaccgccacccagggcgaggugaacgugaccggcgugaucccccugaccaccacccccaccaagagccacuucgccaaccugaagggcaccgagaccagaggcaagcugugccccaagugccugaacugcaccgaccuggacguggcccugggcagacccaagugcaccggcaagauccccagcgccagagugagcauccugcacgaggugagacccgugaccagcggcugcuuccccaucaugcacgacagaaccaagaucagacagcugcccaaccugcugagaggcuacgagcacaucagacugagcacccacaacgugaucaacgccgagaacgcccccggcggccccuacaagaucggcaccagcggcagcugccccaacgugaccaacggcaacggcuucuucgccaccauggccugggccgugcccaagaacgacaagaacaagaccgccaccaacccccugaccaucgaggugcccuacaucugcaccgagggcgaggaccagaucaccaucuggggcuuccacagcgacaacgagacccagauggccaagcuguacggcgacagcaacccccagaaguucaccagcagcgccaacggcgugaccacccacuacgugagccagaucggcggcuuccccaaccagaccgaggacggcggccugccccagagcggcagaaucgugguggacuacauggugcagaagagcggcaagaccggcaccaucaccuaccagagaggcauccugcugccccagaagguguggugcgccagcggcagaagcaaggugaucaagggcagccugccccugaucggcgaggccgacugccugcacgagaaguacggcggccugaacaagagcaagcccuacuacaccggcgagcacgccaaggccaucggcaacugccccaucugggugaagaccccccugaagcuggccaacggcaccaaguacagaccccccgccaagcugcugaaggagagaggcuucuucggcgccaucgccggcuuccuggagggcggcugggagggcaugaucgccggcuggcacggcuacaccagccacggcgcccacggcguggccguggccgccgaccugaagagcacccaggaggccaucaacaagaucaccaagaaccugaacagccugagcgagcuggaggugaagaaccugcagagacugagcggcgccauggacgagcugcacaacgagauccuggagcuggacgagaagguggacgaccugagagccgacaccaucagcagccagaucgagcuggccgugcugcugagcaacgagggcaucaucaacagcgaggacgagcaccugcuggcccuggagagaaagcugaagaagaugcugggccccagcgccguggagaucggcaacggcugcuucgagaccaagcacaagugcaaccagaccugccuggacagaaucgccgccggcaccuucgacgccggcgaguucagccugcccaccuucgacagccugaacaucaccgccgccagccugaacgacgacggccuggacaaccacaccauccugcuguacuacagcaccgccgccagcagccuggccgugacccugaugaucgccaucuucgugguguacauggugagcagagacaacgugagcugcagcaucugccuguga

SEQ ID NO: 188290 - RNA, 1755 nt, Artificial Sequence
  derived and/or modified CDS sequence (opt4) from hemagglutinin__InfluenzaB__AHM01437
augaaggccgugaucgugcugcugaugguggugaccagcaacgccgacagaaucugcaccggcaucaccagcagcaacagcccccacguggugaagaccgccacccagggcgaggugaacgugaccggcgugaucccccugaccaccacccccaccaagagcuacuucgccaaccugaagggcaccaagaccagaggcaagcugugccccgacugccugaacugcaccgaccuggacguggcccugggcagacccaugugcgugggcaccacccccagcgccaaggccagcauccugcacgaggugagacccgugaccagcggcugcuuccccaucaugcacgacagaaccaagaucagacagcuggccaaccugcugagaggcuacgagaacaucagacugagcacccagaacgugaucgacgccgagaaggcccccggcggccccuacagacugggcaccagcggcagcugccccaacgccaccagcaagagcggcuucuucgccaccauggccugggccgugcccaaggacaacaacaagaacgccaccaacccccugaccguggaggugcccuacaucugcgccgaggaggaggaccagaucaccguguggggcuuccacagcgacaacaagacccagaugaagaaccuguacggcgacagcaacccccagaaguucaccagcagcgccaacggcgugaccacccacuacgugagccagaucggcggcuuccccgaccagaccgaggacggcggccugccccagagcggcagaaucgugguggacuacaugaugcagaagcccggcaagaccggcaccaucguguaccagagaggcgugcugcugccccagaagguguggugcgccagcggcagaagcaaggugaucaagggcagccugccccugaucggcgaggccgacugccugcacgagaaguacggcggccugaacaagagcaagcccuacuacaccggcgagcacgccaaggccaucggcaacugccccaucugggugaagaccccccugaagcuggccaacggcaccaaguacagaccccccgccaagcugcugaaggagagaggcuucuucggcgccaucgccggcuuccuggagggcggcugggagggcaugaucgccggcuggcacggcuacaccagccacggcgcccacggcguggccguggccgccgaccugaagagcacccaggaggccaucaacaagaucaccaagaaccugaacagccugagcgagcuggaggugaagaaccugcagagacugagcggcgccauggacgagcugcacaacgagauccuggagcuggacgagaagguggacgaccugagagccgacaccaucagcagccagaucgagcuggccgugcugcugagcaacgagggcaucaucaacagcgaggacgagcaccugcuggcccuggagagaaagcugaagaagaugcugggccccagcgccguggacaucggcaacggcugcuucgagaccaagcacaagugcaaccagaccugccuggacagaaucgccgccggcaccuucaacgccggcgaguucagccugcccaccuucgacagccugaacaucaccgccgccagccugaacgacgacggccuggacaaccacaccauccugcuguacuacagcaccgccgccagcagccuggccgugacccugaugcuggccaucuucaucguguacauggugagcagagacaacgugagcugcagcaucugccuguga

SEQ ID NO: 188291 - RNA, 1755 nt, Artificial Sequence
  derived and/or modified CDS sequence (opt4) from hemagglutinin__InfluenzaB__AHM01448
augaaggccaucaucgugcugcugaugguggugaccagcaacgccgacagaaucugcaccggcaucaccagcagcaacagcccccacguggugaagaccgccacccagggcgaggugaacgugaccggcgugaucccccugaccaccacccccaccaagagcuacuucgccaaccugaagggcaccaagaccagaggcaagcugugccccgacugccugaacugcaccgaccuggacguggcccugggcagacccaugugcgugggcaccacccccagcgccaaggccagcauccugcacgaggugagacccgugaccagcggcugcuuccccaucaugcacgacagaaccaagaucagacagcuggccaaccugcugagaggcuacgagaacaucagacugagcacccagaacgugaucgacgccgagaaggcccccggcggccccuacagacugggcaccagcggcagcugccccaacgccaccagcaagagcggcuucuucgccaccauggccugggccgugcccaaggacaacaacaagaacgccaccaacccccugaccgccgaggugcccuacaucugcgccgagggcgaggaccagaucaccguguggggcuuccacagcgacaacaagacccagaugaagaaccuguacggcgacagcaacccccagaaguucaccagcagcgccaacggcgugaccacccacuacgugagccagaucggcggcuuccccgaccagaccgaggacggcggccugccccagagcggcagaaucgugguggacuacaugaugcagaagcccggcaagaccggcaccaucguguaccagagaggcgugcugcugccccagaagguguggugcgccagcggcagaagcaaggugaucaagggcagccugccccugaucggcgaggccgacugccugcacgagaaguacggcggccugaacaagagcaagcccuacuacaccggcgagcacgccaaggccaucggcaacugccccaucugggugaagaccccccugaagcuggccaacggcaccaaguacagaccccccgccaagcugcugaaggagagaggcuucuucggcgccaucgccggcuuccuggagggcggcugggagggcaugaucgccggcuggcacggcuacaccagccacggcgcccacggcguggccguggccgccgaccugaagagcacccaggaggccaucaacaagaucaccaagaaccugaacagccugagcgagcuggaggugaagaaccugcagagacugagcggcgccauggacgagcugcacaacgagauccuggagcuggacgagaagguggacgaccugagagccgacaccaucagcagccagaucgagcuggccgugcugcugagcaacgagggcaucaucaacagcgaggacgagcaccugcuggcccuggagagaaagcugaagaagaugcugggccccagcgccguggacaucggcaacggcugcuucgagaccaagcacaagugcaaccagaccugccuggacagaaucgccgccggcaccuucaacgccggcgaguucagccugcccaccuucgacagccugaacaucaccgccgccagccugaacgacgacggccuggacaaccacaccauccugcuguacuacagcaccgccgccagcagccuggccgugacccugaugcuggccaucuucaucguguacauggugagcagagacaacgugagcugcagcaucugccuguga

SEQ ID NO: 188292 - RNA, 1758 nt, Artificial Sequence; identical to SEQ ID NO: 186705
  derived and/or modified CDS sequence (opt4) from hemagglutinin__InfluenzaB__AHM01459

SEQ ID NO: 188293 - RNA, 1755 nt, Artificial Sequence
  derived and/or modified CDS sequence (opt4) from hemagglutinin__InfluenzaB__AHM01470
augaaggccaucaucgugcugcugaugguggugaccagcaacgccgacagaaucugcaccggcaucaccagcagcaacagcccccacguggugaagaccgccacccagggcgaggugaacgugaccggcgugaucccccugaccaccacccccaccaagagcuacuucgccaaccugaagggcaccaagaccagaggcaagcugugccccgacugccugaacugcaccgaccuggacguggcccugggcagacccaugugcgugggcaccacccccagcgccaaggccagcauccugcacgaggugagacccgugaccagcggcugcuuccccaucaugcacgacagaaccaagaucagacagcuggccaaccugcugagaggcuacgagaacaucagacugagcacccagaacgugaucgacgccgagaaggcccccggcggccccuacagacugggcaccagcggcagcugccccaacgccaccagcaagagcggcuucuucgccaccauggccugggccgugcccaaggacaacaacaagaacgccaccaacccccugaccguggaggugcccuacaucugcaccgagggcgaggaccagaucgccguguggggcuuccacagcgacaacaagacccagaugaagaaccuguacggcgacagcaacccccagaaguucaccagcagcgccaacggcgugaccacccacuacgugagccagaucggcggcuuccccgaccagaccgaggacggcggccugccccagagcggcagaaucgugguggacuacaugaugcagaagcccggcaagaccggcaccaucguguaccagagaggcgugcugcugccccagaagguguggugcgccagcggcagaagcaaggugaucaagggcagccugccccugaucggcgaggccgacugccugcacgagaaguacggcggccugaacaagagcaagcccuacuacaccggcgagcacgccaaggccaucggcaacugccccaucugggugaagaccccccugaagcuggccaacggcaccaaguacagaccccccgccaagcugcugaaggagagaggcuucuucggcgccaucgccggcuuccuggagggcggcugggagggcaugaucgccggcuggcacggcuacaccagccacggcgcccacggcguggccguggccgccgaccugaagagcacccaggaggccgugaacaagaucaccaagaaccugaacagccugagcgagcuggaggugaagaaccugcagagacugagcggcgccauggacgagcugcacaacgagauccuggagcuggacgagaagguggacgaccugagagccgacaccaucagcagccagaucgagcuggccgugcugcugagcaacgagggcaucaucaacagcgaggacgagcaccugcuggcccuggagagaaagcugaagaagaugcugggccccagcgccguggacaucggcaacggcugcuucgagaccaagcacaagugcaaccagaccugccuggacagaaucgccgccggcaccuucaacgccggcgaguucagccugcccaccuucgacagccugaacaucaccgccgccagccugaacgacgacggccuggacaaccacaccauccugcuguacuacagcaccgccgccagcagccuggccgugacccugaugcuggccaucuucaucguguacauggugagcagagacaacgugagcugcagcaucugccuguga

SEQ ID NO: 188294 - RNA, 1755 nt, Artificial Sequence
  derived and/or modified CDS sequence (opt4) from hemagglutinin__InfluenzaB__AHM01481
augaaggccaucaucgugcugcugaugguggugaccagcaacgccgacagaaucugcaccggcaucaccagcagcaacagcccccacguggugaagaccgccacccagggcgaggugaacgugaccggcgugaucccccugaccaccacccccaccaagagcuacuucgccaaccugaagggcaccaagaccagaggcaagcugugccccgacugccugaacugcaccgaccuggacguggcccugggcagacccaugugcgugggcaccacccccagcgccaaggccagcauccugcacgaggugagacccgugaccagcggcugcuuccccaucaugcacgacagaaccaagaucagacagcuggccaaccugcugagaggcuacgagaacaucagacugagcacccagaacgugaucgacgccgagaaggcccccggcggccccuacagacugggcaccagcggcagcugccccaacgccaccagcaagagcggcuucuucgccaccauggccugggccgugcccaaggacaacaacaagaacgccaccaacccccugaccguggaggugcccuacaucugcgccgagggcgaggaccagaucaccguguggggcuuccacagcgacaacaagacccagaugaagaaccuguacggcgacagcaacccccagaaguucaccagcagcgccaacggcgugaccacccacuacgugagccagaucggcggcuuccccgaccagaccgaggacggcggccugccccagagcggcagaaucgugguggacuacaugaugcagaagcccggcaagaccggcaccaucguguaccagagaggcgugcugcugccccagagaguguggugcgccagcggcagaagcaaggugaucaagggcagccugccccugaucggcgaggccgacugccugcacgagaaguacggcggccugaacaagagcaagcccuacuacaccggcgagcacgccaaggccaucggcaacugccccaucugggugaagaccccccugaagcuggccaacggcaccaaguacagaccccccgccaagcugcugaaggagagaggcuucuucggcgccaucgccggcuuccuggagggcggcugggagggcaugaucgccggcuggcacggcuacaccagccacggcgcccacggcguggccguggccgccgaccugaagagcacccaggaggccaucaacaagaucaccaagaaccugaacagccugagcgagcuggaggugaagaaccugcagagacugagcggcgccauggacgagcugcacaacgagauccuggagcuggacgagaagguggacgaccugagagccgacaccaucagcagccagaucgagcuggccgugcugcugagcaacgagggcaucaucaacagcgaggacgagcaccugcuggcccuggagagaaagcugaagaagaugcugggccccagcgccguggacaucggcaacggcugcuucgagaccaagcacaagugcaaccagaccugccuggacagaaucgccgccggcaccuucaacgccggcgaguucagccugcccaccuucgacagccugaacaucaccgccgccagccugaacgacgacggccuggacaaccacaccauccugcuguacuacagcaccgccgccagcagccuggccgugacccugaugcuggccaucuucaucguguacauggugagcagagacaacgugagcugcagcaucugccuguga

SEQ ID NO: 188295 - RNA, 1755 nt, Artificial Sequence; identical to SEQ ID NO: 186959
  derived and/or modified CDS sequence (opt4) from hemagglutinin__InfluenzaB__AHM01492

SEQ ID NO: 188296 - RNA, 1755 nt, Artificial Sequence; identical to SEQ ID NO: 186914
  derived and/or modified CDS sequence (opt4) from hemagglutinin__InfluenzaB__AHM01503

SEQ ID NO: 188297 - RNA, 1755 nt, Artificial Sequence; identical to SEQ ID NO: 186914
  derived and/or modified CDS sequence (opt4) from hemagglutinin__InfluenzaB__AHM01514

SEQ ID NO: 188298 - RNA, 1755 nt, Artificial Sequence
  derived and/or modified CDS sequence (opt4) from hemagglutinin__InfluenzaB__AHM01525
augaaggccaucaucgugcugcugaugguggugaccagcaacgccgacagaaucugcaccggcaucaccagcagcaacagcccccacguggugaagaccgccacccagggcgaggugaacgugaccggcgugaucccccugaccaccacccccaccaagagcuacuucgccaaccugaagggcaccaagaccagaggcaagcugugccccgacugccugaacugcaccgaccuggacguggcccugggcagacccaugugcgugggcaccacccccagcgccaaggccagcauccugcacgaggugagacccgugaccagcggcugcuuccccaucaugcacgacagaaccaagaucagacagcuggccaaccugcugagaggcuacgagaacaucagacugagcacccagaacgugaucgacgccgagaaggcccccggcggccccuacagacugggcaccagcggcagcugccccaacgccaccagcaagagcggcuucuucgccaccauggccugggccgugcccaaggacaacaacaagaacgccaccaacccccugaccguggaggugcccuacaucugcgccgagggcgaggaccagaucaccguguggggcuuccacagcgacaacaagacccagaugaagaaccuguacggcgacagcaacccccagaaguucaccagcagcgccaacggcgugaccacccacuacgugagccagaucggcggcuuccccgaccagaccgaggacggcggccugccccagagcggcagaaucgugguggacuacaugauccagaagcccggcaagaccggcaccaucguguaccagagaggcgugcugcugccccagaagguguggugcgccagcggcagaagcaaggugaucaagggcagccugccccugaucggcgaggccgacugccugcacgagaaguacggcggccugaacaagagcaagcccuacuacaccggcgagcacgccaaggccaucggcaacugccccaucugggugaagaccccccugaagcuggccaacggcaccaaguacagaccccccgccaagcugcugaaggagagaggcuucuucggcgccaucgccggcuuccuggagggcggcugggagggcaugaucgccggcuggcacggcuacaccagccacggcgcccacggcguggccguggccgccgaccugaagagcacccaggaggccaucaacaagaucaccaagaaccugaacagccugagcgagcuggaggugaagaaccugcagagacugagcggcgccauggacgagcugcacaacgagauccuggagcuggacgagaagguggacgaccugagagccgacaccaucagcagccagaucgagcuggccgugcugcugagcaacgagggcaucaucaacagcgaggacgagcaccugcuggcccuggagagaaagcugaagaagaugcugggccccagcgccguggacaucggcaacggcugcuucgagaccaagcacaagugcaaccagaccugccuggacagaaucgccgccggcaccuucaacgccggcgaguucagccugcccaccuucgacagccugaacaucaccgccgccagccugaacgacgacggccuggacaaccacaccauccugcuguacuacagcaccgccgccagcagccuggccgugacccugaugcuggccaucuucaucguguacauggugagcagagacaacgugagcugcagcaucugccuguga

SEQ ID NO: 188299 - RNA, 1755 nt, Artificial Sequence
  derived and/or modified CDS sequence (opt4) from hemagglutinin__InfluenzaB__AHM01536
augaaggccaucaucgugcugcugaugguggugaccagcaacgccgacagaaucugcaccggcaucaccagcagcaacagcccccacguggugaagaccgccacccagggcgaggugaacgugaccggcgugaucccccugaccaccacccccaccaagagcuacuucgccaaccugaagggcaccaagaccagaggcaagcugugccccgacugccugaacugcaccgaccuggacguggcccugggcagacccaugugcgugggcaccacccccagcgccaaggccagcauccugcacgaggugagacccgugaccagcggcugcuuccccaucaugcacgacagaaccaagaucagacagcuggccaaccugcugagaggcuacgagaacaucagacugagcacccagaacgugaucgacgccgagaaggcccccggcggccccuacagacugggcaccagcggcagcugccccaacgccaccagcaagagcggcuucuucgccaccauggccugggccgugcccaaggacaacaacaagaacgccaccaacccccugaccguggaggugcccuacaucugcgccgagggcgaggaccagaucaccguguggggcuuccacagcgacaacaagacccagaugaagaaccuguacggcgacagcaacccccagaaguucaccagcagcgccaacggcgugaccacccacuacgugagccagaucggcggcuuccccgaccagaccgaggacggcggccugccccagagcggcagaaucgugguggacuacaugaugcagaagcccggcaagaccggcaccaucguguaccagagaggcgugcugcugccccagaagguguggugcgccagcggcagaagcaaggugaucaagggcagccugccccugaucggcgaggccgacugccugcacgagaaguacggcggccugaacaagagcaagcccuacuacaccggcgagcacgccaaggccaucggcaacugccccaucugggugaagaccccccugaagcuggccaacggcaccaaguacagaccccccgccaagcugcugaaggagagaggcuucuucggcgccaucgccggcuuccuggagggcggcugggagggcaugaucgccggcuggcacggcuacaccagccacggcgugcacggcguggccguggccgccgaccugaagagcacccaggaggccaucaacaagaucaccaagaaccugaacagccugagcgagcuggaggugaagaaccugcagagacugagcggcgccauggacgagcugcacaacgagauccuggagcuggacgagaagguggacgaccugagagccgacaccaucagcagccagaucgagcuggccgugcugcugagcaacgagggcaucaucaacagcgaggacgagcaccugcuggcccuggagagaaagcugaagaagaugcugggccccagcgccguggacaucggcaacggcugcuucgagaccaagcacaagugcaaccagaccugccuggacagaaucgccgccggcaccuucaacgccggcgaguucagccugcccaccuucgacagccugaacaucaccgccgccagccugaacgacgacggccuggacaaccacaccauccugcuguacuacagcaccgccgccagcagccuggccgugacccugaugcuggccaucuucaucguguacauggugagcagagacaacgugagcugcagcaucugccuguga

SEQ ID NO: 188300 - RNA, 1755 nt, Artificial Sequence; identical to SEQ ID NO: 186914
  derived and/or modified CDS sequence (opt4) from hemagglutinin__InfluenzaB__AHM01547

SEQ ID NO: 188301 - RNA, 1755 nt, Artificial Sequence; identical to SEQ ID NO: 186959
  derived and/or modified CDS sequence (opt4) from hemagglutinin__InfluenzaB__AHM01558

SEQ ID NO: 188302 - RNA, 1758 nt, Artificial Sequence; identical to SEQ ID NO: 186800
  derived and/or modified CDS sequence (opt4) from hemagglutinin__InfluenzaB__AHV83951

SEQ ID NO: 188303 - RNA, 1755 nt, Artificial Sequence; identical to SEQ ID NO: 188189
  derived and/or modified CDS sequence (opt4) from hemagglutinin__InfluenzaB__AHV83952

SEQ ID NO: 188304 - RNA, 1758 nt, Artificial Sequence; identical to SEQ ID NO: 186743
  derived and/or modified CDS sequence (opt4) from hemagglutinin__InfluenzaB__AHZ36697

SEQ ID NO: 188305 - RNA, 1758 nt, Artificial Sequence
  derived and/or modified CDS sequence (opt4) from hemagglutinin__InfluenzaB__AHZ36708
augaaggccaucaucgugcugcugaugguggugaccagcaacgccgacagaaucugcaccggcaucaccagcagcaacagcccccacguggugaagaccgccacccagggcgaggugaacgugaccggcgugaucccccugaccaccacccccaccaagagccacuucgccaaccugaagggcaccgagaccagaggcaagcugugccccaagugccugaacugcaccgaccuggacguggcccugggcagacccaagugcaccggcaagauccccagcgccagagugagcauccugcacgaggugagacccgugaccagcggcugcuuccccaucaugcacgacagaaccaagaucagacagcugcccaaccugcugagaggcuacgagcacaucagacugagcacccacaacgugaucaacgccgagaacgcccccggcggccccuacaagaucggcaccagcggcagcugccugaacgugaccaacggcaacggcuucuucgccaccauggccugggccgugcccaagaacgacaagaacaagaccgccaccaacccccugaccaucgaggugcccuacaucugcaccgagggcgaggaccagaucaccguguggggcuuccacagcgacaacgagacccagauggccaagcuguacggcgacagcaagccccagaaguucaccagcagcgccaacggcgugaccacccacuacgugagccagaucggcggcuuccccaaccagaccgaggacggcggccugccccagagcggcagaaucgugguggacuacauggugcagaagagcggcaagaccggcaccaucaccuaccagagaggcauccugcugccccagaagguguggugcaccagcggcagaagcaaggugaucaagggcagccugccccugaucggcgaggccgacugccugcacgagaaguacggcggccugaacaagagcaagcccuacuacaccggcgagcacgccaaggccaucggcaacugccccaucugggugaagaccccccugaagcuggccaacggcaccaaguacagaccccccgccaagcugcugaaggagagaggcuucuucggcgccaucgccggcuuccuggagggcggcugggagggcaugaucgccggcuggcacggcuacaccagccacggcgcccacggcguggccguggccgccgaccugaagagcacccaggaggccaucaacaagaucaccaagaaccugaacagccugagcgagcuggaggugaagaaccugcagagacugagcggcgccauggacgagcugcacaacgagauccuggagcuggacgagaagguggacgaccugagagccgacaccaucagcagccagaucgagcuggccgugcugcugagcaacgagggcaucaucaacagcgaggacgagcaccugcuggcccuggagagaaagcugaagaagaugcugggccccagcgccguggagaucggcaacggcugcuucgagaccaagcacaagugcaaccagaccugccuggacagaaucgccgccggcaccuucgacgccggcgaguucagccugcccaccuucgacagccugaacaucaccgccgccagccugaacgacgacggccuggacaaccacaccauccugcuguacuacagcaccgccgccagcagccuggccgugacccugaugaucgccaucuucgugguguacauggugagcagagacaacgugagcugcagcaucugccuguga

SEQ ID NO: 188306 - RNA, 1758 nt, Artificial Sequence
  derived and/or modified CDS sequence (opt4) from hemagglutinin__InfluenzaB__AHZ36719
augaaggccaucaucgugcugcugaugguggugaccagcaacgccgacagaaucugcaccggcaucaccagcagcaacagcccccacguggugaagaccgccacccagggcgaggugaacgugaccggcgugaucccccugaccaccacccccaccaagagccacuucgccaaccugaagggcaccgagaccagaggcaagcugugccccaagugccugaacugcaccgaccuggacguggcccugggcagacccaagugcaccggcaagauccccagcgccagagugagcauccugcacgaggugagacccgugaccagcggcugcuuccccaucaugcacgacagaaccaagaucagacagcugcccaaccugcugagaggcuacgagcacaucagacugagcacccacaacgugaucaacgccgagaacgcccccggcggccccuacaagaucggcaccagcggcagcugccccaacgugaccaacggcaacggcuucuucgccaccauggccugggccgugcccaagaacgacaagaacaagaccgccaccaacccccugaccaucgaggugcccuacgugugcaccgagggcgaggaccagaucaccguguggggcuuccacagcgacaacgagacccagauggccaagcuguacggcgacagcaagccccagaaguucaccagcagcgccaacggcgugaccacccacuacgugagccagaucggcggcuuccccaaccagaccgaggacggcggccugccccagagcggcagaaucgugguggacuacauggugcagaagagcggcaagaccggcaccaucaccuaccagagaggcauccugcugccccagaagguguggugcgccagcggcagaagcaaggugaucaagggcagccugccccugaucggcgaggccgacugccugcacgagaaguacggcggccugaacaagagcaagcccuacuacaccggcgagcacgccaaggccaucggcaacugccccaucugggugaagaccccccugaagcuggccaacggcaccaaguacagaccccccgccaagcugcugaaggagagaggcuucuucggcgccaucgccggcuuccuggagggcggcugggagggcaugaucgccggcuggcacggcuacaccagccacggcgcccacggcguggccguggccgccgaccugaagagcacccaggaggccaucaacaagaucaccaagaaccugaacagccugagcgagcuggaggugaagaaccugcagagacugagcggcgccauggacgagcugcacaacgagauccuggagcuggacgagaagguggacgaccugagagccgacaccaucagcagccagaucgagcuggccgugcugcugagcaacgagggcaucaucaacagcgaggacgagcaccugcuggcccuggagagaaagcugaagaagaugcugggccccagcgccguggagaucggcaacggcugcuucgagaccaagcacaagugcaaccagaccugccuggacagaaucgccgccggcaccuucgacgccggcgaguucagccugcccaccuucgacagccugaacaucaccgccgccagccugaacgacgacggccuggacaaccacaccauccugcuguacuacagcaccgccgccagcagccuggccgugacccugaugaucgccaucuucgugguguacauggugagcagagacaacgugagcugcagcaucugccuguga

SEQ ID NO: 188307 - RNA, 1758 nt, Artificial Sequence; identical to SEQ ID NO: 186743
  derived and/or modified CDS sequence (opt4) from hemagglutinin__InfluenzaB__AHZ36730

SEQ ID NO: 188308 - RNA, 1758 nt, Artificial Sequence; identical to SEQ ID NO: 186743
  derived and/or modified CDS sequence (opt4) from hemagglutinin__InfluenzaB__AHZ36752

SEQ ID NO: 188309 - RNA, 1758 nt, Artificial Sequence; identical to SEQ ID NO: 186705
  derived and/or modified CDS sequence (opt4) from hemagglutinin__InfluenzaB__AHZ36763

SEQ ID NO: 188310 - RNA, 1758 nt, Artificial Sequence
  derived and/or modified CDS sequence (opt4) from hemagglutinin__InfluenzaB__AHZ36774
augaaggccaucaucgugcugcugaugguggugaccagcaacgccgacagaaucugcaccggcaucaccagcagcaacagcccccacguggugaagaccgccacccagggcgaggugaacgugaccggcgugaucccccugaccaccacccccaccaagagccacuucgccaaccugaagggcaccgagaccagaggcaagcugugccccaagugccccaacugcaccgaccuggacguggcccugggcagacccaagugcaccggcaagauccccagcgccagagugagcauccugcacgaggugagacccgugaccagcggcugcuuccccaucaugcacgacagaaccaagaucagacagcugcccaaccugcugagaggcuacgagcacaucagacugagcacccacaacgugaucaacgccgagagcgcccccggcggccccuacaagaucggcaccagcggcagcugccccaacgugaccaacggcaacggcuucuucgccaccauggccugggccgugcccaagaacgacaagaacaagaccgccaccgacccccugaccaucgaggugcccuacaucugcaccgaggaggaggaccagaucaccguguggggcuuccacagcgacaacgagacccagauggccaagcuguacggcgacagcaagccccagaaguucaccagcagcgccaacggcgugaccacccacuacgugagccagaucggcggcuuccccaaccagaccgaggacggcggccugccccagagcggcagaaucgugguggacuacauggugcagaagagcggcaagaccggcaccaucaccuaccagagaggcauccugcugccccagaagguguggugcgccagcggcagaagcaaggugaucaagggcagccugccccugaucggcgaggccgacugccugcacgagaaguacggcggccugaacaagagcaagcccuacuacaccggcgagcacgccaaggccaucggcaacugccccaucugggugaagaccccccugaagcuggccaacggcaccaaguacagaccccccgccaagcugcugaaggagagaggcuucuucggcgccaucgccggcuuccuggagggcggcugggagggcaugaucgccggcuggcacggcuacaccagccacggcgcccacggcguggccguggccgccgaccugaagagcacccaggaggccaucaacaaggugaccaagaaccugaacagccugagcgagcuggaggugaagaaccugcagagacugagcggcgccauggacgagcugcacaacgagauccuggagcuggacgagaagguggacgaccugagagccgacaccaucagcagccagaucgagcuggccgugcugcugagcaacgagggcaucaucaacagcgaggacgagcaccugcuggcccuggagagaaagcugaagaagaugcugggccccagcgccguggagaucggcaacggcugcuucgagaccaagcacaagugcaaccagaccugccuggacagaaucgccgccggcaccuucgacgccggcgaguucagccugcccaccuucgacagccugaacaucaccgccgccagccugaacgacgacggccuggacaaccacaccauccugcuguacuacagcaccgccgccagcagccuggccgugacccugaugaucgccaucuucgugguguacauggugagcagagacaacgugagcugcagcaucugccuguga

SEQ ID NO: 188311 - RNA, 1758 nt, Artificial Sequence; identical to SEQ ID NO: 188219
  derived and/or modified CDS sequence (opt4) from hemagglutinin__InfluenzaB__AHZ36785

SEQ ID NO: 188312 - RNA, 1758 nt, Artificial Sequence; identical to SEQ ID NO: 188219
  derived and/or modified CDS sequence (opt4) from hemagglutinin__InfluenzaB__AHZ36796

SEQ ID NO: 188313 - RNA, 1755 nt, Artificial Sequence
  derived and/or modified CDS sequence (opt4) from hemagglutinin__InfluenzaB__AHZ36807
augaaggccaucaucgugcugcugaugguggugaccagcaacgccgacagaaucugcaccggcaucaccagcagcaacagcccccacguggugaagaccgccacccagggcgaggugaacgugaccggcgugaucccccugaccaccacccccaccaagagcuacuucgccaaccugaagggcaccaagaccagaggcaagcugugccccgacugccugaacugcaccgaccuggacguggcccugggcagacccaugugcgugggcaccacccccagcgccaaggccagcauccugcacgaggugagacccgugaccagcggcugcuuccccaucaugcacgacagaaccaagaucagacagcuggccaaccugcugagaggcuacgagaacaucagacugagcacccagaacgugaucgacgccgagaaggcccccggcggccccuacagacugggcaccagcggcagcugccccaacgccaccagcaagagcggcuucuucgccaccauggccugggccgugcccaaggacaacaacaagaacgccaccaacccccugaccguggaggugcccuacaucugcgccgagggcgaggaccagaucaccguguggggcuuccacagcgacaacaagacccagaugaagaaccuguacggcgacagcaacccccagaaguucaccagcagcgccaacggcgugaccacccacuacgugagccagaucggcggcuuccccgaccagaccgaggacggcggccugccccagagcggcagaaucgugguggacuacaugaugcagaagcccgagaagaccggcaccaucguguaccagagaggcgugcugcugccccagaagguguggugcgccagcggcagaagcaaggugaucaagggcagccugccccugaucggcgaggccgacugccugcacgagaaguacggcggccugaacaagagcaagcccuacuacaccggcgagcacgccaaggccaucggcaacugccccaucugggugaagaccccccugaagcuggccaacggcaccaaguacagaccccccgccaagcugcugaaggagagaggcuucuucggcgccaucgccggcuuccuggagggcggcugggagggcaugaucgccggcuggcacggcuacaccagccacggcgcccacggcguggccguggccgccgaccugaagagcacccaggaggccaucaacaagaucaccaagaaccugaacagccugagcgagcuggaggugaagaaccugcagagacugagcggcgccauggacgagcugcacaacgagauccuggagcuggacgagaagguggacgaccugagagccgacaccaucagcagccagaucgagcuggccgugcugcugagcaacgagggcaucaucaacagcgaggacgagcaccugcuggcccuggagagaaagcugaagaagaugcugggccccagcgccguggacaucggcaacggcugcuucgagaccaagcacaagugcaaccagaccugccuggacagaaucgccgccggcaccuucaacgccggcgaguucagccugcccaccuucgacagccugaacaucaccgccgccagccugaacgacgacggccuggacaaccacaccauccugcuguacuacagcaccgccgccagcagccuggccgugacccugaugcuggccaucuucaucguguacauggugagcagagacaacgugagcugcagcaucugccuguga

SEQ ID NO: 188314 - RNA, 1758 nt, Artificial Sequence; identical to SEQ ID NO: 186743
  derived and/or modified CDS sequence (opt4) from hemagglutinin__InfluenzaB__AHZ36818

SEQ ID NO: 188315 - RNA, 1758 nt, Artificial Sequence; identical to SEQ ID NO: 186705
  derived and/or modified CDS sequence (opt4) from hemagglutinin__InfluenzaB__AHZ36829

SEQ ID NO: 188316 - RNA, 1758 nt, Artificial Sequence; identical to SEQ ID NO: 186705
  derived and/or modified CDS sequence (opt4) from hemagglutinin__InfluenzaB__AHZ36840

SEQ ID NO: 188317 - RNA, 1758 nt, Artificial Sequence; identical to SEQ ID NO: 188219
  derived and/or modified CDS sequence (opt4) from hemagglutinin__InfluenzaB__AHZ36851

SEQ ID NO: 188318 - RNA, 1758 nt, Artificial Sequence; identical to SEQ ID NO: 186743
  derived and/or modified CDS sequence (opt4) from hemagglutinin__InfluenzaB__AHZ36862

SEQ ID NO: 188319 - RNA, 1758 nt, Artificial Sequence; identical to SEQ ID NO: 186705
  derived and/or modified CDS sequence (opt4) from hemagglutinin__InfluenzaB__AHZ36873

SEQ ID NO: 188320 - RNA, 1758 nt, Artificial Sequence
  derived and/or modified CDS sequence (opt4) from hemagglutinin__InfluenzaB__AHZ36884
augaaggccaucaucgugcugcugaugguggugaccagcaacgccgacagaaucugcaccggcaucaccagcagcaacagcccccacaucgugaagaccgccacccagggcgaggugaacgugaccggcgugaucccccugaccaccacccccaccaagagccacuucgccaaccugaagggcaccgagaccagaggcaagcugugccccaagugccugaacugcaccgaccuggacguggcccugggcagacccaagugcaccggcaagauccccagcgccagagugagcauccugcacgaggugagacccgugaccagcggcugcuuccccaucaugcacgacagaaccaagaucagacagcugcccaaccugcugagaggcuacgagcacaucagacugagcacccacaacgugaucaacgccgagaacgcccccggcggccccuacaagaucggcaccagcggcagcugccccaacaucaccaacggcaacggcuucuucgagaccauggccugggccgugcccaagaacgacaagaacaagaccgccaccaacccccugaccaucgaggugcccuacaucugcaccgagggcgaggaccagaucaccguguggggcuuccacagcgacaacgagacccagauggccaagcuguacggcgacagcaagccccagaaguucaccagcagcgccaacggcgugaccacccacuacgugagccagaucggcggcuuccccaaccagaccgaggacggcggccugccccagagcggcagaaucgugguggacuacauggugcagaagagcggcaagaccggcaccaucaccuaccagagaggcauccugcugccccagaagguguggugcgccagcggcagaagcaaggugaucaagggcagccugccccugaucggcgaggccgacugccugcacgagaaguacggcggccugaacaagagcaagcccuacuacaccggcgagcacgccaaggccaucggcaacugccccaucugggugaagaccccccugaagcuggccaacggcaccaaguacagaccccccgccaagcugcugaaggagagaggcuucuucggcgccaucgccggcuuccuggagggcggcugggagggcaugaucgccggcuggcacggcuacaccagccacggcgcccacggcguggccguggccgccgaccugaagagcacccaggaggccaucaacaagaucaccaagaaccugaacagccugagcgagcuggaggugaagaaccugcagagacugagcggcgccauggacgagcugcacaacgagauccuggagcuggacgagaagguggacgaccugagagccgacaccaucagcagccagaucgagcuggccgugcugcugagcaacgagggcaucaucaacagcgaggacgagcaccugcuggcccuggagagaaagcugaagaagaugcugggccccagcgccguggagaucggcaacggcugcuucgagaccaagcacaagugcaaccagaccugccuggacagaaucgccgccggcaccuucgacgccggcgaguucagccugcccaccuucgacagccugaacaucaccgccgccagccugaacgacgacggccuggacaaccacaccauccugcuguacuacagcaccgccgccagcagccuggccgugacccugaugaucgccaucuucgugguguacauggugagcagagacaacgugagcugcagcaucugccuguga

SEQ ID NO: 188321 - RNA, 1758 nt, Artificial Sequence; identical to SEQ ID NO: 186743
  derived and/or modified CDS sequence (opt4) from hemagglutinin__InfluenzaB__AHZ36895

SEQ ID NO: 188322 - RNA, 1758 nt, Artificial Sequence; identical to SEQ ID NO: 186743
  derived and/or modified CDS sequence (opt4) from hemagglutinin__InfluenzaB__AHZ36906

SEQ ID NO: 188323 - RNA, 1758 nt, Artificial Sequence
  derived and/or modified CDS sequence (opt4) from hemagglutinin__InfluenzaB__AHZ36928
augaaggccaucaucgugcugcugaugguggugaccagcaacgccgacagaaucugcaccggcaucaccagcagcaacagcccccacguggugaagaccgccacccagggcgaggugaacgugaccggcgugaucccccugaccaccacccccaccaagagccacuucgccaaccugaagggcaccaagaccagaggcaagcugugccccaagugccugaacugcaccgaccuggacguggcccugggcagacccaagugcaccggcaagauccccagcgccagagugagcauccugcacgaggugagacccgugaccagcggcugcuuccccaucaugcacgacagaaccaagaucagacagcugcccaaccugcugagaggcuacgagcacaucagacugagcacccacaacgugaucaacgccgagaacgcccccggcggccccuacaagaucggcaccagcggcagcugccugaacgugaccaacggcaacggcuucuucgccaccauggccugggccgugcccaagaacgacaagaacaagaccgccaccaacccccugaccaucgaggugcccuacaucugcaccgagggcgaggaccagaucaccguguggggcuuccacagcgacaacgagacccagauggccaagcuguacggcgacagcaagccccagaaguucaccagcagcgccaacggcgugaccacccacuacgugagccagaucggcggcuuccccaaccagaccgaggacggcggccugccccagagcggcagaaucgugguggacuacauggugcagaagagcggcaagaccggcaccaucaccuaccagagaggcauccugcugccccagaagguguggugcgccagcggcagaagcaaggugaucaagggcagccugccccugaucggcgaggccgacugccugcacgagaaguacggcggccugaacaagagcaagcccuacuacaccggcgagcacgccaaggccaucggcaacugccccaucugggugaagaccccccugaagcuggccaacggcaccaaguacagaccccccgccaagcugcugaaggagagaggcuucuucggcgccaucgccggcuuccuggagggcggcugggagggcaugaucgccggcuggcacggcuacaccagccacggcgcccacggcguggccguggccgccgaccugaagagcacccaggaggccaucaacaagaucaccaagaaccugaacagccugagcgagcuggaggugaagaaccugcagagacugagcggcgccauggacgagcugcacaacgagauccuggagcuggacgagaagguggacgaccugagagccgacaccaucagcagccagaucgagcuggccgugcugcugagcaacgagggcaucaucaacagcgaggacgagcaccugcuggcccuggagagaaagcugaagaagaugcugggccccagcgccguggagaucggcaacggcugcuucgagaccaagcacaagugcaaccagaccugccuggacagaaucgccgccggcaccuucgacgccggcgaguucagccugcccaccuucgacagccugaacaucaccgccgccagccugaacgacgacggccuggacaaccacaccauccugcuguacuacagcaccgccgccagcagccuggccgugacccugaugaucgccaucuucgugguguacauggugagcagagacaacgugagcugcagcaucugccuguga

SEQ ID NO: 188324 - RNA, 1758 nt, Artificial Sequence; identical to SEQ ID NO: 188219
  derived and/or modified CDS sequence (opt4) from hemagglutinin__InfluenzaB__AHZ36939

SEQ ID NO: 188325 - RNA, 1758 nt, Artificial Sequence
  derived and/or modified CDS sequence (opt4) from hemagglutinin__InfluenzaB__AHZ36950
augaaggccaucaucgugcugcugaugguggugaccagcaacgccgacagaaucugcaccggcaucaccagcagcaacagcccccacaucgugaagaccgccacccagggcgaggugaacgugaccggcgugaucccccugaccaccacccccaccaagagccacuucgccaaccugaagggcaccgagaccagaggcaagcugugccccaagugccugaacugcaccgaccuggacguggcccugggcagacccaagugcaccggcaagauccccagcgccagagugagcauccugcacgaggugagacccaucaccagcggcugcuuccccaucaugcacgacagaaccaagaucagacagcugcccaaccugcugagaggcuacgagcacaucagacugagcacccacaacgugaucaacgccgagaacgcccccggcggccccuacaagaucggcaccagcggcagcugccccaacaucaccaacggcaacggcuucuucgccaccauggccugggccgugcccaagaacgacaagaacaagaccgccaccaacccccugaccaucgaggugcccuacaucugcaccgagggcgaggaccagaucaccguguggggcuuccacagcgacaacgagacccagauggccaagcuguacggcgacagcaagccccagaaguucaccagcagcgccaacggcgugaccacccacuacgugagccagaucggcggcuuccccaaccagaccgaggacggcggccugccccagagcggcagaaucgugguggacuacauggugcagaagagcggcaagaccggcaccaucaccuaccagagaggcauccugcugccccagaagguguggugcgccagcggcagaagcaaggugaucaagggcagccugccccugaucggcgaggccgacugccugcacgagaaguacggcggccugaacaagagcaagcccuacuacaccggcgagcacgccaaggccaucggcaacugccccaucugggugaagaccccccugaagcuggccaacggcaccaaguacagaccccccgccaagcugcugaaggagagaggcuucuucggcgccaucgccggcuuccuggagggcggcugggagggcaugaucgccggcuggcacggcuacaccagccacggcgcccacggcguggccguggccgccgaccugaagagcacccaggaggccaucaacaagaucaccaagaaccugaacagccugagcgagcuggaggugaagaaccugcagagacugagcggcgccauggacgagcugcacaacgagauccuggagcuggacgagaagguggacgaccugagagccgacaccaucagcagccagaucgagcuggccgugcugcugagcaacgagggcaucaucaacagcgaggacgagcaccugcuggcccuggagagaaagcugaagaagaugcugggccccagcgccguggagaucggcaacggcugcuucgagaccaagcacaagugcaaccagaccugccuggacagaaucgccgccggcaccuucgacgccggcgaguucagccugcccaccuucgacagccugaacaucaccgccgccagccugaacgacgacggccuggacaaccacaccauccugcuguacuacagcaccgccgccagcagccuggccgugacccugaugaucgccaucuucgugguguacauggugagcagagacaacgugagcugcagcaucugccuguga

SEQ ID NO: 188326 - RNA, 1758 nt, Artificial Sequence
  derived and/or modified CDS sequence (opt4) from hemagglutinin__InfluenzaB__AHZ36961
augaaggccaucaucgugcugcugaugguggugaccagcaacgccgacagaaucugcaccggcaucaccagcagcaacagcccccacguggugaagaccgccacccagggcgaggugaacgugaccggcgugaucccccugaccaccacccccaccaagagccacuucgccaaccugaagggcaccgagaccagaggcaagcugugccccaagugccugaacugcaccgaccuggacguggcccugggcagacccaagugcaccggcaagauccccagcgccagagugagcauccugcacgaggugagacccgugaccagcggcugcuuccccaucaugcacgacagaaccaagaucagacagcugcccaaccugcugagaggcuacgagcacaucagacugagcacccacaacgugaucaacgccgagaacgcccccggcggccccuacaagaucggcaccagcggcagcugccccaacgugaccaacggcaacggcuucuucgccaccauggccugggccgugcccaagaacgacaagaacaagaccgccaccaacccccugaccaucgaggugcccuacaucugcaccgagggcgaggaccagaucaccguguggggcuuccacagcgacaacgagacccagauggccaagcuguacggcgacagcaagccccagaaguucaccagcagcgccaacggcgugaccacccacuacgugagccagaucggcggcuuccccaaccagaccgaggacggcggccugccccagagcggcagaaucgugguggacuacauggugcagaagagcggcaagaccggcaccaucaccuaccagagaggcauccugcugccccagaagguguggugcgccagcggcggcagcaaggugaucaagggcagccugccccugaucggcgaggccgacugccugcacgagaaguacggcggccugaacaagagcaagcccuacuacaccggcgagcacgccaaggccaucggcaacugccccaucugggugaagaccccccugaagcuggccaacggcaccaaguacagaccccccgccaagcugcugaaggagagaggcuucuucggcgccaucgccggcuuccuggagggcggcugggagggcaugaucgccggcuggcacggcuacaccagccacggcgcccacggcguggccguggccgccgaccugaagagcacccaggaggccaucaacaagaucaccaagaaccugaacagccugagcgagcuggaggugaagaaccugcagagacugagcggcgccauggacgagcugcacaacgagauccuggagcuggacgagaagguggacgaccugagagccgacaccaucagcagccagaucgagcuggccgugcugcugagcaacgagggcaucaucaacagcgaggacgagcaccugcuggcccuggagagaaagcugaagaagaugcugggccccagcgccguggagaucggcaacggcugcuucgagaccaagcacaagugcaaccagaccugccuggacagaaucgccgccggcaccuucgacgccggcgaguucagccugcccaccuucgacagccugaacaucaccgccgccagccugaacgacgacggccuggacaaccacaccauccugcuguacuacagcaccgccgccagcagccuggccgugacccugaugaucgccaucuucgugguguacauggugagcagagacaacgugagcugcagcaucugccuguga

SEQ ID NO: 188327 - RNA, 1758 nt, Artificial Sequence; identical to SEQ ID NO: 186743
  derived and/or modified CDS sequence (opt4) from hemagglutinin__InfluenzaB__AHZ36972

SEQ ID NO: 188328 - RNA, 1758 nt, Artificial Sequence
  derived and/or modified CDS sequence (opt4) from hemagglutinin__InfluenzaB__AHZ36983
augaaggccaucaucgugcugcugaugguggugaccagcaacgccgacagaaucugcaccggcaucaccagcagcaacagcccccacaucgugaagaccgccacccagggcgaggugaacgugaccggcgugaucccccugaccaccacccccaccaagagccacuucgccaaccugaagggcaccgagaccagaggcaagcugugccccaagugccugaacugcaccgaccuggacguggcccugggcagacccaagugcaccggcaagauccccagcgccagagugagcauccugcacgaggugagacccgugaccagcggcugcuuccccaucaugcacgacagaaccaagaucagacagcugcccaaccugcugagaggcuacgagcacaucagacugagcacccacaacgugaucaacgccgagaacgcccccggcggccccuacaagaucggcaccagcggcagcugccccaacaucaccaacggcaacggcuucuucgccaccauggccugggccgugcccaagaacgacaagaacaagaccgccaccaacccccugaccaucgaggugcccuacaucugcaccgagggcgaggaccagaucaccguguggggcuuccacagcgacaacgagacccagauggccaagcuguacggcgacagcaagccccagaaguucaccagcagcgccaacggcgugaccgcccacuacgugagccagaucggcggcuuccccaaccagaccgaggacggcggccugccccagagcggcagaaucgugguggacuacauggugcagaagagcggcaagaccggcaccaucaccuaccagagaggcauccugcugccccagaagguguggugcgccagcggcagaagcaaggugaucaagggcagccugccccugaucggcgaggccgacugccugcacgagaaguacggcggccugaacaagagcaagcccuacuacaccggcgagcacgccaaggccaucggcaacugccccaucugggugaagaccccccugaagcuggccaacggcaccaaguacagaccccccgccaagcugcugaaggagagaggcuucuucggcgccaucgccggcuuccuggagggcggcugggagggcaugaucgccggcuggcacggcuacaccagccacggcgcccacggcguggccguggccgccgaccugaagagcacccaggaggccaucaacaagaucaccaagaaccugaacagccugagcgagcuggaggugaagaaccugcagagacugagcggcgccauggacgagcugcacaacgagauccuggagcuggacgagaagguggacgaccugagagccgacaccaucagcagccagaucgagcuggccgugcugcugagcaacgagggcaucaucaacagcgaggacgagcaccugcuggcccuggagagaaagcugaagaagaugcugggccccagcgccguggagaucggcaacggcugcuucgagaccaagcacaagugcaaccagaccugccuggacagaaucgccgccggcaccuucgacgccggcgaguucagccugcccaccuucgacagccugaacaucaccgccgccagccugaacgacgacggccuggacaaccacaccauccugcuguacuacagcaccgccgccagcagccuggccgugacccugaugaucgccaucuucgugguguacauggugagcagagacaacgugagcugcagcaucugccuguga

SEQ ID NO: 188329 - RNA, 1758 nt, Artificial Sequence
  derived and/or modified CDS sequence (opt4) from hemagglutinin__InfluenzaB__AHZ37005
augaaggccaucaucgugcugcugaugguggugaccagcaacgccgacagaaucugcaccggcaucaccagcagcaacagcccccacguggugaagaccgccacccagggcgaggugaacgugaccggcgugaucccccugaccaccacccccaccaagagccacuucgccaaccugaagggcaccgagaccagaggcaagcugugccccaagugccccaacugcaccgaccuggacguggcccugggcagacccaagugcaccggcaagauccccagcgccagagugagcauccugcacgaggugagacccgugaccagcggcugcuuccccaucaugcacgacagaaccaagaucagacagcugcccaaccugcugagaggcuacgagcacaucagacugagcacccacaacgugaucaacgccgagagcgcccccggcggccccuacaagaucggcaccagcggcagcugccccaacgugaccaacggcaacggcuucuucgccaccauggccugggccgugcccaagaacgacaagaacaagaccgccaccgacccccugaccaucgaggugcccuacaucugcaccgaggaggaggaccagaucaccguguggggcuuccacagcgacaacgagacccagauggccaagcuguacggcgacagcaagccccagaaguucaccagcagcgccaacggcgugaccacccacuacgugagccagaucggcggcuuccccaaccagaccgaggacggcggccugccccagagcggcagaaucgugguggacuacauggugcagaagagcggcaagaccggcaccaucaccuaccagagaggcauccugcugccccagaagguguggugcgccagcggcagaagcaaggugaucaagggcagccugccccugaucggcgaggccgacugccugcacgagaaguacggcggccugaacaagagcaagcccuacuacaccggcgagcacgccaaggccaucggcaacugccccaucugggugaagaccccccugaagcuggccaacggcaccaaguacagaccccccgccaagcugcugaaggagagaggcuucuucggcgccaucgccggcuuccuggagggcggcugggagggcaugaucgccggcuggcacggcuacaccagccacggcgcccacggcguggccguggccgccgaccugaagagcacccaggaggccaucaacaagaucaccaagaaccugaacagccugagcgagcuggaggugaagaaccugcagagacugagcggcgccauggacgagcugcacaacgagauccuggagcuggacgagaagguggacgaccugagagccgacaccaucagcagccagaucgagcuggccgugcugcugagcaacgagggcaucaucaacagcgaggacgagcaccugcuggcccuggagagaaagcugaagaagaugcugggccccagcgccguggagaucggcaacggcugcuucgagaccaagcacaagugcaaccagaccugccuggacagaaucgccgccggcaccuucgacgccggcgaguucagccugcccaccuucgacagccugaacaucaccgccgccagccugaacgacgacggccuggacaaccacaccauccugcuguacuacagcaccgccgccagcagccuggccgugacccugaugaucgccaucuucgugguguacauggugagcagagacaacgugagcugcagcaucugccuguga

SEQ ID NO: 188330 - RNA, 1758 nt, Artificial Sequence; identical to SEQ ID NO: 186705
  derived and/or modified CDS sequence (opt4) from hemagglutinin__InfluenzaB__AHZ37016

SEQ ID NO: 188331 - RNA, 1758 nt, Artificial Sequence
  derived and/or modified CDS sequence (opt4) from hemagglutinin__InfluenzaB__AHZ37027
augaaggccaucaucgugcugcugaugguggugaccagcaacgccgacagaaucugcaccggcaucaccagcagcaacagcccccacguggugaagaccgccacccagggcgaggugaacgugaccggcgugaucccccugaccaccacccccaccaagagccacuucgccaaccugaagggcaccgagaccagaggcaagcugugccccaagugccugaacugcaccgaccuggacguggcccugggcagacccaagugcaccggcaagauccccagcgccagagugagcaucauccacgaggugagacccgugaccagcggcugcuuccccaucaugcacgacagaaccaagaucagacagcugcccaaccugcugagaggcuacgagcacaucagacugagcacccacaacgugaucaacgccgagaacgcccccggcggccccuacaagaucggcaccagcggcagcugccugaacgugaccaacggcaacggcuucuucgccaccauggccugggccgugcccaagaacgacaagaacaagaccgccaccaacccccugaccaucgaggugcccuacaucugcaccgagggcgaggaccagaucaccguguggggcuuccacagcgacaacgagacccagauggccaagcuguacggcgacagcaagccccagaaguucaccagcagcgccaacggcgugaccacccacuacgugagccagaucggcggcuuccccaaccagaccgaggacggcggccugccccagagcggcagaaucgugguggacuacauggugcagaagagcggcaagaccggcaccaucaccuaccagagaggcauccugcugccccagaagguguggugcgccagcggcagaagcaaggugaucaagggcagccugccccugaucggcgaggccgacugccugcacgagaaguacggcggccugaacaagagcaagcccuacuacaccggcgagcacgccaaggccaucggcaacugccccaucugggugaagaccccccugaagcuggccaacggcaccaaguacagaccccccgccaagcugcugaaggagagaggcuucuucggcgccaucgccggcuuccuggagggcggcugggagggcaugaucgccggcuggcacggcuacaccagccacggcgcccacggcguggccguggccgccgaccugaagagcacccaggaggccaucaacaagaucaccaagaaccugaacagccugagcgagcuggaggugaagaaccugcagagacugagcggcgccauggacgagcugcacaacgagauccuggagcuggacgagaagguggacgaccugagagccgacaccaucagcagccagaucgagcuggccgugcugcugagcaacgagggcaucaucaacagcgaggacgagcaccugcuggcccuggagagaaagcugaagaagaugcugggccccagcgccguggagaucggcaacggcugcuucgagaccaagcacaagugcaaccagaccugccuggacagaaucgccgccggcaccuucgacgccggcgaguucagccugcccaccuucgacagccugaacaucaccgccgccagccugaacgacgacggccuggacaaccacaccauccugcuguacuacagcaccgccgccagcagccuggccgugacccugaugaucgccaucuucgugguguacauggugagcagagacaacgugagcugcagcaucugccuguga

SEQ ID NO: 188332 - RNA, 1758 nt, Artificial Sequence; identical to SEQ ID NO: 186705
  derived and/or modified CDS sequence (opt4) from hemagglutinin__InfluenzaB__AHZ37038

SEQ ID NO: 188333 - RNA, 1758 nt, Artificial Sequence; identical to SEQ ID NO: 188219
  derived and/or modified CDS sequence (opt4) from hemagglutinin__InfluenzaB__AHZ37049

SEQ ID NO: 188334 - RNA, 1758 nt, Artificial Sequence; identical to SEQ ID NO: 188219
  derived and/or modified CDS sequence (opt4) from hemagglutinin__InfluenzaB__AHZ37060

SEQ ID NO: 188335 - RNA, 1758 nt, Artificial Sequence; identical to SEQ ID NO: 186705
  derived and/or modified CDS sequence (opt4) from hemagglutinin__InfluenzaB__AHZ37071

SEQ ID NO: 188336 - RNA, 1758 nt, Artificial Sequence; identical to SEQ ID NO: 186705
  derived and/or modified CDS sequence (opt4) from hemagglutinin__InfluenzaB__AHZ37082

SEQ ID NO: 188337 - RNA, 1758 nt, Artificial Sequence; identical to SEQ ID NO: 188219
  derived and/or modified CDS sequence (opt4) from hemagglutinin__InfluenzaB__AHZ37093

SEQ ID NO: 188338 - RNA, 1758 nt, Artificial Sequence
  derived and/or modified CDS sequence (opt4) from hemagglutinin__InfluenzaB__AHZ37104
augaaggccaucaucgugcugcugaugguggugaccagcaacgccgacagaaucugcaccggcaucaccagcagcaacagcccccacguggugaagaccgccacccagggcgaggugaacgugaccggcgugaucccccugaccaccacccccaccaagagccacuucgccaaccugaagggcaccgagaccagaggcaagcugugccccaagugccugaacugcaccgaccuggacguggcccugggcagacccaagugcaccggcaagauccccagcgccagagugagcauccugcacgaggugagacccgugaccagcggcugcuuccccaucaugcacgacagaaccaagaucagacagcugcccaaccugcugagaggcuacgagcacaucagacugagcacccacaacgugaucaacgccgagaacgcccccggcggccccuacaagaucggcaccagcggcagcugccccaacgugaccaacggcaacggcuucuucgccaccauggccugggccgugcccaagaacgacaagaacaagaccgccaccaacccccugaccaucgaggugcccuacaucugcaccgagggcgaggaccagaucaccguguggggcuuccacagcgacaacgagacccagauggccaagcuguacggcgacagcaagccccagaaguucaccagcagcgccaacggcgugaccacccacuacgugagccagaucggcggcuuccccaaccagaccgaggacggcggccugccccagagcggcagaaucgugguggaccacauggugcagaagagcggcaagaccggcaccaucaccuaccagagaggcauccugcugccccagaagguguggugcgccagcggcagaagcaaggugaucaagggcagccugccccugaucggcgaggccgacugccugcacgagaaguacggcggccugaacaagagcaagcccuacuacaccggcgagcacgccaaggccaucggcaacugccccaucugggugaagaccccccugaagcuggccaacggcaccaaguacagaccccccgccaagcugcugaaggagagaggcuucuucggcgccaucgccggcuuccuggagggcggcugggagggcaugaucgccggcuggcacggcuacaccagccacggcgcccacggcguggccguggccgccgaccugaagagcacccaggaggccaucaacaagaucaccaagaaccugaacagccugagcgagcuggaggugaagaaccugcagagacugagcggcgccauggacgagcugcacaacgagauccuggagcuggacgagaagguggacgaccugagagccgacaccaucagcagccagaucgagcuggccgugcugcugagcaacgagggcaucaucaacagcgaggacgagcaccugcuggcccuggagagaaagcugaagaagaugcugggccccagcgccguggagaucggcaacggcugcuucgagaccaagcacaagugcaaccagaccugccuggacagaaucgccgccggcaccuucgacgccggcgaguucagccugcccaccuucgacagccugaacaucaccgccgccagccugaacgacgacggccuggacaaccacaccauccugcuguacuacagcaccgccgccagcagccuggccgugacccugaugaucgccaucuucgugguguacauggugagcagagacaacgugagcugcagcaucugccuguga

SEQ ID NO: 188339 - RNA, 1758 nt, Artificial Sequence
  derived and/or modified CDS sequence (opt4) from hemagglutinin__InfluenzaB__AHZ41770
augaaggccaucaucgugcugcugaugguggugaccagcaacgccgacagaaucugcaccggcaucaccagcagcaacagcccccacaucgugaagaccgccacccagggcgaggugaacgugaccggcgugaucccccugaccaccacccccaccaagagccacuucgccaaccugaagggcaccgagaccagaggcaagcugugccccaagugccugaacugcaccgaccuggacguggcccugggcagacccaagugcaccggcaagauccccagcgccagagugagcauccugcacgaggugagacccgugaccagcggcugcuuccccaucaugcacgacagaaccaagaucagacagcugcccaaccugcugagaggcuacgagcacaucagacugagcacccacaacgugaucaacgccgagaacgcccccggcggccccuacaagaucggcaccagcggcagcugccccaacaucaccaacggcaacggcuucuucgccaccauggccugggccgugcccaagaacgacaagaacaagaccgccaucaacccccugaccaucgaggugcccuacaucugcaccgagggcgaggaccagaucaccguguggggcuuccacagcgacaacgagacccagauggccaagcuguacggcgacagcgagccccagaaguucaccagcagcgccaacggcgugaccacccacuacgugagccagaucggcggcuuccccaaccagaccgaggacggcggccugccccagagcggcagaaucgugguggacuacauggugcagaagagcggcaagaccggcaccaucaccuaccagagaggcauccugcugccccagaagguguggugcgccagcggcagaagcaaggugaucaagggcagccugccccugaucggcgaggccgacugccugcacgagaaguacggcggccugaacaagagcaagcccuacuacaccggcgagcacgccaaggccaucggcaacugccccaucugggugaagaccccccugaagcuggccaacggcaccaaguacagaccccccgccaagcugcugaaggagagaggcuucuucggcgccaucgccggcuuccuggagggcggcugggagggcaugaucgccggcuggcacggcuacaccagccacggcgcccacggcguggccguggccgccgaccugaagagcacccaggaggccaucaacaagaucaccaagaaccugaacagccugagcgagcuggaggugaagaaccugcagagacugagcggcgccauggacgagcugcacaacgagauccuggagcuggacgagaagguggacgaccugagagccgacaccaucagcagccagaucgagcuggccgugcugcugagcaacgagggcaucaucaacagcgaggacgagcaccugcuggcccuggagagaaagcugaagaagaugcugggccccagcgccguggagaucggcaacggcugcuucgagaccaagcacaagugcaaccagaccugccuggacagaaucgccgccggcaccuucgacgccggcgaguucagccugcccaccuucgacagccugaacaucaccgccgccagccugaacgacgacggccuggacaaccacaccauccugcuguacuacagcaccgccgccagcagccuggccgugacccugaugaucgccaucuucgugguguacauggugagcagagacaacgugagcugcagcaucugccuguga

SEQ ID NO: 188340 - RNA, 1758 nt, Artificial Sequence; identical to SEQ ID NO: 186743
  derived and/or modified CDS sequence (opt4) from hemagglutinin__InfluenzaB__AHZ41781

SEQ ID NO: 188341 - RNA, 1758 nt, Artificial Sequence; identical to SEQ ID NO: 186743
  derived and/or modified CDS sequence (opt4) from hemagglutinin__InfluenzaB__AHZ41792

SEQ ID NO: 188342 - RNA, 1758 nt, Artificial Sequence; identical to SEQ ID NO: 186743
  derived and/or modified CDS sequence (opt4) from hemagglutinin__InfluenzaB__AHZ41803

SEQ ID NO: 188343 - RNA, 1758 nt, Artificial Sequence
  derived and/or modified CDS sequence (opt4) from hemagglutinin__InfluenzaB__AHZ41814
augaaggccaucaucgugcugcugaugguggugaccagcaacgccgacagaaucugcaccggcaucaccagcagcaacagcccccacguggugaagaccgccacccagggcgaggugaacgugaccggcgugaucccccugaccaccacccccaccaagagccacuucgccaaccugaagggcaccgagaccagaggcaagcugugccccaagugccccaacugcaccgaccuggacguggcccugggcagacccaagugcaccggcaagauccccagcgccagagugagcauccugcacgaggugagacccgugaccagcggcugcuuccccaucaugcacgacagaaccaagaucagacagcugcccaaccugcugagaggcuacgagcacaucagacugagcacccacaacgugaucaacgccgagaacgcccccggcggccccuacaagaucggcaccagcggcagcugccccaacgugaccaacggcaacggcuucuucgccaccauggccugggccgugcccaagaacgacaagaacaagaccgccaccaacccccugaccaucgaggugcccuacaucugcaccgagggcgaggaccagaucaccguguggggcuuccacagcgacaacgagacccagauggccaagcuguacggcgacagcaagccccagaaguucaccagcagcgccaacggcgugaccacccacuacgugagccagaucggcggcuuccccaaccagaccgaggacggcggccugccccagagcggcagaaucgugguggacuacauggugcagaagagcggcaagaccggcaccgugaccuaccagagaggcauccugcugccccagaagguguggugcgccagcggcagaagcaaggugaucaagggcagccugccccugaucggcgaggccgacugccugcacgagaaguacggcggccugaacaagagcaagcccuacuacaccggcgagcacgccaaggccaucggcaacugccccaucugggugaagaccccccugaagcuggccaacggcaccaaguacagaccccccgccaagcugcugaaggagagaggcuucuucggcgccaucgccggcuuccuggagggcggcugggagggcaugaucgccggcuggcacggcuacaccagccacggcgcccacggcguggccguggccgccgaccugaagagcacccaggaggccaucaacaagaucaccaagaaccugaacagccugagcgagcuggaggugaagaaccugcagagacugagcggcgccauggacgagcugcacaacgagauccuggagcuggacgagaagguggacgaccugagagccgacaccaucagcagccagaucgagcuggccgugcugcugagcaacgagggcaucaucaacagcgaggacgagcaccugcuggcccuggagagaaagcugaagaagaugcugggccccagcgccguggagaucggcaacggcugcuucgagaccaagcacaagugcaaccagaccugccuggacagaaucgccgccggcaccuucgacgccggcgaguucagccugcccaccuucgacagccugaacaucaccgccgccagccugaacgacgacggccuggacaaccacaccauccugcuguacuacagcaccgccgccagcagccuggccgugacccugaugaucgccaucuucgugguguacauggugagcagagacaacgugagcugcagcaucugccuguga

SEQ ID NO: 188344 - RNA, 1758 nt, Artificial Sequence; identical to SEQ ID NO: 186743
  derived and/or modified CDS sequence (opt4) from hemagglutinin__InfluenzaB__AHZ41825

SEQ ID NO: 188345 - RNA, 1758 nt, Artificial Sequence; identical to SEQ ID NO: 186743
  derived and/or modified CDS sequence (opt4) from hemagglutinin__InfluenzaB__AHZ41836

SEQ ID NO: 188346 - RNA, 1758 nt, Artificial Sequence; identical to SEQ ID NO: 186743
  derived and/or modified CDS sequence (opt4) from hemagglutinin__InfluenzaB__AHZ41847

SEQ ID NO: 188347 - RNA, 1755 nt, Artificial Sequence; identical to SEQ ID NO: 188191
  derived and/or modified CDS sequence (opt4) from hemagglutinin__InfluenzaB__AHZ41858

SEQ ID NO: 188348 - RNA, 1758 nt, Artificial Sequence; identical to SEQ ID NO: 188216
  derived and/or modified CDS sequence (opt4) from hemagglutinin__InfluenzaB__AHZ41869

SEQ ID NO: 188349 - RNA, 1755 nt, Artificial Sequence
  derived and/or modified CDS sequence (opt4) from hemagglutinin__InfluenzaB__AIC73844
augaaggccaucaucgugcugcugaugguggugaccagcaacgccgacagaaucugcaccggcaucaccagcagcaacagcccccacguggugaagaccgccacccagggcgaggugaacgugaccggcgugaucccccugaccaccacccccaccaagagcuacuucgccaaccugaagggcaccagaaccagaggcaagcugugccccgacugccugaacugcaccgaccuggacguggcccugggcagacccaugugcgugggcaccacccccagcgccaaggccagcauccugcacgaggugagacccgugaccagcggcugcuuccccaucaugcacgacagaaccaagaucagacagcugcccaaccugcugagaggcuacgagaagaucagacugagcacccagaacgugaucgacgccgagaaggcccccggcggccccuacagacugggcaccagcggcagcugccccaacgccaccagcaagaucggcuucuucgccaccauggccugggccgugcccaaggacaacuacaagaacgccaccaacccccagaccguggaggugcccuacaucugcaccgagggcgaggaccagaucaccguguggggcuuccacagcgacaacaagacccagaugaagagccuguacggcgacagcaacccccagaaguucaccagcagcgccaacggcgugaccacccacuacgugagccagaucggcgacuuccccgaccagaccgaggacggcggccugccccagagcggcagaaucgugguggacuacaugaugcagaagcccggcaagaccggcaccaucguguaccagagaggcgugcugcugccccagaagguguggugcgccagcggcagaagcaaggugaucaagggcagccugccccugaucggcgaggccgacugccugcacgaggaguacggcggccugaacaagagcaagcccuacuacaccggcaagcacgccaaggccaucggcaacugccccaucugggugaagaccccccugaagcuggccaacggcaccaaguacagaccccccgccaagcugcugaaggagagaggcuucuucggcgccaucgccggcuuccuggagggcggcugggagggcaugaucgccggcuggcacggcuacaccagccacggcgcccacggcguggccguggccgccgaccugaagagcacccaggaggccaucaacaagaucaccaagaaccugaacagccugagcgagcuggaggugaagaaccugcagagacugagcggcgccauggacgagcugcacaacgagauccuggagcuggacgagaagguggacgaccugagagccgacaccaucagcagccagaucgagcuggccgugcugcugagcaacgagggcaucaucaacagcgaggacgagcaccugcuggcccuggagagaaagcugaagaagaugcugggccccagcgccguggacaucggcaacggcugcuucgagaccaagcacaagugcaaccagaccugccuggacagaaucgccgccggcaccuucaacgccggcgaguucagccugcccaccuucgacagccugaacaucaccgccgccagccugaacgacgacggccuggacaaccacaccauccugcuguacuacagcaccgccgccagcagccuggccgugacccugaugcuggccaucuucaucguguacauggugagcagagacaacgugagcugcagcaucugccuguga

SEQ ID NO: 188350 - RNA, 1758 nt, Artificial Sequence; identical to SEQ ID NO: 187925
  derived and/or modified CDS sequence (opt4) from hemagglutinin__InfluenzaB__AIC73845

SEQ ID NO: 188351 - RNA, 1758 nt, Artificial Sequence; identical to SEQ ID NO: 187925
  derived and/or modified CDS sequence (opt4) from hemagglutinin__InfluenzaB__AIC73846

SEQ ID NO: 188352 - RNA, 1758 nt, Artificial Sequence
  derived and/or modified CDS sequence (opt4) from hemagglutinin__InfluenzaB__AIC73847
augaaggccaucaucgugcugcugaugguggugaccagcaacgccgacagaaucugcaccggcaucaccagcagcaacagcccccacguggugaagaccgccacccagggcgaggugaacgugaccggcgugaucccccugaccaccacccccaccaagagccacuucgccaaccugaagggcaccgagaccagaggcaagcugugccccaagugccuggacugcaccgaccuggacguggcccugggcagacccaagugcaccggcaagauccccagcgccagagugagcauccugcacgaggugagacccgugaccagcggcugcuuccccaucaugcacgacagaaccaagaucagacagcugcccaaccugcugagaggcuacgagcacaucagacugagcacccacaacgugaucaacgccgaggacgcccccggcggccccuacaagaucggcaccagcggcagcugccccaacgugaccaacggcaacggcuucuucgccaccauggccugggccgugcccaagaacgacaagaacaagaccgccaccaacccccugaccaucgaggugcccuacaucugcaccgagggcgaggaccagaucaccguguggggcuuccacagcgacaacgagacccagauggccaagcuguacggcgacagcaagccccagaaguucaccagcagcgccaacggcgugaccacccacuacgugagccagaucggcggcuuccccaaccagaccgaggacggcggccugccccagagcggcagaaucgugguggacuacauggugcagaagagcggcaagaccggcaccaucaccuaccagagaggcauccugcugccccagaagguguggugcgccagcggcagaagcaaggugaucaagggcagccugccccugaucggcgaggccgacugccugcacgagaaguacggcggccugaacaagagcaagcccuacuacaccggcgagcacgccaaggccaucggcaacugccccaucugggugaagaccccccugaagcuggccaacggcaccaaguacagaccccccgccaagcugcugaaggagagaggcuucuucggcgccaucgccggcuuccuggagggcggcugggagggcaugaucgccggcuggcacggcuacaccagccacggcgcccacggcguggccguggccgccgaccugaagagcacccaggaggccaucaacaagaucaccaagaaccugaacagccugagcgagcuggaggugaagaaccugcagagacugagcggcgccauggacgagcugcacaacgagauccuggagcuggacgagaagguggacgaccugagagccgacaccaucagcagccagaucgagcuggccgugcugcugagcaacgagggcaucaucaacagcgaggacgagcaccugcuggcccuggagagaaagcugaagaagaugcugggccccagcgccguggagaucggcaacggcugcuucgagaccaagcacaagugcaaccagaccugccuggacagaaucgccgccggcaccuucgacgccggcgaguucagccugcccaccuucgacagccugaacaucaccgccgccagccugaacgacgacggccuggacaaccacaccauccugcuguacuacagcaccgccgccagcagccuggccgugacccugaugaucgccaucuucgugguguacauggugagcagagacaacgugagcugcagcaucugccuguga

SEQ ID NO: 188353 - RNA, 1758 nt, Artificial Sequence; identical to SEQ ID NO: 187925
  derived and/or modified CDS sequence (opt4) from hemagglutinin__InfluenzaB__AIC73848

SEQ ID NO: 188354 - RNA, 1755 nt, Artificial Sequence; identical to SEQ ID NO: 188189
  derived and/or modified CDS sequence (opt4) from hemagglutinin__InfluenzaB__AIC73849

SEQ ID NO: 188355 - RNA, 1758 nt, Artificial Sequence
  derived and/or modified CDS sequence (opt4) from hemagglutinin__InfluenzaB__AIC73850
augaaggccaucaucgugcugcugaugguggccaccagcaacgccgacagaaucugcaccggcaucaccagcagcaacagcccccacguggugaagaccgccacccagggcgaggugaacgugaccggcgugaucccccugaccaccacccccaccaagagccacuucgccaaccugaagggcaccgagaccagaggcaagcugugccccaagugccugaacugcaccgaccuggacguggcccugggcagacccaagugcaccggcaagauccccagcgccagagugagcauccugcacgaggugagacccgugaccagcggcugcuuccccaucaugcacgacagaaccaagaucagacagcugcccaaccugcugagaggcuacgagcacaucagacugagcacccacaacgugaucaacgccgaggacgcccccggcggccccuacaagaucggcaccagcggcagcugccccaacgugaccaacggcaacggcuucuucgccaccauggccugggccgugcccaagaacgacaagaacaagaccgccaccaacccccugaccaucgaggugcccuacaucugcaccgagggcgaggaccagaucaccguguggggcuuccacagcgacaacgagacccagauggccaagcuguacggcgacagcaagccccagaaguucaccagcagcgccaacggcgugaccacccacuacgugagccagaucggcggcuuccccaaccagaccgaggacggcggccugccccagagcggcagaaucgugguggacuacauggugcagaagagcggcaagaccggcaccaucaccuaccagagaggcauccugcugccccagaagguguggugcgccagcggcagaagcaaggugaucaagggcagccugccccugaucggcgaggccgacugccugcacgagaaguacggcggccugaacaagagcaagcccuacuacaccggcgagcacgccaaggccaucggcaacugccccaucugggugaagaccccccugaagcuggccaacggcaccaaguacagaccccccgccaagcugcugaaggagagaggcuucuucggcgccaucgccggcuuccuggagggcggcugggagggcaugaucgccggcuggcacggcuacaccagccacggcgcccacggcguggccguggccgccgaccugaagagcacccaggaggccaucaacaagaucaccaagaaccugaacagccugagcgagcuggaggugaagaaccugcagagacugagcggcgccauggacgagcugcacaacgagauccuggagcuggacgagaagguggacgaccugagagccgacaccaucagcagccagaucgagcuggccgugcugcugagcaacgagggcaucaucaacagcgaggacgagcaccugcuggcccuggagagaaagcugaagaagaugcugggccccagcgccguggagaucggcaacggcugcuucgagaccaagcacaagugcaaccagaccugccuggacagaaucgccgccggcaccuucgacgccggcgaguucagccugcccaccuucgacagccugaacaucaccgccgccagccugaacgacgacggccuggacaaccacaccauccugcuguacuacagcaccgccgccagcagccuggccgugacccugaugaucgccaucuucgugguguacauggugagcagagacaacgugagcugcagcaucugccuguga

SEQ ID NO: 188356 - RNA, 1758 nt, Artificial Sequence; identical to SEQ ID NO: 186947
  derived and/or modified CDS sequence (opt4) from hemagglutinin__InfluenzaB__AIC73851

SEQ ID NO: 188357 - RNA, 1755 nt, Artificial Sequence; identical to SEQ ID NO: 188349
  derived and/or modified CDS sequence (opt4) from hemagglutinin__InfluenzaB__AIC73852

SEQ ID NO: 188358 - RNA, 1755 nt, Artificial Sequence; identical to SEQ ID NO: 188349
  derived and/or modified CDS sequence (opt4) from hemagglutinin__InfluenzaB__AIC73853

SEQ ID NO: 188359 - RNA, 1758 nt, Artificial Sequence
  derived and/or modified CDS sequence (opt4) from hemagglutinin__InfluenzaB__AIC73855
augaaggccaucaucgugcugcugaugguggugaccagcaacgccgacagaaucugcaccggcaucaccagcagcaacagcccccacguggugaagaccgccacccagggcgaggugaacgugaccggcgugaucccccugaccaccacccccaccaagagccacuucgccaaccugaagggcaccgagaccagaggcaagcugugccccaagugccugaacugcaccgaccuggacguggcccugggcagacccaagugcaccggcaagauccccagcgccagagugagcauccugcacgaggugagacccgugaccagcggcugcuuccccaucaugcacgacagaaccaagaucagacagcugcccaaccugcugagaggcuacgagcacaucagacugagcacccacaacgugaucaacgccgagaacgcccccggcggccccuacaucaucggcaccagcggcagcugccccaacgugaccaacggcaacggcuucuucgccaccauggccugggccgugcccaagaacgacaagaacaagaccgccaccaacccccugaccaucgaggugcccuacaucugcaccgagggcgaggaccagaucaccguguggggcuuccacagcgacaacgagacccagauggccaagcuguacggcgacagcaacccccagaaguucaccagcagcgccaacggcgugaccacccacuacgugagccagaucggcggcuuccccaaccagaccgaggacggcggccugccccagagcggcagaaucgugguggacuacauggugcagaagagcggcaagaccggcaccaucaccuaccagagaggcauccugcugccccagaagguguggugcgccagcggcagaagcaaggugaucaagggcagccugccccugaucggcgaggccgacugccugcacgagaaguacggcggccugaacaagagcaagcccuacuacaccggcgagcacgccaaggccaucggcaacugccccaucugggugaagaccccccugaagcuggccaacggcaccaaguacagaccccccgccaagcugcugaaggagagaggcuucuucggcgccaucgccggcuuccuggagggcggcugggagggcaugaucgccggcuggcacggcuacaccagccacggcgcccacggcguggccguggccgccgaccugaagagcacccaggaggccaucaacaagaucaccaagaaccugaacagccugagcgagcuggaggugaagaaccugcagagacugagcggcgccauggacgagcugcacaacgagauccuggagcuggacgagaagguggacgaccugagagccgacaccaucagcagccagaucgagcuggccgugcugcugagcaacgagggcaucaucaacagcgaggacgagcaccugcuggcccuggagagaaagcugaagaagaugcugggccccagcgccguggagaucggcaacggcugcuucgagaccaagcacaagugcaaccagaccugccuggacagaaucgccgccggcaccuucgacgccggcgaguucagccugcccaccuucgacagccugaacaucaccgccgccagccugaacgacgacggccuggacaaccacaccauccugcuguacuacagcaccgccgccagcagccuggccgugacccugaugaucgccaucuucgugguguacauggugagcagagacaacgugagcugcagcaucugccuguga

SEQ ID NO: 188360 - RNA, 1758 nt, Artificial Sequence; identical to SEQ ID NO: 187925
  derived and/or modified CDS sequence (opt4) from hemagglutinin__InfluenzaB__AIC73856

SEQ ID NO: 188361 - RNA, 1758 nt, Artificial Sequence; identical to SEQ ID NO: 187925
  derived and/or modified CDS sequence (opt4) from hemagglutinin__InfluenzaB__AIC73857

SEQ ID NO: 188362 - RNA, 1758 nt, Artificial Sequence; identical to SEQ ID NO: 187925
  derived and/or modified CDS sequence (opt4) from hemagglutinin__InfluenzaB__AIC73859

SEQ ID NO: 188363 - RNA, 1758 nt, Artificial Sequence
  derived and/or modified CDS sequence (opt4) from hemagglutinin__InfluenzaB__AIC73860
augaaggccaucaucgugcugcugaugguggugaccagcaacgccgacagaaucugcaccggcaucaccagcagcaacagcccccacguggugaagaccgccacccagggcgaggugaacgugaccggcgugaucccccugaccaccacccccaccaagagccacuucgccaaccugaagggcaccgagaccagaggcaagcugugccccaagugccugaacugcaccgaccuggacguggcccugggcagacccaagugcaccggcaagauccccagcgccagagugagcauccugcacgaggugagacccgugaccagcggcugcuuccccaucaugcacgacagaaccaagaucagacagcugcccaaccugcugagaggcuacgagcacaucagacugagcacccacaacgugaucaacgccgagaacgcccccggcggccccuacaagaucggcaccagcggcagcugccccaacgugaccaacggcaacggcuucuucgccaccauggccugggccgugcccaagaacgacaagaacaagaccgccaccaacccccugaccaucgaggugcccuacaucugcaccgagggcgaggaccagaucaccguguggggcuuccacagcgacaacgagacccagauggccaagcuguacggcgacagcaacccccagaaguucaccagcagcgccaacggcgugaccacccacuacgugagccagaucggcggcuuccccaaccagaccgaggacggcggccugccccagagcggcagaaucgugguggacuacauggugcagaagagcggcaagaccggcaccaucaccuaccagagaggcauccugcugccccagaagguguggugcgccagcggcagaagcaaggugaucaagggcagccugccccugaucggcgaggccgacugccugcacgagaaguacggcggccugaacaagagcaagcccuacuacaccggcgagcacgccaaggccaucggcaacugccccaucugggugaagaccccccugaagcuggccaacggcaccaaguacagaccccccgccaagcugcugaaggagagaggcuucuucggcgccaucgccggcuuccuggagggcggcugggagggcaugaucgccggcuggcacggcuacaccagccacggcgcccacggcguggccguggccgccgaccugaagagcacccaggaggccaucaacaagaucaccaagaaccugaacagccugagcgagcuggaggugaagaaccugcagagacugagcggcgccauggacgagcugcacaacgagauccuggagcuggacgagaagguggacgaccugagagccgacaccaugagcagccagaucgagcuggccgugcugcugagcaacgagggcaucaucaacagcgaggacgagcaccugcuggcccuggagagaaagcugaagaagaugcugggccccagcgccguggagaucggcaacggcugcuucgagaccaagcacaagugcaaccagaccugccuggacagaaucgccgccggcaccuucgacgccggcgaguucagccugcccaccuucgacagccugaacaucaccgccgccagccugaacgacgacggccuggacaaccacaccauccugcuguacuacagcaccgccgccagcagccuggccgugacccugaugaucgccaucuucgugguguacauggugagcagagacaacgugagcugcagcaucugccuguga

SEQ ID NO: 188364 - RNA, 1758 nt, Artificial Sequence
  derived and/or modified CDS sequence (opt4) from hemagglutinin__InfluenzaB__AIC73861
augaaggccaucaucgugcugcugaugguggugaccagcaacgccgacagaaucugcaccggcaucaccagcagcaacagcccccacguggugaagaccgccacccagggcgaggugaacgugaccggcgugaucccccugaccaccacccccaccaagagccacuucgccaaccugaagggcaccgagaccagaggcaagcugugccccaagugccugaacugcaccgaccuggacguggcccugggcagacccaagugcaccggcaagauccccagcgccagagugagcauccugcacgaggugagacccgugaccagcggcugcuuccccaucaugcacgacagaaccaagaucagacagcugcccaaccugcugagaggcuacgagcacaucagacugagcacccacaacgugaucaacaccgagaacgcccccggcggccccuacaagaucggcaccagcggcagcugccccaacgugaccaacggcaacggcuucuucgccaccauggccugggccgugcccaagaacgacaagaacaagaccgccaccaacccccugaccaucgaggugcccuacaucugcaccgagggcgaggaccagaucaccguguggggcuuccacagcgacaacgagacccagauggccaagcuguacggcgacagcaacccccagaaguucaccagcagcgccaacggcgugaccauccacuacgugagccagaucggcggcuuccccaaccagaccgaggacggcggccugccccagagcggcagaaucgugguggacuacauggugcagaagagcggcaagaccggcaccaucaccuaccagagaggcauccugcugccccagaagguguggugcgccagcggcagaagcaaggugaucaagggcagccugccccugaucggcgaggccgacugccugcacgagaaguacggcggccugaacaagagcaagcccuacuacaccggcgagcacgccaaggccaucggcaacugccccaucugggugaagaccccccugaagcuggccaacggcaccaaguacagaccccccgccaagcugcugaaggagagaggcuucuucggcgccaucgccggcuuccuggagggcggcugggagggcaugaucgccggcuggcacggcuacaccagccacggcgcccacggcguggccguggccgccgaccugaagagcacccaggaggccaucaacaagaucaccaagaaccugaacagccugagcgagcuggaggugaagaaccugcagagacugagcggcgccauggacgagcugcacaacgagauccuggagcuggacgagaagguggacgaccugagagccgacaccaucagcagccagaucgagcuggccgugcugcugagcaacgagggcaucaucaacagcgaggacgagcaccugcuggcccuggagagaaagcugaagaagaugcugggccccagcgccguggagaucggcaacggcugcuucgagaccaagcacaagugcaaccagaccugccuggacagaaucgccgccggcaccuucgacgccggcgaguucagccugcccaccuucgacagccugaacaucaccgccgccagccugaacgacgacggccuggacaaccacaccauccugcuguacuacagcaccgccgccagcagccuggccgugacccugaugaucgccaucuucgugguguacauggugagcagagacaacgugagcugcagcaucugccuguga

SEQ ID NO: 188365 - RNA, 1758 nt, Artificial Sequence; identical to SEQ ID NO: 188363
  derived and/or modified CDS sequence (opt4) from hemagglutinin__InfluenzaB__AIC73862

SEQ ID NO: 188366 - RNA, 1758 nt, Artificial Sequence; identical to SEQ ID NO: 188363
  derived and/or modified CDS sequence (opt4) from hemagglutinin__InfluenzaB__AIC73863

SEQ ID NO: 188367 - RNA, 1758 nt, Artificial Sequence; identical to SEQ ID NO: 188363
  derived and/or modified CDS sequence (opt4) from hemagglutinin__InfluenzaB__AIC73864

SEQ ID NO: 188368 - RNA, 1755 nt, Artificial Sequence
  derived and/or modified CDS sequence (opt4) from hemagglutinin__InfluenzaB__AIC73865
augaaggccaucaucgugcugcugaugguggugaccagcaacgccgacagaaucugcaccggcaucaccagcagcaacagcccccacguggugaagaccgccacccagggcgaggugaacgugaccggcgugaucccccugaccaccacccccaccaagagcuacuucgccaaccugaagggcaccaagaccagaggcaagcugugccccgacugccugaacugcaccgaccuggacguggcccugggcagacccaugugcgugggcaccacccccagcgccaaggccagcauccugcacgaggugagacccgugaccagcggcugcuuccccaucaugcacgacagaaccaagaucagacagcuggccaaccugcugagaggcuacgagaacaucagacugagcacccagaacgugaucgacgccgagaaggcccccggcggccccuacagacugggcaccagcggcagcugccccaacgccaccagcaagagcggcuucuucgccaccauggccugggccgugcccaaggacaacaacaagaacgccaccaacccccugaccguggaggugcccuacaucugcgccgagggcgaggaccagaucaccguguggggcuuccacagcgacaacaagacccagaugaagaaccuguacggcgacagcaacccccagaaguucaccagcagcgccaacggcgugaccacccacuacgugagccagaucggcggcuuccccgaccagagagaggacggcggccugccccagagcggcagaaucgugguggacuacaugaugcagaagcccggcaagaccggcaccaucguguaccagagaggcgugcugcugccccagaagguguggugcgccagcggcagaagcaaggugaucaagggcagccugccccugaucggcgaggccgacugccugcacgagaaguacggcggccugaacaagagcaagcccuacuacaccggcgagcacgccaaggccaucggcaacugccccaucugggugaagaccccccugaagcuggccaacggcaccaaguacagaccccccgccaagcugcugaaggagagaggcuucuucggcgccaucgccggcuuccuggagggcggcugggagggcaugaucgccggcuggcacggcuacaccagccacggcgcccacggcguggccguggccgccgaccugaagagcacccaggaggccaucaacaagaucaccaagaaccugaacagccugagcgagcuggaggugaagaaccugcagagacugagcggcgccauggacgagcugcacaacgagauccuggagcuggacgagaagguggacgaccugagagccgacaccaucagcagccagaucgagcuggccgugcugcugagcaacgagggcaucaucaacagcgaggacgagcaccugcuggcccuggagagaaagcugaagaagaugcugggccccagcgccguggacaucggcaacggcugcuucgagaccaagcacaagugcaaccagaccugccuggacagaaucgccgccggcaccuucaacgccggcgaguucagccugcccaccuucgacagccugaacaucaccgccgccagccugaacgacgacggccuggacaaccacaccauccugcuguacuacagcaccgccgccagcagccuggccgugacccugaugcuggccaucuucaucguguacauggugagcagagacaacgugagcugcagcaucugccuguga

SEQ ID NO: 188369 - RNA, 1758 nt, Artificial Sequence
  derived and/or modified CDS sequence (opt4) from hemagglutinin__InfluenzaB__AIC73867
augaaggccaucaucgugcugcugaugguggugaccagcaacgccgacagaaucugcaccggcaucaccagcagcaacagcccccacguggugaagaccgccacccagggcgaggugaacgugaccggcgugaucccccugaccaccacccccaccaagagccacuucgccaaccugaagggcaccgagaccagaggcaagcugugccccaagugccugaacugcaccgaccuggacguggcccugggcagacccaagugcaccggcaagauccccagcgccagagugagcauccugcacgaggugagacccgugaccagcggcugcuuccccaucaugcacgacagaaccaagaucagacagcugcccaaccugcugagaggcuacgagcacaucagacugagcacccacaacgugaucgacgccgagaacgcccccggcggccccuacaagaucggcaccagcggcagcugccccaacgugaccaacggcaacggcuucuucgccaccauggccugggccgugcccaagaacgacaagaacaagaccgccaccaacccccugaccaucgaggugcccuacaucugcaccgagggcgaggaccagaucaccguguggggcuuccacagcgacaacgagacccagauggccaagcuguacggcgacagcaacccccagaaguucaccagcagcgccaacggcgugaccacccacuacgugagccagaucggcggcuuccccaaccagaccgaggacggcggccugccccagagcggcagaaucgugguggacuacauggugcagaagagcggcaagaccggcaccaucaccuaccagagaggcauccugcugccccagaagguguggugcgccagcggcagaagcaaggugaucaagggcagccugccccugaucggcgaggccgacugccugcacgagaaguacggcggccugaacaagagcaagcccuacuacaccggcgagcacgccaaggccaucggcaacugccccaucugggugaagaccccccugaagcuggccaacggcaccaaguacagaccccccgccaagcugcugaaggagagaggcuucuucggcgccaucgccggcuuccuggagggcggcugggagggcaugaucgccggcuggcacggcuacaccagccacggcgcccacggcguggccguggccgccgaccugaagagcacccaggaggccaucaacaagaucaccaagaaccugaacagccugagcgagcuggaggugaagaaccugcagagacugagcggcgccauggacgagcugcacaacgagauccuggagcuggacgagaagguggacgaccugagagccgacaccaucagcagccagaucgagcuggccgugcugcugagcaacgagggcaucaucaacagcgaggacgagcaccugcuggcccuggagagaaagcugaagaagaugcugggccccagcgccguggagaucggcaacggcugcuucgagaccaagcacaagugcaaccagaccugccuggacagaaucgccgccggcaccuucgacgccggcgaguucagccugcccaccuucgacagccugaacaucaccgccgccagccugaacgacgacggccuggacaaccacaccauccugcuguacuacagcaccgccgccagcagccuggccgugacccugaugaucgccaucuucgugguguacauggugagcagagacaacgugagcugcagcaucugccuguga

SEQ ID NO: 188370 - RNA, 1758 nt, Artificial Sequence; identical to SEQ ID NO: 186947
  derived and/or modified CDS sequence (opt4) from hemagglutinin__InfluenzaB__AIC73868

SEQ ID NO: 188371 - RNA, 1758 nt, Artificial Sequence; identical to SEQ ID NO: 188363
  derived and/or modified CDS sequence (opt4) from hemagglutinin__InfluenzaB__AIC73869

SEQ ID NO: 188372 - RNA, 1758 nt, Artificial Sequence; identical to SEQ ID NO: 188363
  derived and/or modified CDS sequence (opt4) from hemagglutinin__InfluenzaB__AIC73870

SEQ ID NO: 188373 - RNA, 1758 nt, Artificial Sequence; identical to SEQ ID NO: 187925
  derived and/or modified CDS sequence (opt4) from hemagglutinin__InfluenzaB__AIC73871

SEQ ID NO: 188374 - RNA, 1755 nt, Artificial Sequence; identical to SEQ ID NO: 188349
  derived and/or modified CDS sequence (opt4) from hemagglutinin__InfluenzaB__AIC73872

SEQ ID NO: 188375 - RNA, 1755 nt, Artificial Sequence; identical to SEQ ID NO: 188189
  derived and/or modified CDS sequence (opt4) from hemagglutinin__InfluenzaB__AIC73873

SEQ ID NO: 188376 - RNA, 1755 nt, Artificial Sequence; identical to SEQ ID NO: 188349
  derived and/or modified CDS sequence (opt4) from hemagglutinin__InfluenzaB__AIC73874

SEQ ID NO: 188377 - RNA, 1755 nt, Artificial Sequence; identical to SEQ ID NO: 188368
  derived and/or modified CDS sequence (opt4) from hemagglutinin__InfluenzaB__AIC73875

SEQ ID NO: 188378 - RNA, 1755 nt, Artificial Sequence
  derived and/or modified CDS sequence (opt4) from hemagglutinin__InfluenzaB__AIC73876
augaaggccaucaucgugcugcugaugguggugaccagcaacgccgacagaaucugcaccggcaucaccagcagcaacagcccccacguggugaagaccgccacccagggcgaggugaacgugaccggcgugaucccccugaccaccacccccaccaagagcuacuucgccaaccugaagggcaccaagaccagaggcaagcugugccccgacugccugaacugcaccgaccuggacguggcccugggcagacccaugugcgugggcaccacccccagcgccaaggccagcauccugcacgaggugagacccgugaccagcggcugcuuccccaucaugcacgacagaaccaagaucagacagcuggccaaccugcugagaggcuacgagaacaucagacugagcacccagaacgugaucgacgccgagaaggcccccggcggccccuacagacugggcaccagcggcagcugccccaacgccaccagcaagagcggcuucuucgccaccauggccugggccgugcccaaggacaacaacaagaacgccaccaacccccugaccguggaggugcccuacaucugcgccgagggcgaggaccagaucaccguguggggcuuccacagcgacaacaagacccagaugaagaaccuguacggcgacagcaacccccagaaguucaccagcagcgccaacggcgugaccacccacuacgugagccagaucggcggcuuccccgaccagagagaggacggcggccugccccagagcggcagaaucgugguggacuacaugaugcagaagcccggcaagaccggcaccaucguguaccagagaggcgugcugcugccccagaagguguggugcgccagcggcagaagcaaggugaucaagggcagccugccccugaucggcgaggccgacugccugcacgagaaguacggcggccugaacaagagcaagcccuacuacaccggcgagcacgccaaggccaucggcaacugccccaucugggugaagaccccccugaagcuggccaacggcaccaaguacagaccccccgccaagcugcugaaggagagaggcuucuucggcgccaucgccggcuuccuggagggcggcugggagggcaugaucgccggcuggcacggcuacaccagccacggcgcccacggcguggccguggccgccgaccugaagagcacccaggaggccaucaacaagaucaccaagaaccugaacagccugagcgagcuggaggugaagaaccugcagagacugagcggcgccauggacgagcugcacaacgagauccuggagcuggacgagaagguggacgaccugagagccgacaccaucagcagccagaucgagcuggccgugcugcugagcaacgagggcaucaucaacagcgaggacgagcaccugcuggcccuggagagaaagcugaagaagaugcugggccccagcgccguggacaucggcaacggcugcuucgagaccaagcacaagugcaaccagaccugccugaacagaaucgccgccggcaccuucaacgccggcgaguucagccugcccaccuucgacagccugaacaucaccgccgccagccugaacgacgacggccuggacaaccacaccauccugcuguacuacagcaccgccgccagcagccuggccgugacccugaugcuggccaucuucaucguguacauggugagcagagacaacgugagcugcagcaucugccuguga

SEQ ID NO: 188379 - RNA, 1755 nt, Artificial Sequence; identical to SEQ ID NO: 188368
  derived and/or modified CDS sequence (opt4) from hemagglutinin__InfluenzaB__AIC73877

SEQ ID NO: 188380 - RNA, 1755 nt, Artificial Sequence; identical to SEQ ID NO: 188368
  derived and/or modified CDS sequence (opt4) from hemagglutinin__InfluenzaB__AIC73878

SEQ ID NO: 188381 - RNA, 1755 nt, Artificial Sequence; identical to SEQ ID NO: 188368
  derived and/or modified CDS sequence (opt4) from hemagglutinin__InfluenzaB__AIC73879

SEQ ID NO: 188382 - RNA, 1755 nt, Artificial Sequence; identical to SEQ ID NO: 188368
  derived and/or modified CDS sequence (opt4) from hemagglutinin__InfluenzaB__AIC73880

SEQ ID NO: 188383 - RNA, 1755 nt, Artificial Sequence; identical to SEQ ID NO: 188368
  derived and/or modified CDS sequence (opt4) from hemagglutinin__InfluenzaB__AIC73881

SEQ ID NO: 188384 - RNA, 1755 nt, Artificial Sequence; identical to SEQ ID NO: 188368
  derived and/or modified CDS sequence (opt4) from hemagglutinin__InfluenzaB__AIC73882

SEQ ID NO: 188385 - RNA, 1755 nt, Artificial Sequence; identical to SEQ ID NO: 188189
  derived and/or modified CDS sequence (opt4) from hemagglutinin__InfluenzaB__AIC73883

SEQ ID NO: 188386 - RNA, 1755 nt, Artificial Sequence; identical to SEQ ID NO: 188368
  derived and/or modified CDS sequence (opt4) from hemagglutinin__InfluenzaB__AIC73884

SEQ ID NO: 188387 - RNA, 1758 nt, Artificial Sequence
  derived and/or modified CDS sequence (opt4) from hemagglutinin__InfluenzaB__AIC73885
auggaggccaucaucgugcugcugaugguggugaccagcaacgccgacagaaucugcaccggcaucaccagcagcaacagcccccacguggugaagaccgccacccagggcgaggugaacgugaccggcgugaucccccugaccaccacccccaccaagagccacuucgccaaccugaagggcaccgagaccagaggcaagcugugccccaagugccugaacugcaccgaccuggacguggcccugggcagacccaagugcaccggcaagauccccagcgccagagugagcauccugcacgaggugagacccgugaccagcggcugcuuccccaucaugcacgacagaaccaagaucagacagcugcccaaccugcugagaggcuacgagcacaucagacugagcacccacaacgugaucaacgccgaggacgcccccggcggccccuacaagaucggcaccagcggcagcugccccaacgugaccaacggcaacggcuucuucgccaccauggccugggccgugcccaagaacgacaagaacaagaccgccaccaacccccugaccaucgaggugcccuacaucugcaccgagggcgaggaccagaucaccguguggggcuuccacagcgacaacgagacccagauggccaagcuguacggcgacagcaagccccagaaguucaccagcagcgccaacggcgugaccacccacuacgugagccagaucggcggcuuccccaaccagaccgaggacggcggccugccccagagcggcagaaucgugguggacuacauggugcagaagagcggcaagaccggcaccaucaccuaccagagaggcauccugcugccccagaagguguggugcgccagcggcagaagcaaggugaucaagggcagccugccccugaucggcgaggccgacugccugcacgagaaguacggcggccugaacaagagcaagcccuacuacaccggcgagcacgccaaggccaucggcaacugccccaucugggugaagaccccccugaagcuggccaacggcaccaaguacagaccccccgccaagcugcugaaggagagaggcuucuucggcgccaucgccggcuuccuggagggcggcugggagggcaugaucgccggcuggcacggcuacaccagccacggcgcccacggcguggccguggccgccgaccugaagagcacccaggaggccaucaacaagaucaccaagaaccugaacagccugagcgagcuggaggugaagaaccugcagagacugagcggcgccauggacgagcugcacaacgagauccuggagcuggacgagaagguggacgaccugagagccgacaccaucagcagccagaucgagcuggccgugcugcugagcaacgagggcaucaucaacagcgaggacgagcaccugcuggcccuggagagaaagcugaagaagaugcugggccccagcgccguggagaucggcaacggcugcuucgagaccaagcacaagugcaaccagaccugccuggacagaaucgccgccggcaccuucgacgccggcgaguucagccugcccaccuucgacagccugaacaucaccgccgccagccugaacgacgacggccuggacaaccacaccauccugcuguacuacagcaccgccgccagcagccuggccgugacccugaugaucgccaucuucgugguguacauggugagcagagacaacgugagcugcagcaucugccuguga

SEQ ID NO: 188388 - RNA, 1758 nt, Artificial Sequence; identical to SEQ ID NO: 187925
  derived and/or modified CDS sequence (opt4) from hemagglutinin__InfluenzaB__AIC73886

SEQ ID NO: 188389 - RNA, 1758 nt, Artificial Sequence; identical to SEQ ID NO: 188369
  derived and/or modified CDS sequence (opt4) from hemagglutinin__InfluenzaB__AIC73887

SEQ ID NO: 188390 - RNA, 1755 nt, Artificial Sequence; identical to SEQ ID NO: 188189
  derived and/or modified CDS sequence (opt4) from hemagglutinin__InfluenzaB__AIC73888

SEQ ID NO: 188391 - RNA, 1755 nt, Artificial Sequence; identical to SEQ ID NO: 188349
  derived and/or modified CDS sequence (opt4) from hemagglutinin__InfluenzaB__AIC73889

SEQ ID NO: 188392 - RNA, 1755 nt, Artificial Sequence; identical to SEQ ID NO: 188349
  derived and/or modified CDS sequence (opt4) from hemagglutinin__InfluenzaB__AIC73890

SEQ ID NO: 188393 - RNA, 1758 nt, Artificial Sequence
  derived and/or modified CDS sequence (opt4) from hemagglutinin__InfluenzaB__AIC73892
augaaggccaucaucgugcugcugaugguggugaccagcaacgccgacagaaucugcaccggcaucaccagcagcaacagcccccacguggugaagaccgccacccagggcgaggugaacgugaccggcgugaucccccugaccaccacccccaccaagagccacuucgccaaccugaagggcaccgagaccagaggcaagcugugccccaagugccugaacugcaccgaccuggacguggcccugggcagacccaagugcaccggcaagauccccagcgccagagugagcauccugcacgaggugagacccgugaccagcggcugcuuccccaucaugcacgacagaaccaagaucagacagcugcccaaccugcugagaggcuacgagcacaucagacugagcacccacaacgugaucaacgccgaggacgcccccggcggccccuacaagaucggcaccagcggcagcugccccaacgugaccaacggcaacggcuucuucgccaccauggccugggccgugcccaagaacgacaagaacaagaccgccaccaacccccugaccaucgaggugcccuacaucugcaccgagggcgaggaccagaucaccguguggggcuuccacagcgacaacgagacccagauggccaagcuguacggcgacagcaagccccagaaguucaccagcagcgccaacggcgugaccacccacuacgugagccagaucggcggcuuccccaaccagaccgaggacggcggccugccccagagcggcagaaucgugguggacuacauggugcagaagagcggcaagaccggcaccaucaccuaccagagaggcauccugcugccccagaagguguggugcgccagcggcagaagcaaggugaucaagggcagccugccccugaucggcgaggccgacugccugcacgagaaguacggcggccugaacaagagcaagcccuacuacaccggcgagcacgccaaggccaucggcaacugccccaucugggugaagaccagccugaagcuggccaacggcaccaaguacagaccccccgccaagcugcugaaggagagaggcuucuucggcgccaucgccggcuuccuggagggcggcugggagggcaugaucgccggcuggcacggcuacaccagccacggcgcccacggcguggccguggccgccgaccugaagagcacccaggaggccaucaacaagaucaccaagaaccugaacagccugagcgagcuggaggugaagaaccugcagagacugagcggcgccauggacgagcugcacaacgagauccuggagcuggacgagaagguggacgaccugagagccgacaccaucagcagccagaucgagcuggccgugcugcugagcaacgagggcaucaucaacagcgaggacgagcaccugcuggcccuggagagaaagcugaagaagaugcugggccccagcgccguggagaucggcaacggcugcuucgagaccaagcacaagugcaaccagaccugccuggacagaaucgccgccggcaccuucgacgccggcgaguucagccugcccaccuucgacagccugaacaucaccgccgccagccugaacgacgacggccuggacaaccacaccauccugcuguacuacagcaccgccgccagcagccuggccgugacccugaugaucgccaucuucgugguguacauggugagcagagacaacgugagcugcagcaucugccuguga

SEQ ID NO: 188394 - RNA, 1755 nt, Artificial Sequence; identical to SEQ ID NO: 188189
  derived and/or modified CDS sequence (opt4) from hemagglutinin__InfluenzaB__AIC73893

SEQ ID NO: 188395 - RNA, 1755 nt, Artificial Sequence; identical to SEQ ID NO: 188349
  derived and/or modified CDS sequence (opt4) from hemagglutinin__InfluenzaB__AIC73894

SEQ ID NO: 188396 - RNA, 1755 nt, Artificial Sequence; identical to SEQ ID NO: 188349
  derived and/or modified CDS sequence (opt4) from hemagglutinin__InfluenzaB__AIC73895

SEQ ID NO: 188397 - RNA, 1755 nt, Artificial Sequence; identical to SEQ ID NO: 188349
  derived and/or modified CDS sequence (opt4) from hemagglutinin__InfluenzaB__AIC73896

SEQ ID NO: 188398 - RNA, 1755 nt, Artificial Sequence; identical to SEQ ID NO: 188349
  derived and/or modified CDS sequence (opt4) from hemagglutinin__InfluenzaB__AIC73897

SEQ ID NO: 188399 - RNA, 1755 nt, Artificial Sequence; identical to SEQ ID NO: 188349
  derived and/or modified CDS sequence (opt4) from hemagglutinin__InfluenzaB__AIC73898

SEQ ID NO: 188400 - RNA, 1755 nt, Artificial Sequence; identical to SEQ ID NO: 188349
  derived and/or modified CDS sequence (opt4) from hemagglutinin__InfluenzaB__AIC73899

SEQ ID NO: 188401 - RNA, 1755 nt, Artificial Sequence; identical to SEQ ID NO: 188349
  derived and/or modified CDS sequence (opt4) from hemagglutinin__InfluenzaB__AIC73900

SEQ ID NO: 188402 - RNA, 1755 nt, Artificial Sequence; identical to SEQ ID NO: 188349
  derived and/or modified CDS sequence (opt4) from hemagglutinin__InfluenzaB__AIC73902

SEQ ID NO: 188403 - RNA, 1755 nt, Artificial Sequence
  derived and/or modified CDS sequence (opt4) from hemagglutinin__InfluenzaB__AIC73903
augaaggccaucaucgugcugcugaugguggugaccagcaacgccgacagaaucugcaccggcaucaccagcagcaacagcccccacguggugaagaccgccacccagggcgaggugaacgugaccggcgugaucccccugaccaccacccccaccaagagcuacuucgccaaccugaagggcaccagaaccagaggcaagcugugccccgacugccugaacugcaccgaccuggacguggcccugggcagacccaugugcgugggcaccacccccagcgccaaggccagcauccugcacgaggugagacccgugaccagcggcugcuuccccaucaugcacgacagaaccaagaucagacagcugcccaaccugcugagaggcuacgagaagaucagacugagcacccagaacgugaucgacgccgagaaggcccccggcggccccuacagacugggcaccagcggcagcugccccaacgccaccagcaagaucggcuucuucgccaccauggccugggccgugcccaaggacaacuacaagaacgccaccaacccccagaccguggaggugcccuacaucugcaccgagggcgaggaccagaucaccguguggggcuuccacagcgacaacaagacccagaugaagagccuguacggcgacagcaacccccagaaguucaccagcagcgccaacggcaucaccacccacuacgugagccagaucggcgacuuccccgaccagaccgaggacggcggccugccccagagcggcagaaucgugguggacuacaugaugcagaagcccggcaagaccggcaccaucguguaccagagaggcgugcugcugccccagaagguguggugcgccagcggcagaagcaaggugaucaagggcagccugccccugaucggcgaggccgacugccugcacgaggaguacggcggccugaacaagagcaagcccuacuacaccggcaagcacgccaaggccaucggcaacugccccaucugggugaagaccccccugaagcuggccaacggcaccaaguacagaccccccgccaagcugcugaaggagagaggcuucuucggcgccaucgccggcuuccuggagggcggcugggagggcaugaucgccggcuggcacggcuacaccagccacggcgcccacggcguggccguggccgccgaccugaagagcacccaggaggccaucaacaagaucaccaagaaccugaacagccugagcgagcuggaggugaagaaccugcagagacugagcggcgccauggacgagcugcacaacgagauccuggagcuggacgagaagguggacgaccugagagccgacaccaucagcagccagaucgagcuggccgugcugcugagcaacgagggcaucaucaacagcgaggacgagcaccugcuggcccuggagagaaagcugaagaagaugcugggccccagcgccguggacaucggcaacggcugcuucgagaccaagcacaagugcaaccagaccugccuggacagaaucgccgccggcaccuucaacgccggcgaguucagccugcccaccuucgacagccugaacaucaccgccgccagccugaacgacgacggccuggacaaccacaccauccugcuguacuacagcaccgccgccagcagccuggccgugacccugaugcuggccaucuucaucguguacauggugagcagagacaacgugagcugcagcaucugccuguga

SEQ ID NO: 188404 - RNA, 1755 nt, Artificial Sequence
  derived and/or modified CDS sequence (opt4) from hemagglutinin__InfluenzaB__AIC73904
augaaggccaucaucgugcugcugaugguggugaccagcaacgccgacagaaucugcaccggcaucaccagcagcaacagcccccacguggugaagaccgccacccagggcgaggugaacgugaccggcgugaucccccugaccaccacccccaccaagagcuacuucgccaaccugaagggcaccagaaccagaggcaagcugugccccgacugccugaacugcaccgaccuggacguggcccugggcagacccaugugcgugggcaucacccccagcgccaaggccagcauccugcacgaggugagacccgugaccagcggcugcuuccccaucaugcacgacagaaccaagaucagacagcugcccaaccugcugagaggcuacgagaagaucagacugagcacccagaacgugaucgacgccgagaaggcccccggcggccccuacagacugggcaccagcggcagcugccccaacgccaccagcaagaucggcuucuucgccaccauggccugggccgugcccaaggacaacuacaagaacgccaccaacccccagaccguggaggugcccuacaucugcaccgagggcgaggaccagaucaccguguggggcuuccacagcgacaacaagacccagaugaagagccuguacggcgacagcaacccccagaaguucaccagcagcgccaacggcgugaccacccacuacgugagccagaucggcgacuuccccgaccagaccgaggacggcggccugccccagagcggcagaaucgugguggacuacaugaugcagaagcccggcaagaccggcaccaucguguaccagagaggcgugcugcugccccagaagguguggugcgccagcggcagaagcaaggugaucaagggcagccugccccugaucggcgaggccgacugccugcacgaggaguacggcggccugaacaagagcaagcccuacuacaccggcaagcacgccaaggccaucggcaacugccccaucugggugaagaccccccugaagcuggccaacggcaccaaguacagaccccccgccaagcugcugaaggagagaggcuucuucggcgccaucgccggcuuccuggagggcggcugggagggcaugaucgccggcuggcacggcuacaccagccacggcgcccacggcguggccguggccgccgaccugaagagcacccaggaggccaucaacaagaucaccaagaaccugaacagccugagcgagcuggaggugaagaaccugcagagacugagcggcgccauggacgagcugcacaacgagauccuggagcuggacgagaagguggacgaccugagagccgacaccaucagcagccagaucgagcuggccgugcugcugagcaacgagggcaucaucaacagcgaggacgagcaccugcuggcccuggagagaaagcugaagaagaugcugggccccagcgccguggacaucggcaacggcugcuucgagaccaagcacaagugcaaccagaccugccuggacagaaucgccgccggcaccuucaacgccggcgaguucagccugcccaccuucgacagccugaacaucaccgccgccagccugaacgacgacggccuggacaaccacaccauccugcuguacuacagcaccgccgccagcagccuggccgugacccugaugcuggccaucuucaucguguacauggugagcagagacaacgugagcugcagcaucugccuguga

SEQ ID NO: 188405 - RNA, 1755 nt, Artificial Sequence; identical to SEQ ID NO: 188349
  derived and/or modified CDS sequence (opt4) from hemagglutinin__InfluenzaB__AIC73905

SEQ ID NO: 188406 - RNA, 1755 nt, Artificial Sequence; identical to SEQ ID NO: 188349
  derived and/or modified CDS sequence (opt4) from hemagglutinin__InfluenzaB__AIC73906

SEQ ID NO: 188407 - RNA, 1755 nt, Artificial Sequence; identical to SEQ ID NO: 188349
  derived and/or modified CDS sequence (opt4) from hemagglutinin__InfluenzaB__AIC73907

SEQ ID NO: 188408 - RNA, 1755 nt, Artificial Sequence; identical to SEQ ID NO: 188349
  derived and/or modified CDS sequence (opt4) from hemagglutinin__InfluenzaB__AIC73908

SEQ ID NO: 188409 - RNA, 1755 nt, Artificial Sequence; identical to SEQ ID NO: 188349
  derived and/or modified CDS sequence (opt4) from hemagglutinin__InfluenzaB__AIC73909

SEQ ID NO: 188410 - RNA, 1755 nt, Artificial Sequence; identical to SEQ ID NO: 188349
  derived and/or modified CDS sequence (opt4) from hemagglutinin__InfluenzaB__AIC73910

SEQ ID NO: 188411 - RNA, 1755 nt, Artificial Sequence; identical to SEQ ID NO: 188349
  derived and/or modified CDS sequence (opt4) from hemagglutinin__InfluenzaB__AIC73911

SEQ ID NO: 188412 - RNA, 1755 nt, Artificial Sequence; identical to SEQ ID NO: 188349
  derived and/or modified CDS sequence (opt4) from hemagglutinin__InfluenzaB__AIC73912

SEQ ID NO: 188413 - RNA, 1755 nt, Artificial Sequence; identical to SEQ ID NO: 188349
  derived and/or modified CDS sequence (opt4) from hemagglutinin__InfluenzaB__AIC73913

SEQ ID NO: 188414 - RNA, 1755 nt, Artificial Sequence; identical to SEQ ID NO: 188349
  derived and/or modified CDS sequence (opt4) from hemagglutinin__InfluenzaB__AIC73914

SEQ ID NO: 188415 - RNA, 1755 nt, Artificial Sequence; identical to SEQ ID NO: 188349
  derived and/or modified CDS sequence (opt4) from hemagglutinin__InfluenzaB__AIC73915

SEQ ID NO: 188416 - RNA, 1755 nt, Artificial Sequence; identical to SEQ ID NO: 188349
  derived and/or modified CDS sequence (opt4) from hemagglutinin__InfluenzaB__AIC73916

SEQ ID NO: 188417 - RNA, 1755 nt, Artificial Sequence; identical to SEQ ID NO: 188349
  derived and/or modified CDS sequence (opt4) from hemagglutinin__InfluenzaB__AIC73917

SEQ ID NO: 188418 - RNA, 1755 nt, Artificial Sequence; identical to SEQ ID NO: 188349
  derived and/or modified CDS sequence (opt4) from hemagglutinin__InfluenzaB__AIC73918

SEQ ID NO: 188419 - RNA, 1755 nt, Artificial Sequence; identical to SEQ ID NO: 188189
  derived and/or modified CDS sequence (opt4) from hemagglutinin__InfluenzaB__AIC73919

SEQ ID NO: 188420 - RNA, 1755 nt, Artificial Sequence; identical to SEQ ID NO: 188349
  derived and/or modified CDS sequence (opt4) from hemagglutinin__InfluenzaB__AIC73920

SEQ ID NO: 188421 - RNA, 1758 nt, Artificial Sequence; identical to SEQ ID NO: 187925
  derived and/or modified CDS sequence (opt4) from hemagglutinin__InfluenzaB__AIC73921

SEQ ID NO: 188422 - RNA, 1755 nt, Artificial Sequence; identical to SEQ ID NO: 188349
  derived and/or modified CDS sequence (opt4) from hemagglutinin__InfluenzaB__AIC73922

SEQ ID NO: 188423 - RNA, 1758 nt, Artificial Sequence; identical to SEQ ID NO: 186947
  derived and/or modified CDS sequence (opt4) from hemagglutinin__InfluenzaB__AIC73924

SEQ ID NO: 188424 - RNA, 1758 nt, Artificial Sequence
  derived and/or modified CDS sequence (opt4) from hemagglutinin__InfluenzaB__AIC73925
augaaggccaccaucgugcugcugaugguggugaccagcaacgccgacagaaucugcaccggcaucaccagcagcaacagcccccacguggugaagaccgccacccagggcgaggugaacgugaccggcgugaucccccugaccaccacccccaccaagagccacuucgccaaccugaagggcaccgagaccagaggcaagcugugccccaagugccugaacugcaccgaccuggacguggcccugggcagacccaagugcaccggcaagauccccagcgccagagugagcauccugcacgaggugagacccgugaccagcggcugcuuccccaucaugcacgacagaaccaagaucagacagcugcccaaccugcugagaggcuacgagcacaucagacugagcacccacaacgugaucaacgccgaggacgcccccggcggccccuacaagaucggcaccagcggcagcugccccaacgugaccaacggcaacggcuucuucgccaccauggccugggccgugcccaagaacgacaagaacaagaccgccaccaacccccugaccaucgaggugcccuacaucugcaccgagggcgaggaccagaucaccguguggggcuuccacagcgacaacgagacccagauggccaagcuguacggcgacagcaagccccagaaguucaccagcagcgccaacggcgugaccacccacuacgugagccagaucggcggcuuccccaaccagaccgaggacggcggccugccccagagcggcagaaucgugguggacuacauggugcagaagagcggcaagaccggcaccaucaccuaccagagaggcauccugcugccccagaagguguggugcgccagcggcagaagcaaggugaucaagggcagccugccccugaucggcgaggccgacugccugcacgagaaguacggcggccugaacaagagcaagcccuacuacaccggcgagcacgccaaggccaucggcaacugccccaucugggugaagaccccccugaagcuggccaacggcaccaaguacagaccccccgccaagcugcugaaggagagaggcuucuucggcgccaucgccggcuuccuggagggcggcugggagggcaugaucgccggcuggcacggcuacaccagccacggcgcccacggcguggccguggccgccgaccugaagagcacccaggaggccaucaacaagaucaccaagaaccugaacagccugagcgagcuggaggugaagaaccugcagagacugagcggcgccauggacgagcugcacaacgagauccuggagcuggacgagaagguggacgaccugagagccgacaccaucagcagccagaucgagcuggccgugcugcugagcaacgagggcaucaucaacagcgaggacgagcaccugcuggcccuggagagaaagcugaagaagaugcugggccccagcgccguggagaucggcaacggcugcuucgagaccaagcacaagugcaaccagaccugccuggacagaaucgccgccggcaccuucgacgccggcgaguucagccugcccaccuucgacagccugaacaucaccgccgccagccugaacgacgacggccuggacaaccacaccauccugcuguacuacagcaccgccgccagcagccuggccgugacccugaugaucgccaucuucgugguguacauggugagcagagacaacgugagcugcagcaucugccuguga

SEQ ID NO: 188425 - RNA, 1755 nt, Artificial Sequence; identical to SEQ ID NO: 188349
  derived and/or modified CDS sequence (opt4) from hemagglutinin__InfluenzaB__AIC73926

SEQ ID NO: 188426 - RNA, 1755 nt, Artificial Sequence; identical to SEQ ID NO: 186627
  derived and/or modified CDS sequence (opt4) from hemagglutinin__InfluenzaB__AIL94977

SEQ ID NO: 188427 - RNA, 1755 nt, Artificial Sequence; identical to SEQ ID NO: 186627
  derived and/or modified CDS sequence (opt4) from hemagglutinin__InfluenzaB__AIL94988

SEQ ID NO: 188428 - RNA, 1755 nt, Artificial Sequence
  derived and/or modified CDS sequence (opt4) from hemagglutinin__InfluenzaB__AIL94999
augaaggccaucaucgugcugcugaugguggugaccagcaacgccgacagaaucugcaccggcaucaccagcagcaacagcccccacguggugaagaccgccacccagggcgaggugaacgugaccggcgugaucccccugaccaccacccccaccaagagcuacuucgccaaccugaagggcaccagaaccagaggcaagcugugccccgacugccugaacugcaccgaccuggacguggcccugggcagacccaugugcgugggcaccacccccagcgccaaggccagcauccugcacgaggugagacccgugaccagcggcugcuuccccaucaugcacgacagaaccaagaucagacagcugcccaaccugcugagaggcuacgagaacaucagacugagcacccagaacgugaucgacgccgagaaggcccccggcggccccuacagacugggcaccagcggcagcugccccaacgccaccagcaagaccggcuucuucgccaccauggccugggccgugcccaaggacaacuacaagaacgccaccaacccccugaccguggaggugcccuacaucugcaccgagggcgaggaccagaucaccguguggggcuuccacagcgacaacaagacccagaugaagaaccuguacggcgacagcaacccccagaaguucaccagcagcgccaacggcgugaccacccacuacgugagccagaucggcgacuuccccgaccagaccgaggacggcggccugccccagagcggcagaaucgugguggacuacaugaugcagaagcccggcaagaccggcaccaucguguaccagagaggcgugcugcugccccagaagguguggugcgccagcggcagaagcaaggugaucaagggcagccugccccugaucggcgaggccgacugccugcacgagaaguacggcggccugaacaagagcaagcccuacuacaccggcgagcacgccaaggccaucggcaacugccccaucugggugaagaccccccugaagcuggccaacggcaccaaguacagaccccccgccaagcugcugaaggagagaggcuucuucggcgccaucgccggcuuccuggagggcggcugggagggcaugaucgccggcuggcacggcuacaccagccacggcgcccacggcguggccguggccgccgaccugaagagcacccaggaggccaucaacaagaucaccaagaaccugaacagccugagcgagcuggaggugaagaaccugcagagacugagcggcgccauggacgagcugcacaacgagauccuggagcuggacgagaagguggacgaccugagagccgacaccaucagcagccagaucgagcuggccgugcugcugagcaacgagggcaucaucaacagcgaggacgagcaccugcuggcccuggagagaaagcugaagaagaugcugggccccagcgccguggacaucggcaacggcugcuucgagaccaagcacaagugcaaccagaccugccuggacagaaucgccgccggcaccuucaacgccggcgaguucagccugcccaccuucgacagccugaacaucaccgccgccagccugaacgacgacggccuggacaaccacaccauccugcuguacuacagcaccgccgccagcagccuggccgugacccugaugcuggccaucuucaucguguacauggugagcagagacaacgugagcugcagcaucugccuguga

SEQ ID NO: 188429 - RNA, 1755 nt, Artificial Sequence; identical to SEQ ID NO: 186627
  derived and/or modified CDS sequence (opt4) from hemagglutinin__InfluenzaB__AIL95010

SEQ ID NO: 188430 - RNA, 1755 nt, Artificial Sequence; identical to SEQ ID NO: 186880
  derived and/or modified CDS sequence (opt4) from hemagglutinin__InfluenzaB__AIL95021

SEQ ID NO: 188431 - RNA, 1758 nt, Artificial Sequence; identical to SEQ ID NO: 186708
  derived and/or modified CDS sequence (opt4) from hemagglutinin__InfluenzaB__AIL95032

SEQ ID NO: 188432 - RNA, 1755 nt, Artificial Sequence; identical to SEQ ID NO: 186880
  derived and/or modified CDS sequence (opt4) from hemagglutinin__InfluenzaB__AIL95043

SEQ ID NO: 188433 - RNA, 1758 nt, Artificial Sequence; identical to SEQ ID NO: 186754
  derived and/or modified CDS sequence (opt4) from hemagglutinin__InfluenzaB__AIL95054

SEQ ID NO: 188434 - RNA, 1758 nt, Artificial Sequence; identical to SEQ ID NO: 186708
  derived and/or modified CDS sequence (opt4) from hemagglutinin__InfluenzaB__AIL95065

SEQ ID NO: 188435 - RNA, 1758 nt, Artificial Sequence; identical to SEQ ID NO: 186705
  derived and/or modified CDS sequence (opt4) from hemagglutinin__InfluenzaB__AIL95076

SEQ ID NO: 188436 - RNA, 1758 nt, Artificial Sequence; identical to SEQ ID NO: 186708
  derived and/or modified CDS sequence (opt4) from hemagglutinin__InfluenzaB__AIL95087

SEQ ID NO: 188437 - RNA, 1755 nt, Artificial Sequence; identical to SEQ ID NO: 186880
  derived and/or modified CDS sequence (opt4) from hemagglutinin__InfluenzaB__AIL95098

SEQ ID NO: 188438 - RNA, 1758 nt, Artificial Sequence; identical to SEQ ID NO: 188219
  derived and/or modified CDS sequence (opt4) from hemagglutinin__InfluenzaB__AIL95109

SEQ ID NO: 188439 - RNA, 1758 nt, Artificial Sequence
  derived and/or modified CDS sequence (opt4) from hemagglutinin__InfluenzaB__AIL95120
augaaggccaucaucgugcugcugaugguggugaccagcaacgccgacagaaucugcaccggcaucaccagcagcaacagcccccacguggugaagaccgccacccagggcgaggugaacgugaccggcgugaucccccugaccaccacccccaccaagagccacuucgccaaccugaagggcaccgagaccagaggcaagcugugccccaagugccugaacugcaccgaccuggacguggcccugggcagacccaagugcaccggcaagauccccagcgccagagugagcauccugcacgaggugagacccgugaccagcggcugcuuccccaucaugcacgacagaaccaagaucagacagcugcccaaccugcugagaggcuacgagcacaucagacugagcacccacaacgugaucaacgccgagaacgcccccggcggccccuacaagaucggcaccagcggcagcugccccaacgugaccaacggcaacggcuucuucgccaccauggccugggccgugcccaagaacgacaagaacaagaccgccaccaacccccugaccaucgaggugcccuacaucugcaccgagggcgaggaccagaucaccguguggggcuuccacagcgacaacgagacccagauggccaagcuguacggcgacagcaagccccagaaguucaccagcagcgccaacggcgugaccacccacuacgugagccagaucggcggcuuccccaaccagaccgaggacggcggccugccccagagcggcagaaucgugguggacuacauggugcagaagagcggcaagaccggcaccaucaccuaccagagaggcauccugcugccccagaagguguggugcgccagcggcagaagcaaggugaucaagggcagccugccccugaucggcgaggccgacugccugcacgagaaguacggcggccugaacaagagcaagcccuacuacaccggcgagcacgccaaggccaucggcaacugccccaucugggugaagaccccccugaagcuggccaacggcaccaaguacagaccccccgccaagcugcugaaggagagaggcuucuucggcgccaucgccggcuuccuggagggcggcugggagggcaugaucgccggcuggcacggcuacaccagccacggcgcccacggcguggccguggccgccgaccugaagagcacccaggaggccaucaacaagaucaccaagaaccugaacagccugagcgagcuggaggugaagaaccugcagagacugagcggcgccauggacgagcugcacaacgagauccuggagcuggacgagaagguggacgaccugagagccgacaccaucagcagccagaucgagcuggccgugcugcugagcaacgagggcaucaucaacagcgaggacgagcaccugcuggcccuggagagaaagcugaagaagaugcugggccccagcgccguggagaucggcaacggcugcuucgagaccaagcacaagugcaaccagaccugccuggacaagaucgccgccggcaccuucgacgccggcgaguucagccugcccaccuucgacagccugaacaucaccgccgccagccugaacgacgacggccuggacaaccacaccauccugcuguacuacagcaccgccgccagcagccuggccgugacccugaugaucgccaucuucgugguguacauggugagcagagacaacgugagcugcagcaucugccuguga

SEQ ID NO: 188440 - RNA, 1755 nt, Artificial Sequence; identical to SEQ ID NO: 188349
  derived and/or modified CDS sequence (opt4) from hemagglutinin__InfluenzaB__AKA54644

SEQ ID NO: 188441 - RNA, 1755 nt, Artificial Sequence
  derived and/or modified CDS sequence (opt4) from hemagglutinin__InfluenzaB__AKA54645
augaaggccaucaccgugcugcugaugguggugaccagcaacgccgacagaaucugcaccggcaucaccagcagcaacagcccccacguggugaagaccgccacccagggcgaggugaacgugaccggcgugaucccccugaccaccacccccaccaagagcuacuucgccaaccugaagggcaccagaaccagaggcaagcugugccccgacugccugaacugcaccgaccuggacguggcccugggcagacccaugugcgugggcaccacccccagcgccaaggccagcauccugcacgaggugagacccgugaccagcggcugcuuccccaucaugcacgacagaaccaagaucagacagcugcccaaccugcugagaggcuacgagaagaucagacugagcacccagaacgugaucgacgccgagaaggcccccggcggccccuacagacugggcaccagcggcagcugccccaacgccaccagcaagaucggcuucuucgccaccauggccugggccgugcccaaggacaacuacaagaacgccaccaacccccugaccguggaggugcccuacaucugcaccgagggcgaggaccagaucaccguguggggcuuccacagcgacaacaagacccagaugaagagccuguacggcgacagcaacccccagaaguucaccagcagcgccgacggcgugaccacccacuacgugagccagaucggcgacuuccccgaccagaccgaggacggcggccugccccagagcggcagaaucgugguggacuacaugaugcagaagcccggcaagaccggcaccaucguguaccagagaggcgugcugcugccccagaagguguggugcgccagcggcagaagcaaggugaucaagggcagccugccccugaucggcgaggccgacugccugcacgaggaguacggcggccugaacaagagcaagcccuacuacaccggcaagcacgccaaggccaucggcaacugccccaucugggugaagaccccccugaagcuggccaacggcaccaaguacagaccccccgccaagcugcugaaggagagaggcuucuucggcgccaucgccggcuuccuggagggcggcugggagggcaugaucgccggcuggcacggcuacaccagccacggcgcccacggcguggccguggccgccgaccugaagagcacccaggaggccaucaacaagaucaccaagaaccugaacagccugagcgagcuggaggugaagaaccugcagagacugagcggcgccauggacgagcugcacaacgagauccuggagcuggacgagaagguggacgaccugagagccgacaccaucagcagccagaucgagcuggccgugcugcugagcaacgagggcaucaucaacagcgaggacgagcaccugcuggcccuggagagaaagcugaagaagaugcugggccccagcgccguggacaucggcaacggcugcuucgagaccaagcacaagugcaaccagaccugccuggacagaaucgccgccggcaccuucaacgccggcgaguucagccugcccaccuucgacagccugaacaucaccgccgccagccugaacgacgacggccuggacaaccacaccauccugcuguacuacagcaccgccgccagcagccuggccgugacccugaugcuggccaucuucaucguguacauggugagcagagacaacgugagcugcagcaucugccuguga

SEQ ID NO: 188442 - RNA, 1755 nt, Artificial Sequence; identical to SEQ ID NO: 188349
  derived and/or modified CDS sequence (opt4) from hemagglutinin__InfluenzaB__AKA54646

SEQ ID NO: 188443 - RNA, 1755 nt, Artificial Sequence; identical to SEQ ID NO: 188349
  derived and/or modified CDS sequence (opt4) from hemagglutinin__InfluenzaB__AKA54647

SEQ ID NO: 188444 - RNA, 1758 nt, Artificial Sequence; identical to SEQ ID NO: 186947
  derived and/or modified CDS sequence (opt4) from hemagglutinin__InfluenzaB__AKA54648

SEQ ID NO: 188445 - RNA, 1755 nt, Artificial Sequence
  derived and/or modified CDS sequence (opt4) from hemagglutinin__InfluenzaB__AKA54649
augaaggccaucaucgugcugcugaugguggugaccagcaacgccgacagaaucugcaccggcaucaccagcagcaacagcccccacguggugaagaccgccacccagggcgaggugaacgugaccggcgugaucccccugaccaccacccccaccaagagcuacuucgccaaccugaagggcaccagaaccagaggcaagcugugccccgacugccugaacugcaccgaccuggacguggcccugggcagacccaugugcgugggcaccacccccagcgccaaggccagcauccugcacgaggugagacccgugaccagcggcugcuuccccaucaugcacgacagaaccaagaucagacagcugcccaaccugcugagaggcuacgagaagaucagacugagcacccagaacgugaucgacgccgagaaggcccccggcggccccuacagacugggcaccagcggcagcugccccaacaccaccagcaagaucggcuucuucgccaccauggccugggccgugcccaaggacaacuacaagaacgccaccaacccccugaccguggaggugcccuacaucugcaccgagggcgaggaccagaucaccguguggggcuuccacagcgacaacaagacccagaugaagagccuguacggcgacagcaacccccagaaguucaccagcagcgccaacggcgugaccacccacuacgugagccagaucggcgacuuccccgaccagaccgaggacggcggccugccccagagcggcagaaucgugguggacuacaugaugcagaagcccggcaagaccggcaccaucguguaccagagaggcgugcugcugccccagaagguguggugcgccagcggcagaagcaaggugaucaagggcagccugccccugaucggcgaggccgacugccugcacgaggaguacggcggccugaacaagagcaagcccuacuacaccggcaagcacgccaaggccaucggcaacugccccaucugggugaagaccccccugaagcuggccaacggcaccaaguacagaccccccgccaagcugcugaaggagagaggcuucuucggcgccaucgccggcuuccuggagggcggcugggagggcaugaucgccggcuggcacggcuacaccagccacggcgcccacggcguggccguggccgccgaccugaagagcacccaggaggccaucaacaagaucaccaagaaccugaacagccugagcgagcuggaggugaagaaccugcagagacugagcggcgccauggacgagcugcacaacgagauccuggagcuggacgagaagguggacgaccugagagccgacaccaucagcagccagaucgagcuggccgugcugcugagcaacgagggcaucaucaacagcgaggacgagcaccugcuggcccuggagagaaagcugaagaagaugcugggccccagcgccguggacaucggcaacggcugcuucgagaccaagcacaagugcaaccagaccugccuggacagaaucgccgccggcaccuucaacgccggcgaguucagccugcccaccuucgacagccugaacaucaccgccgccagccugaacgacgacggccuggacaaccacaccauccugcuguacuacagcaccgccgccagcagccuggccgugacccugaugcuggccaucuucaucguguacauggugagcagagacaacgugagcugcagcaucugccuguga

SEQ ID NO: 188446 - RNA, 1755 nt, Artificial Sequence; identical to SEQ ID NO: 188349
  derived and/or modified CDS sequence (opt4) from hemagglutinin__InfluenzaB__AKU40581

SEQ ID NO: 188447 - RNA, 1755 nt, Artificial Sequence; identical to SEQ ID NO: 188349
  derived and/or modified CDS sequence (opt4) from hemagglutinin__InfluenzaB__AKU40592

SEQ ID NO: 188448 - RNA, 1755 nt, Artificial Sequence; identical to SEQ ID NO: 188189
  derived and/or modified CDS sequence (opt4) from hemagglutinin__InfluenzaB__AKU40603

SEQ ID NO: 188449 - RNA, 1755 nt, Artificial Sequence; identical to SEQ ID NO: 188349
  derived and/or modified CDS sequence (opt4) from hemagglutinin__InfluenzaB__AKU40614

SEQ ID NO: 188450 - RNA, 1755 nt, Artificial Sequence; identical to SEQ ID NO: 188189
  derived and/or modified CDS sequence (opt4) from hemagglutinin__InfluenzaB__AKU40625

SEQ ID NO: 188451 - RNA, 1755 nt, Artificial Sequence
  derived and/or modified CDS sequence (opt4) from hemagglutinin__InfluenzaB__AKU40636
augaaggccaucaucgugcugcugaugguggugaccagcaacgccgacagaaucugcaccggcaucaccagcagcaacagcccccacguggugaagaccgccacccagggcgaggugaacgugaccggcgugaucccccugaccaccacccccgccaagagcuacuucgccaaccugaagggcaccagaaccagaggcaagcugugccccgacugccugaacugcaccgaccuggacguggcccugggcagacccaugugcgugggcaccacccccagcgccaaggccagcauccugcacgaggugagacccgugaccagcggcugcuuccccaucaugcacgacagaaccaagaucagacagcugcccaaccugcugagaggcuacgagaacaucagacugagcaccaagaacgugaucgacgccgagaaggcccccggcggccccuacagacugggcaccagcggcagcugccccaacgccaccagcaagaucggcuucuucgccaccauggccugggccgugcccaaggacaacuacaagaacgccaccaacccccugaccguggaggugcccuacaucugcaaggagggcgaggaccagaucaccguguggggcuuccacagcgacaacaagacccagaugaagaaccuguacggcgacagcaacccccagaaguucaccagcagcgccaacggcgugaccacccacuacgugagccagaucggcgacuuccccgaccagaccgaggacggcggccugccccagagcggcagaaucgugguggacuacaugaugcagaagcccggcaagaccggcaccaucguguaccagagaggcgugcugcugccccagaagguguggugcgccagcggcagaagcaaggugaucaagggcagccugccccugaucggcgaggccgacugccugcacgaggaguacggcggccugaacaagagcaagcccuacuacaccggcaagcacgccaaggccaucggcaacugccccaucugggugaagaccccccugaagcuggccaacggcaccaaguacagaccccccgccaagcugcugaaggagagaggcuucuucggcgccaucgccggcuuccuggagggcggcugggagggcaugaucgccggcuggcacggcuacaccagccacggcgcccacggcguggccguggccgccgaccugaagagcacccaggaggccaucaacaagaucaccaagaaccugaacagccugagcgagcuggaggugaagaaccugcagagacugagcggcgccauggacgagcugcacaacgagauccuggagcuggacgagaagguggacgaccugagagccgacaccaucagcagccagaucgagcuggccgugcugcugagcaacgagggcaucaucaacagcgaggacgagcaccugcuggcccuggagagaaagcugaagaagaugcugggccccagcgccguggacaucggcaacggcugcuucgagaccaagcacaagugcaaccagaccugccuggacagaaucgccgccggcaccuucaacgccggcgaguucagccugcccaccuucgacagccugaacaucaccgccgccagccugaacgacgacggccuggacaaccacaccauccugcuguacuacagcaccgccgccagcagccuggccgugacccugaugcuggccaucuucaucguguacauggugagcagagacaacgugagcugcagcaucugccuguga

SEQ ID NO: 188452 - RNA, 1755 nt, Artificial Sequence
  derived and/or modified CDS sequence (opt4) from hemagglutinin__InfluenzaB__AKU40647
augaaggccaucaucgugcugcugaugguggugaccagcaacgccgacagaaucugcaccggcaucaccagcagcaacagcccccacguggugaagaccgccacccagggcgaggugaacgugaccggcgugaucccccugaccaccacccccaccaagagcuacuucgccaaccugaagggcaccagaaccagaggcaagcugugccccgacugccugaacugcaccgaccuggacguggcccugggcagacccaugugcgugggcaccacccccagcgccaaggccagcauccugcacgaggugagacccgugaccagcggcugcuuccccaucaugcacgacagaaccaagaucagacagcugcccaaccugcugagaggcuacgagaagaucagacugagcacccagaacgugaucgacgccgagaaggcccccggcggccccuacagacugggcaccagcggcagcugccccaacgccaccagcaagaucggcuucuucgccaccauggccugggccgugcccaaggacaacuacaagaacgccaccaacccccagaccguggagauccccuacaucugcaccgagggcgaggaccagaucaccguguggggcuuccacagcgacaacaagacccagaugaagagccuguacggcgacagcaacccccagaaguucaccagcagcgccaacggcgugaccacccacuacgugagccagaucggcgacuuccccgaccagaccgaggacggcggccugccccagagcggcagaaucgugguggacuacaugaugcagaagcccggcaagaccggcaccaucguguaccagagaggcgugcugcugccccagaagguguggugcgccagcggcagaagcaaggugaucaagggcagccugccccugaucggcgaggccgacugccugcacgaggaguacggcggccugaacaagagcaagcccuacuacaccggcaagcacgccaaggccaucggcaacugccccaucugggugaagaccccccugaagcuggccaacggcaccaaguacagaccccccgccaagcugcugaaggagagaggcuucuucggcgccaucgccggcuuccuggagggcggcugggagggcaugaucgccggcuggcacggcuacaccagccacggcgcccacggcguggccguggccgccgaccugaagagcacccaggaggccaucaacaagaucaccaagaaccugaacagccugagcgagcuggaggugaagaaccugcagagacugagcggcgccauggacgagcugcacaacgagauccuggagcuggacgagaagguggacgaccugagagccgacaccaucagcagccagaucgagcuggccgugcugcugagcaacgagggcaucaucaacagcgaggacgagcaccugcuggcccuggagagaaagcugaagaagaugcugggccccagcgccguggacaucggcaacggcugcuucgagaccaagcacaagugcaaccagaccugccuggacagaaucgccgccggcaccuucaacgccggcgaguucagccugcccaccuucgacagccugaacaucaccgccgccagccugaacgacgacggccuggacaaccacaccauccugcuguacuacagcaccgccgccagcagccuggccgugacccugaugcuggccaucuucaucguguacauggugagcagagacaacgugagcugcagcaucugccuguga

SEQ ID NO: 188453 - RNA, 1755 nt, Artificial Sequence; identical to SEQ ID NO: 188349
  derived and/or modified CDS sequence (opt4) from hemagglutinin__InfluenzaB__AKU40658

SEQ ID NO: 188454 - RNA, 1755 nt, Artificial Sequence; identical to SEQ ID NO: 188349
  derived and/or modified CDS sequence (opt4) from hemagglutinin__InfluenzaB__AKU40669

SEQ ID NO: 188455 - RNA, 1755 nt, Artificial Sequence; identical to SEQ ID NO: 188349
  derived and/or modified CDS sequence (opt4) from hemagglutinin__InfluenzaB__AKU40680

SEQ ID NO: 188456 - RNA, 1755 nt, Artificial Sequence
  derived and/or modified CDS sequence (opt4) from hemagglutinin__InfluenzaB__AKU40691
augaaggccaucaucgugcugcugaugguggugaccagcaacgccgacagaaucugcaccggcaucaccagcagcaacagcccccacguggugaagaccgccacccagggcgaggugaacgugaccggcgugaucccccugaccaccacccccaccaagagcuacuucgccaaccugaagggcaccagaaccagaggcaagcugugccccgacugccugaacugcaccgaccuggacguggcccugggcagacccaugugcgugggcaccacccccagcgccaaggccagcauccugcacgaggugagacccgugaccagcggcugcuuccccaucaugcacgacagaaccaagaucagacagcugcccaaccugcugagaggcuacgagaagaucagacugagcacccagaacgugaucgacgccgagaaggcccccggcggccccuacagacugggcaccagcggcagcugccccaacgccaccagcaagaucggcuucuucgccaccauggccugggccgugcccaaggacaacuacaagaacgccaccaacccccagaccguggaggugcccuacaucugcaccgagggcgaggaccagaucaccguguggggcuuccacagcgacaacaagacccagaugaagagccuguacggcgacagcaacccccagaaguucaccagcagcgccaacggcgugaccacccacuacgugagccagaucggcgacuuccccgaccagaccgaggacggcggccugccccagagcggcagaaucgugguggacuacaugaugcagaagcccggcaagaccggcaccaucguguaccagagaggcgugcugcugccccagaagguguggugcgccagcggcagaagcaaggugaucaagggcagccugccccugaucggcgaggccgacugccugcacgaggaguacggcggccugaacaagagcaagcccuacuacaccggcaagcacgccaaggccaucggcaacugccccaucugggugaagaccccccugaagcuggccaacggcaccaaguacagaccccccgccaagcugcugaaggagagaggcuucuucggcgccaucgccggcuuccuggagggcggcugggagggcaugaucgccggcuggcacggcuacaccagccacggcgcccacggcguggccguggccgccgaccugaagagcacccaggaggccaucaacaagaucaccaagaaccugaacagccugagcgagcuggaggugaagaaccugcagagacugagcggcgccauggacgaguuccacaacgagauccuggagcuggacgagaagguggacgaccugagagccgacaccaucagcagccagaucgagcuggccgugcugcugagcaacgagggcaucaucaacagcgaggacgagcaccugcuggcccuggagagaaagcugaagaagaugcugggccccagcgccguggacaucggcaacggcugcuucgagaccaagcacaagugcaaccagaccugccuggacagaaucgccgccggcaccuucaacgccggcgaguucagccugcccaccuucgacagccugaacaucaccgccgccagccugaacgacgacggccuggacaaccacaccauccugcuguacuacagcaccgccgccagcagccuggccgugacccugaugcuggccaucuucaucguguacauggugagcagagacaacgugagcugcagcaucugccuguga

SEQ ID NO: 188457 - RNA, 1755 nt, Artificial Sequence; identical to SEQ ID NO: 188349
  derived and/or modified CDS sequence (opt4) from hemagglutinin__InfluenzaB__AKU40702

SEQ ID NO: 188458 - RNA, 1755 nt, Artificial Sequence; identical to SEQ ID NO: 188349
  derived and/or modified CDS sequence (opt4) from hemagglutinin__InfluenzaB__AKU40713

SEQ ID NO: 188459 - RNA, 1755 nt, Artificial Sequence; identical to SEQ ID NO: 188189
  derived and/or modified CDS sequence (opt4) from hemagglutinin__InfluenzaB__AKU40724

SEQ ID NO: 188460 - RNA, 1755 nt, Artificial Sequence; identical to SEQ ID NO: 188452
  derived and/or modified CDS sequence (opt4) from hemagglutinin__InfluenzaB__AKU40735

SEQ ID NO: 188461 - RNA, 1755 nt, Artificial Sequence; identical to SEQ ID NO: 188349
  derived and/or modified CDS sequence (opt4) from hemagglutinin__InfluenzaB__AKU40746

SEQ ID NO: 188462 - RNA, 1755 nt, Artificial Sequence; identical to SEQ ID NO: 188349
  derived and/or modified CDS sequence (opt4) from hemagglutinin__InfluenzaB__AKU40757

SEQ ID NO: 188463 - RNA, 1755 nt, Artificial Sequence; identical to SEQ ID NO: 188349
  derived and/or modified CDS sequence (opt4) from hemagglutinin__InfluenzaB__AKU40768

SEQ ID NO: 188464 - RNA, 1755 nt, Artificial Sequence; identical to SEQ ID NO: 188349
  derived and/or modified CDS sequence (opt4) from hemagglutinin__InfluenzaB__AKU40779

SEQ ID NO: 188465 - RNA, 1755 nt, Artificial Sequence; identical to SEQ ID NO: 188189
  derived and/or modified CDS sequence (opt4) from hemagglutinin__InfluenzaB__AKU40790

SEQ ID NO: 188466 - RNA, 1755 nt, Artificial Sequence; identical to SEQ ID NO: 188349
  derived and/or modified CDS sequence (opt4) from hemagglutinin__InfluenzaB__AKU40801

SEQ ID NO: 188467 - RNA, 1755 nt, Artificial Sequence
  derived and/or modified CDS sequence (opt4) from hemagglutinin__InfluenzaB__AKU40812
augaaggccaucaucgugcugcugaugguggugaccagcaacgccgacagaaucugcaccggcaucaccagcagcaacagcccccacguggugaagaccgccacccagggcgaggugaacgugaccggcgugaucccccugaccaccacccccaccaagagcuacuucgccaaccugaagggcaccagaaccagaggcaagcugugccccgacugccugaacugcaccgaccuggacguggcccugggcagacccaugugcgugggcaccacccccagcgccaaggccagcauccugcacgaggugagacccgugaccagcggcugcuuccccaucaugcacgacagaaccaagaucagacagcugcccaaccugcugagaggcuacgagaagaucagacugagcacccagaacgugaucgacgccgagaaggcccccggcggccccuacagacugggcaccagcggcagcugccccaacgccaccagcaagaucggcuucuucgccaccauggccugggccgugcccaaggacaacuacaagaacgccaccaacccccagaccguggaggugcccuacaucugcaccgagggcgaggaccagaucaccguguggggcuuccacagcgacaacaagacccagaugaagagccuguacggcgacagcaacccccagaaguucaccagcagcgccaacggcgugaccacccacuacgugagccagaucggcgacuuccccgaccagaccgaggacggcggccugccccagagcggcagaaucgugguggacuacaugaugcagaagcccggcaagaccggcaccaucguguaccagagaggcgugcugcugccccagaagguguggugcgccagcggcagaagcaaggugaucaagggcagccugccccugaucggcgaggccgacugccugcacgaggaguacggcggccugaacaagagcaagcccuacuacaccggcaagcacgccaaggccaucggcaacugccccaucugggugaagaccccccugaagcuggccaacggcaccaaguacagaccccccgccaagcugcugaaggagagaggcuucuucggcgccaucgccggcuuccuggagggcggcugggagggcaugaucgccggcuggcacggcuacaccagccacggcgcccacggcguggccguggccgccgaccugaagagcacccaggaggccaucaacaagaucaccaagaaccugaacagccugagcgagcuggaggugaagaaccugcagagacugagcggcgccauggacgagcugcacaacgagauccuggagcuggacgagaagguggacgaccugagagccgacaccaucagcagccagaucgagcuggccgugcugcugagcaacgagggcaucaucaacagcgaggacgagcaccugcuggcccuggagagaaagcugaagaagaugcugggccccagcgccguggacaucggcaacggcugcuucgagaccaagcacaagugcaaccagaccugccuggacagaaucgccgccggcaccuucaacgccggcgaguucagccugcccaccuucgacagccugaacaucaccgccgccagccugaacgacgacggccuggacagccacaccauccugcuguacuacagcaccgccgccagcagccuggccgugacccugaugcuggccaucuucaucguguacauggugagcagagacaacgugagcugcagcaucugccuguga

SEQ ID NO: 188468 - RNA, 1755 nt, Artificial Sequence; identical to SEQ ID NO: 188349
  derived and/or modified CDS sequence (opt4) from hemagglutinin__InfluenzaB__AKU40823

SEQ ID NO: 188469 - RNA, 1755 nt, Artificial Sequence; identical to SEQ ID NO: 188349
  derived and/or modified CDS sequence (opt4) from hemagglutinin__InfluenzaB__AKU40834

SEQ ID NO: 188470 - RNA, 1755 nt, Artificial Sequence; identical to SEQ ID NO: 188349
  derived and/or modified CDS sequence (opt4) from hemagglutinin__InfluenzaB__AKU40845

SEQ ID NO: 188471 - RNA, 1755 nt, Artificial Sequence; identical to SEQ ID NO: 188349
  derived and/or modified CDS sequence (opt4) from hemagglutinin__InfluenzaB__AKU40856

SEQ ID NO: 188472 - RNA, 1755 nt, Artificial Sequence; identical to SEQ ID NO: 188349
  derived and/or modified CDS sequence (opt4) from hemagglutinin__InfluenzaB__AKU40867

SEQ ID NO: 188473 - RNA, 1755 nt, Artificial Sequence; identical to SEQ ID NO: 188349
  derived and/or modified CDS sequence (opt4) from hemagglutinin__InfluenzaB__AKU40878

SEQ ID NO: 188474 - RNA, 1758 nt, Artificial Sequence
  derived and/or modified CDS sequence (opt4) from hemagglutinin__InfluenzaB__AKU40889
augaaggccaucaucgugcugcugaugguggugaccagcaacgccgacagaaucugcaccggcaucaccagcagcaacagcccccacguggugaagaccgccacccagggcgaggugaacgugaccggcgugaucccccugaccaccacccccaccaagagccacuucgccaaccugaagggcaccgagaccagaggcaagcugugccccaagugccugaacugcaccgaccuggacguggcccugggcagacccaagugcaccggcaagauccccagcgccagagugagcauccugcacgaggugagacccgugaccagcggcugcuuccccaucaugcacgacagaaccaagaucagacagcugcccaaccugcugagaggcuacgagcacaucagacugagcacccacaacgugaucaacgccgaggacgcccccggcggccccuacaagaucggcaccagcggcagcugccccaacgugaccaacggcaacggcuucuucgccaccauggccugggccgugcccaagaacgacaagaacaagaccgccaccaacccccugaccaccgaggugcccuacaucugcaccgagggcgaggaccagaucaccguguggggcuuccacagcgacaacgagacccagauggccaagcuguacggcgacagcaagccccagaaguucaccagcagcgccaacggcgugaccacccacuacgugagccagaucggcggcuuccccaaccagaccgaggacggcggccugccccagagcggcagaaucgugguggacuacauggugcagaagagcggcaagaccggcaccaucaccuaccagagaggcauccugcugccccagaagguguggugcgccagcggcagaagcaaggugaucaagggcagccugccccugaucggcgaggccgacugccugcacgagaaguacggcggccugaacaagagcaagcccuacuacaccggcgagcacgccaaggccaucggcaacugccccaucugggugaagaccccccugaagcuggccaacggcaccaaguacagaccccccgccaagcugcugaaggagagaggcuucuucggcgccaucgccggcuuccuggagggcggcugggagggcaugaucgccggcuggcacggcuacaccagccacggcgcccacggcguggccguggccgccgaccugaagagcacccaggaggccaucaacaagaucaccaagaaccugaacagccugagcgagcuggaggugaagaaccugcagagacugagcggcgccauggacgagcugcacaacgagauccuggagcuggacgagaagguggacgaccugagagccgacaccaucagcagccagaucgagcuggccgugcugcugagcaacgagggcaucaucaacagcgaggacgagcaccugcuggcccuggagagaaagcugaagaagaugcugggccccagcgccguggagaucggcaacggcugcuucgagaccaagcacaagugcaaccagaccugccuggacagaaucgccgccggcaccuucgacgccggcgaguucagccugcccaccuucgacagccugaacaucaccgccgccagccugaacgacgacggccuggacaaccacaccauccugcuguacuacagcaccgccgccagcagccuggccgugacccugaugaucgccaucuucgugguguacauggugagcagagacaacgugagcugcagcaucugccuguga

SEQ ID NO: 188475 - RNA, 1755 nt, Artificial Sequence; identical to SEQ ID NO: 188349
  derived and/or modified CDS sequence (opt4) from hemagglutinin__InfluenzaB__AKU40900

SEQ ID NO: 188476 - RNA, 1755 nt, Artificial Sequence; identical to SEQ ID NO: 188189
  derived and/or modified CDS sequence (opt4) from hemagglutinin__InfluenzaB__AKU40911

SEQ ID NO: 188477 - RNA, 1755 nt, Artificial Sequence
  derived and/or modified CDS sequence (opt4) from hemagglutinin__InfluenzaB__AKU40922
augaaggccaucaucgugcugcugaugguggugaccagcaacgccgacagaaucugcaccggcaucaccagcagcaacagcccccacguggugaagaccgugacccagggcgaggugaacgugaccggcgugaucccccugaccaccacccccaccaagagcuacuucgccaaccugaagggcaccagaaccagaggcaagcugugccccgacugccugaacugcaccgaccuggacguggcccugggcagacccaugugcgugggcaccacccccagcgccaaggccagcauccugcacgaggugagacccgugaccagcggcugcuuccccaucaugcacgacagaaccaagaucagacagcugcccaaccugcugagaggcuacgagaagaucagacugagcacccagaacgugaucgacgccgagaaggcccccggcggccccuacagacugggcaccagcggcagcugccccaacgccaccagcaagaucggcuucuucgccaccauggccugggccgugcccaaggacaacuacaagaacgccaccaacccccagaccguggaggugcccuacaucugcaccgagggcgaggaccagaucaccguguggggcuuccacagcgacaacaagacccagaugaagagccuguacggcgacagcaacccccagaaguucaccagcagcgccaacggcgugaccacccacuacgugagccagaucggcgacuuccccgaccagaccgaggacggcggccugccccagagcggcagaaucgugguggacuacaugaugcagaagcccggcaagaccggcaccaucguguaccagagaggcgugcugcugccccagaagguguggugcgccagcggcagaagcaaggugaucaagggcagccugccccugaucggcgaggccgacugccugcacgaggaguacggcggccugaacaagagcaagcccuacuacaccggcaagcacgccaaggccaucggcaacugccccaucugggugaagaccccccugaagcuggccaacggcaccaaguacagaccccccgccaagcugcugaaggagagaggcuucuucggcgccaucgccggcuuccuggagggcggcugggagggcaugaucgccggcuggcacggcuacaccagccacggcgcccacggcguggccguggccgccgaccugaagagcacccaggaggccaucaacaagaucaccaagaaccugaacagccugagcgagcuggaggugaagaaccugcagagacugagcggcgccauggacgagcugcacaacgagauccuggagcuggacgagaagguggacgaccugagagccgacaccaucagcagccagaucgagcuggccgugcugcugagcaacgagggcaucaucaacagcgaggacgagcaccugcuggcccuggagagaaagcugaagaagaugcugggccccagcgccguggacaucggcaacggcugcuucgagaccaagcacaagugcaaccagaccugccuggacagaaucgccgccggcaccuucaacgccggcgaguucagccugcccaccuucgacagccugaacaucaccgccgccagccugaacgacgacggccuggacaaccacaccauccugcuguacuacagcaccgccgccagcagccuggccgugacccugaugcuggccaucuucaucguguacauggugagcagagacaacgugagcugcagcaucugccuguga

SEQ ID NO: 188478 - RNA, 1755 nt, Artificial Sequence; identical to SEQ ID NO: 188452
  derived and/or modified CDS sequence (opt4) from hemagglutinin__InfluenzaB__AKU40933

SEQ ID NO: 188479 - RNA, 1755 nt, Artificial Sequence; identical to SEQ ID NO: 188349
  derived and/or modified CDS sequence (opt4) from hemagglutinin__InfluenzaB__AKU40944

SEQ ID NO: 188480 - RNA, 1755 nt, Artificial Sequence; identical to SEQ ID NO: 188349
  derived and/or modified CDS sequence (opt4) from hemagglutinin__InfluenzaB__AKU40955

SEQ ID NO: 188481 - RNA, 1755 nt, Artificial Sequence; identical to SEQ ID NO: 188349
  derived and/or modified CDS sequence (opt4) from hemagglutinin__InfluenzaB__AKU40966

SEQ ID NO: 188482 - RNA, 1755 nt, Artificial Sequence; identical to SEQ ID NO: 188349
  derived and/or modified CDS sequence (opt4) from hemagglutinin__InfluenzaB__AKU40977

SEQ ID NO: 188483 - RNA, 1755 nt, Artificial Sequence; identical to SEQ ID NO: 188349
  derived and/or modified CDS sequence (opt4) from hemagglutinin__InfluenzaB__AKU40987

SEQ ID NO: 188484 - RNA, 1755 nt, Artificial Sequence; identical to SEQ ID NO: 188349
  derived and/or modified CDS sequence (opt4) from hemagglutinin__InfluenzaB__AKU40998

SEQ ID NO: 188485 - RNA, 1755 nt, Artificial Sequence; identical to SEQ ID NO: 188349
  derived and/or modified CDS sequence (opt4) from hemagglutinin__InfluenzaB__AKU41009

SEQ ID NO: 188486 - RNA, 1755 nt, Artificial Sequence; identical to SEQ ID NO: 188349
  derived and/or modified CDS sequence (opt4) from hemagglutinin__InfluenzaB__AKU41020

SEQ ID NO: 188487 - RNA, 1755 nt, Artificial Sequence; identical to SEQ ID NO: 188349
  derived and/or modified CDS sequence (opt4) from hemagglutinin__InfluenzaB__ALA08485

SEQ ID NO: 188488 - RNA, 1755 nt, Artificial Sequence; identical to SEQ ID NO: 188349
  derived and/or modified CDS sequence (opt4) from hemagglutinin__InfluenzaB__ALA08486

SEQ ID NO: 188489 - RNA, 1755 nt, Artificial Sequence; identical to SEQ ID NO: 188349
  derived and/or modified CDS sequence (opt4) from hemagglutinin__InfluenzaB__ALA08487

SEQ ID NO: 188490 - RNA, 1755 nt, Artificial Sequence; identical to SEQ ID NO: 188349
  derived and/or modified CDS sequence (opt4) from hemagglutinin__InfluenzaB__ALA08564

SEQ ID NO: 188491 - RNA, 1755 nt, Artificial Sequence; identical to SEQ ID NO: 188349
  derived and/or modified CDS sequence (opt4) from hemagglutinin__InfluenzaB__ALA08565

SEQ ID NO: 188492 - RNA, 1755 nt, Artificial Sequence; identical to SEQ ID NO: 188349
  derived and/or modified CDS sequence (opt4) from hemagglutinin__InfluenzaB__ALA08566

SEQ ID NO: 188493 - RNA, 1755 nt, Artificial Sequence; identical to SEQ ID NO: 188349
  derived and/or modified CDS sequence (opt4) from hemagglutinin__InfluenzaB__ALA08567

SEQ ID NO: 188494 - RNA, 1755 nt, Artificial Sequence; identical to SEQ ID NO: 188349
  derived and/or modified CDS sequence (opt4) from hemagglutinin__InfluenzaB__ALA08568

SEQ ID NO: 188495 - RNA, 1755 nt, Artificial Sequence; identical to SEQ ID NO: 188349
  derived and/or modified CDS sequence (opt4) from hemagglutinin__InfluenzaB__ALA08569

SEQ ID NO: 188496 - RNA, 1758 nt, Artificial Sequence
  derived and/or modified CDS sequence (opt4) from hemagglutinin__InfluenzaB__ALA08689
augaaggccaucaucgugcugcugaugguggugaccagcaacgccgacagaaucugcaccggcaucaccagcagcaacagcccccacguggugaagaccgccacccagggcgaggugaacgugaccggcgugaucccccugaccaccacccccaccaagagccacuucgccaaccugaagggcaccgagaccagaggcaagcugugccccaagugccccaacugcaccgaccuggacguggcccugggcagacccaagugcaccggcaagauccccagcgccagagugagcauccugcacgaggugagacccgugaccagcggcugcuuccccaucaugcacgacagaaccaagaucagacagcugcccaaccugcugagaggcuacgagcacaucagacugagcacccacaacgugaucaacgccgagaacgcccccggcggccccuacaagaucggcaccagcggcagcugccccaacgugaccaacggcaacggcuucuucgccaccauggccugggccgugcccaagaacgacaagaacaagaccgccaccaacccccugaccaucgaggugcccuacaucugcaccgagggcgaggaccagaucaccguguggggcuuccacagcgacaacgagacccagauggccaagcuguacggcgacagcaacccccagaaguucaccagcagcgccaacggcgugaccacccacuacgugagccagaucggcggcuuccccaaccagaccgaggacggcggccugccccagagcggcagaaucgugguggacuacauggugcagaagagcggcaagaccggcaccaucaccuaccagagaggcauccugcugccccagaagguguggugcgccagcggcagaagcaaggugaucaagggcagccugccccugaucggcgaggccgacugccugcacgagaaguacggcggccugaacaagagcaagcccuacuacaccggcgagcacgccaaggccaucggcaacugccccaucugggugaagaccccccugaagcuggccaacggcaccaaguacagaccccccgccaagcugcugaaggagagaggcuucuucggcgccaucgccggcuuccuggagggcggcugggagggcaugaucgccggcuggcacggcuacaccagccacggcgcccacggcguggccguggccgccgaccugaagagcacccaggaggccaucaacaagaucaccaagaaccugaacagccugagcgagcuggaggugaagaaccugcagagacugagcggcgccauggacgagcugcacaacgagauccuggagcuggacgagaagguggacgaccugagagccgacaccaucagcagccagaucgagcuggccgugcugcugagcaacgagggcaucaucaacagcgaggacgagcaccugcuggcccuggagagaaagcugaagaagaugcugggccccagcgccguggagaucggcaacggcugcuucgagaccaagcacaagugcaaccagaccugccuggacagaaucgccgccggcaccuucgacgccggcgaguucagccugcccaccuucgacagccugaacaucaccgccgccagccugaacgacgacggccuggacaaccacaccauccugcuguacuacagcaccgccgccagcagccuggccgugacccugaugaucgccaucuucgugguguacauggugagcagagacaacgugagcugcagcaucugccuguga

SEQ ID NO: 188497 - RNA, 1758 nt, Artificial Sequence
  derived and/or modified CDS sequence (opt4) from hemagglutinin__InfluenzaB__ALA08690
augaaggccaucaucgugcugcugaugguggugaccagcaacgccgacagaaucugcaccggcaucaccagcagcaacagcccccacguggugaagaccgccacccagggcgaggugaacgugaccggcgugaucccccugaccaccacccccaccaagagccacuucgccaaccugaagggcaccgagaccagaggcaagcugugccccaagugccugaacugcaccgaccuggacguggcccugggcagacccaagugcaccggcaagauccccagcgccagagugagcauccugcacgaggugagacccgugaccagcggcugcuuccccaucaugcacgacagaaccaagaucagacagcugcccaaccugcugagaggcuacgagcacaucagacugagcacccacaacgugaucaacgccgaggacgcccccggcggccccuacaagaucggcaccagcggcagcugccccaacaucaccaacggcaacggcuucuucgccaccauggccugggccgugcagaagaacgacaagaacaagaccgccaccaacccccugaccaucgaggugcccuacaucugcaccgagggcgaggaccagaucaccguguggggcuuccacagcgacaacgagacccagauggccaagcuguacggcgacagcaagccccagaaguucaccagcagcgccaacggcgugaccacccacuacgugagccagaucggcggcuuccccaaccagaccgaggacggcggccugccccagagcggcagaaucgugguggacuacauggugcagaagagcggcaagaccggcaccaucaccuaccagagaggcauccugcugccccagaagguguggugcgccagcggcagaagcaaggugaucaagggcagccugccccugaucggcgaggccgacugccugcacgagaaguacggcggccugaacaagagcaagcccuacuacaccggcgagcacgccaaggccaucggcaacugccccaucugggugaagaccccccugaagcuggccaacggcaccaaguacagaccccccgccaagcugcugaaggagagaggcuucuucggcgccaucgccggcuuccuggagggcggcugggagggcaugaucgccggcuggcacggcuacaccagccacggcgcccacggcguggccguggccgccgaccugaagagcacccaggaggccaucaacaagaucaccaagaaccugaacagccugagcgagcuggaggugaagaaccugcagagacugagcggcgccauggacgagcugcacaacgagauccuggagcuggacgagaagguggacgaccugagagccgacaccaucagcagccagaucgagcuggccgugcugcugagcaacgagggcaucaucaacagcgaggacgagcaccugcuggcccuggagagaaagcugaagaagaugcugggccccagcgccguggagaucggcaacggcugcuucgagaccaagcacaagugcaaccagaccugccuggacagaaucgccgccggcaccuucgacgccggcgaguucagccugcccaccuucgacagccugaacaucaccgccgccagccugaacgacgacggccuggacgaccacaccauccugcuguacuacagcaccgccgccagcagccuggccgugacccugaugaucgccaucuucgugguguacauggugagcagagacaacgugagcugcagcaucugccuguga

SEQ ID NO: 188498 - RNA, 1755 nt, Artificial Sequence; identical to SEQ ID NO: 188349
  derived and/or modified CDS sequence (opt4) from hemagglutinin__InfluenzaB__ALE31766

SEQ ID NO: 188499 - RNA, 1758 nt, Artificial Sequence
  derived and/or modified CDS sequence (opt4) from hemagglutinin__InfluenzaB__ALE31768
augaaggccaucaucgugcugcugaugguggugaccagcaacgccgacagaaucugcaccggcaucaccagcagcaacagcccccacguggugaagaccgccacccagggcgaggugaacgugaccggcgugaucccccugaccaccacccccaccaagagccacuucgccaaccugaagggcaccgagaccagaggcaagcugugccccaagugccugaacugcaccgaccuggacguggcccugggcagacccaagugcaccggcaagauccccagcgccagagugagcauccugcacgaggugagacccgugaccagcggcugcuuccccaucaugcacgacagaaccaagaucagacagcugcccaaccugcugagaggcuacgagcacaucagacugagcacccacaacgugaucaacgccgaggacgcccccggcggccccuacaagaucggcaccagcggcagcugccccaacaucaccaacggcaacggcuucuucgccaccauggccugggccgugcccaagaacgacaagaacaagaccgccaccaacccccugaccaucgaggugcccuacaucugcaccgagggcgaggaccagaucaccguguggggcuuccacagcgacaacgagacccagauggccaagcuguacggcgacagcaagccccagaaguucaccagcagcgccaacggcgugaccacccacuacgugagccagaucggcggcuuccccaaccagaccgaggacggcggccugccccagagcggcagaaucgugguggacuacauggugcagaagagcggcaagaccggcaccaucaccuaccagagaggcauccugcugccccagaagguguggugcgccagcggcagaagcaaggugaucaagggcagccugccccugaucggcgaggccgacugccugcacgagaaguacggcggccugaacaagagcaagcccuacuacaccggcgagcacgccaaggccaucggcaacugccccaucugggugaagaccccccugaagcuggccaacggcaccaaguacagaccccccgccaagcugcugaaggagagaggcuucuucggcgccaucgccggcuuccuggagggcggcugggagggcaugaucgccggcuggcacggcuacaccagccacggcgcccacggcguggccguggccgccgaccugaagagcacccaggaggccaucaacaagaucaccaagaaccugaacagccugagcgagcuggaggugaagaaccugcagagacugagcggcgccauggacgagcugcacaacgagauccuggagcuggacgagaagguggacgaccugagagccgacaccaucagcagccagaucgagcuggccgugcugcugagcaacgagggcaucaucaacagcgaggacgagcaccugcuggcccuggagagaaagcugaagaagaugcugggccccagcgccguggagaucggcaacggcugcuucgagaccaagcacaagugcaaccagaccugccuggacagaaucgccgccggcaccuucgacgccggcgaguucagccugcccaccuucgacagccugaacaucaccgccgccagccugaacgacgacggccuggacaaccacaccauccugcuguacuacagcaccgccgccagcagccuggccgugacccugaugaucgccaucuucgugguguacauggugagcagagacaacgugagcugcagcaucugccuguga

SEQ ID NO: 188500 - RNA, 1758 nt, Artificial Sequence
  derived and/or modified CDS sequence (opt4) from hemagglutinin__InfluenzaB__ALE31770
augaaggccaucaucgugcugcugaugguggugaccagcaacgccgacagaaucugcaccggcaucaccagcagcaacagcccccacguggugaagaccgccacccagggcgaggugaacgugaccggcgugaucccccugaccaccacccccaccaagagccacuucgccaaccugaagggcaccgagaccagaggcaagcugugccccaagugccugaacugcaccgaccuggacguggcccugggcagacccaagugcaccggcaagauccccagcgccagagugagcauccugcacgaggugagacccgugaccagcggcugcuuccccaucaugcacgacagaaccaagaucagacagcugcccaaccugcugagaggcuacgagcacaucagccugagcacccacaacgugaucaacgccgaggacgcccccggcggccccuacaagaucggcaccagcggcagcugccccaacgugaccaacggcaacggcuucuucgccaccauggccugggccgugcccaagaacgacaagaacaagaccgccaccaacccccugaccaucgaggugcccuacaucugcaccgagggcgaggaccagaucaccguguggggcuuccacagcgacaacgagacccagauggccaagcuguacggcgacagcaagccccagaaguucaccagcagcgccaacggcgugaccacccacuacgugagccagaucggcggcuuccccaaccagaccgaggacggcggccugccccagagcggcagaaucgugguggacuacauggugcagaagagcggcaagaccggcaccaucaccuaccagagaggcauccugcugccccagaagguguggugcgccagcggcagaagcaaggugaucaagggcagccugccccugaucggcgaggccgacugccugcacgagaaguacggcggccugaacaagagcaagcccuacuacaccggcgagcacgccaaggccaucggcaacugccccaucugggugaagaccccccugaagcuggccaacggcaccaaguacagaccccccgccaagcugcugaaggagagaggcuucuucggcgccaucgccggcuuccuggagggcggcugggagggcaugaucgccggcuggcacggcuacaccagccacggcgcccacggcguggccguggccgccgaccugaagagcacccaggaggccaucaacaagaucaccaagaaccugaacagccugagcgagcuggaggugaagaaccugcagagacugagcggcgccauggacgagcugcacaacgagauccuggagcuggacgagaagguggacgaccugagagccgacaccaucagcagccagaucgagcuggccgugcugcugagcaacgagggcaucaucaacagcgaggacgagcaccugcuggcccuggagagaaagcugaagaagaugcugggccccagcgccguggagaucggcaacggcugcuucgagaccaagcacaagugcaaccagaccugccuggacagaaucgccgccggcaccuucgacgccggcgaguucagccugcccaccuucgacagccugaacaucaccgccgccagccugaacgacgacggccuggacaaccacaccauccugcuguacuacagcaccgccgccagcagccuggccgugacccugaugaucgccaucuucgugguguacauggugagcagagacaacgugagcugcagcaucugccuguga

SEQ ID NO: 188501 - RNA, 1755 nt, Artificial Sequence; identical to SEQ ID NO: 188349
  derived and/or modified CDS sequence (opt4) from hemagglutinin__InfluenzaB__ALE31772

SEQ ID NO: 188502 - RNA, 1755 nt, Artificial Sequence; identical to SEQ ID NO: 188349
  derived and/or modified CDS sequence (opt4) from hemagglutinin__InfluenzaB__ALE31773

SEQ ID NO: 188503 - RNA, 1755 nt, Artificial Sequence
  derived and/or modified CDS sequence (opt4) from hemagglutinin__InfluenzaB__ALE31884
augaaggccaucaucgugcugcugaugguggugaccagcaacgccgacagaaucugcaccggcaucaccagcagcaacagcccccacguggugaagaccgccacccagggcgaggugaacgugaccggcgugaucccccugaccaccacccccaccaagagcuacuucgccaaccugaagggcaccagaaccagaggcaagcugugccccgacugccugaacugcaccgaccuggacguggcccugggcagacccaugugcgugggcaccacccccagcgccaaggccagcauccugcacgaggugagacccgugaccagcggcugcuuccccaucaugcacgacagaaccaagaucagacagcugcccaaccugcugagaggcuacgagaagaucagacugagcacccagaacgugaucgacgccgagaaggcccccggcggccccuacagacugggcaccagcggcagcugccccaacgccaccagcaagaucggcuucuucgccaccauggccugggccgugcccaaggacaacuacaagaacgccaccaacccccagaccguggaggugcccuacaucugcaccgagggcgaggaccagaucaccguguggggcuuccacagcgacaacaagacccagaugaagagccuguacggcgacagcaacccccagaaguucaccagcagcgccaacggcgugaccacccacuacgugagccagaucggcgacuuccccgaccagaccgaggacggcggccugccccagagcggcagaaucgugguggacuacaugaugcagaagcccggcaagaccggcaccaucguguaccagagaggcgugcugcugccccagaagguguggugcgccagcggcagaagcaaggugaucaagggcagccugccccugaucggcgaggccgacugccugcacgaggaguacggcggccugaacaagagcaagcccuacuacaccggcaagcacgccaaggccaucggcaacugccccaucugggugaagaccccccugaagcuggccaacggcaccaaguacagaccccccgccaagcugcugaaggagagaggcuucuucggcgccaucgccggcuuccuggagggcggcugggagggcaugaucgccggcuggcacggcuacaccagccacggcgcccacggcguggccguggccgccgaccugaagagcacccaggaggccaucaacaagaucaccaagaaccugaacagccugagcgagcuggaggugaagaaccugcagagacugagcggcgccauggacgagcugcacaacgagauccuggagcuggacgagaagguggacgaccugagagccgacaccaucagcagccagaucgagcuggccgugcugcugagcaacgagggcaucaucaacagcgaggacgagcaccugcuggcccuggagagaaagcugaagaagaugcugggccccagcgccguggacaucggcaacggcugcuucgagaccaagcacaagugcaaccagaccugccuggacagaaucgccgccggcaccuucaacgccggcgaguucagccugcccaccuucgacagccugaacaucaccgccgccagccugaacgacgacggccuggacaaccacaccauccugcuguacuacagcaccgccgccagcagccuggccgugacccugaugcuggccaucuucaucguguacauggugagcagagacaacgugagcugcagcgugugccuguga

SEQ ID NO: 188504 - RNA, 1755 nt, Artificial Sequence
  derived and/or modified CDS sequence (opt4) from hemagglutinin__InfluenzaB__ALE31885
augaaggccaucaucgugcugcugaugguggugaccagcaacgccgacagaaucugcaccggcaucaccagcagcaacagcccccacguggugaagaccgccacccagggcgaggugaacgugaccggcgugaucccccugaccaccacccccaccaagagcuacuucgccaaccugaagggcaccagaaccagaggcaagcugugccccgacugccugaacugcaccgaccuggacguggcccugggcagacccaugugcgugggcaccacccccagcgccaaggccagcauccugcacgaggugagacccgugaccagcggcugcuuccccaucaugcacgacagaaccaagaucagacagcugcccaaccugcugagaggcuacgagaagaucagacugagcacccagaacgugaucgacgccgagaaggcccccggcggccccuacagacugggcaccagcggcagcugccccaacgccaccagcaagaucggcuucuucgccaccauggccugggccgugcccaaggacaacuacaagaacgccaccaacccccagaccguggaggugcccuacaucugcaccgagggcgaggaccagaucaccguguggggcuuccacagcgacaacaagacccagaugaagagccuguacggcgacagcaacccccagaaguucaccagcagcgccaacggcgugaccacccacuacgugagccagaucggcgacuuccccgaccagaccgaggacggcggccugccccagagcggcagaaucgugguggacuacaugaugcagaagcccggcaagaccggcaccaucguguaccagagaggcgugcugcugccccagaagguguggugcgccagcggcagaagcaaggugaucaagggcagccugccccugaucggcgaggccgacugccugcacgaggaguacggcggccugaacaagagcaagcccuacuacaccggcaagcacgccaaggccaucggcaacugccccaucugggugaagaccccccugaagcuggccaacggcaccaaguacagaccccccgccaagcugcugaaggagagaggcuucuucggcgccaucgccggcuuccuggagggcggcugggagggcaugaucgccggcuggcacggcuacaccagccacggcgcccacggcguggccguggccgccgaccugaagagcacccaggaggccaucaacaagaucaccaagaaccugaacagccugagcgagcuggaggugaagaaccugcagagacugagcggcgccauggacgagcugcacaacgagauccuggagcuggacgagaagguggacgaccugagagccgacaccaucagcagccagaucgagcuggccgugcugcugagcaacgagggcaucaucaacagcgaggacgagcaccugcuggcccuggagagaaagcugaagaagaugcugggccccagcgccguggacaucggcaacggcugcuucgagaccaagcacaagugcaaccagaccugccuggacagaaucgccgccggcaccuucaacgccggcgaguucagccugcccaccuucgacagccugaacaucaccgccgccagccugaacgacgacggccuggacaaccacaccauccugcuguacuacagcaccgccgccagcagccuggccgugacccugaugcuggccaucuucgugguguacauggugagcagagacaacgugagcugcagcaucugccuguga

SEQ ID NO: 188505 - RNA, 1755 nt, Artificial Sequence; identical to SEQ ID NO: 188349
  derived and/or modified CDS sequence (opt4) from hemagglutinin__InfluenzaB__ALE31886

SEQ ID NO: 188506 - RNA, 1755 nt, Artificial Sequence
  derived and/or modified CDS sequence (opt4) from hemagglutinin__InfluenzaB__ALE31887
augaaggccaucaucgugcugcugaugguggugaccagcaacgccgacagaaucugcaccggcaucaccagcagcaacagcccccacguggugaagaccgccacccagggcgagaucaacgugaccggcgugaucccccugaccaccacccccaccaagagcuacuucgccaaccugaagggcaccagaaccagaggcaagcugugccccgacugccugaacugcaccgaccuggacguggcccugggcagacccaugugcgugggcaccacccccagcgccaaggccagcauccugcacgaggugagacccgugaccagcggcugcuuccccaucaugcacgacagaaccaagaucagacagcugcccaaccugcugagaggcuacgagaagaucagacugagcacccagaacgugaucgacgccgagaaggcccccggcggccccuacagacugggcaccagcggcagcugccccaacgccaccagcaagaucggcuucuucgccaccauggccugggccgugcccaaggacaacuacaagaacgccaccaacccccagaccguggaggugcccuacaucugcaccgagggcgaggaccagaucaccguguggggcuuccacagcgacaacaagacccagaugaagagccuguacggcgacagcaacccccagaaguucaccagcagcgccaacggcgugaccacccacuacgugagccagaucggcgacuuccccgaccagaccgaggacggcggccugccccagagcggcagaaucgugguggacuacaugaugcagaagcccggcaagaccggcaccaucguguaccagagaggcgugcugcugccccagaagguguggugcgccagcggcagaagcaaggugaucaagggcagccugccccugaucggcgaggccgacugccugcacgaggaguacggcggccugaacaagagcaagcccuacuacaccggcaagcacgccaaggccaucggcaacugccccaucugggugaagaccccccugaagcuggccaacggcaccaaguacagaccccccgccaagcugcugaaggagagaggcuucuucggcgccaucgccggcuuccuggagggcggcugggagggcaugaucgccggcuggcacggcuacaccagccacggcgcccacggcguggccguggccgccgaccugaagagcacccaggaggccaucaacaagaucaccaagaaccugaacagccugagcgagcuggaggugaagaaccugcagagacugagcggcgccauggacgagcugcacaacgagauccuggagcuggacgagaagguggacgaccugagagccgacaccaucagcagccagaucgagcuggccgugcugcugagcaacgagggcaucaucaacagcgaggacgagcaccugcuggcccuggagagaaagcugaagaagaugcugggccccagcgccguggacaucggcaacggcugcuucgagaccaagcacaagugcaaccagaccugccuggacagaaucgccgccggcaccuucaacgccggcgaguucagccugcccaccuucgacagccugaacaucaccgccgccagccugaacgacgacggccuggacaaccacaccauccugcuguacuacagcaccgccgccagcagccuggccgugacccugaugcuggccaucuucaucguguacauggugagcagagacaacgugagcugcagcaucugccuguga

SEQ ID NO: 188507 - RNA, 1755 nt, Artificial Sequence; identical to SEQ ID NO: 188349
  derived and/or modified CDS sequence (opt4) from hemagglutinin__InfluenzaB__ALE31982

SEQ ID NO: 188508 - RNA, 1755 nt, Artificial Sequence
  derived and/or modified CDS sequence (opt4) from hemagglutinin__InfluenzaB__ALE31983
augaaggccaucaucgugcugcugaugguggugaccagcaacgccgacagaaucugcaccggcaucaccagcagcaacagcccccacguggugaagaccgccacccagggcgaggugaacgugaccggcgugaucccccugaccaccacccccaccaagagcuacuucgccaaccugaagggcaccagaaccagaggcaagcugugccccgacugccugaacugcaccgaccuggacguggcccugggcagacccaugugcgugggcaccacccccagcgccaaggccagcauccugcacgaggugagacccgugaccagcggcugcuuccccaucaugcacgacagaaccaagaucagacagcugcccaaccugcugagaggcuacgagaagaucagacugagcacccagaacgugaucgacgccgagaaggcccccggcggccccuacagacugggcaccagcggcagcugccccaacgccaccagcaagaucggcuucuucgccaccauggccugggccgugcccaaggacaacuacaagaacgccaccaacccccagaccguggaggugcccuacaucugcaccgagggcgaggaccagaucaccguguggggcuuccacagcgacaacaagacccagaugaagagccuguacggcgacagcaacccccagaaguucaccagcagcgccaacggcgugaccacccacuacgugagccagaucggcgacuuccccgaccagaccgaggacggcggccugccccagagcggcagaaucgugguggacuacaugaugcagaagcccggcaagaccggcaccaucguguaccagagaggcgugcugcugccccagaagguguggugcgccagcggcagaagcaaggugaucaagggcagccugccccugaucggcgaggccgacugccugcacgaggaguacggcggccugaacaagagcaagcccuacuacaccggcaagcacgccaaggccaucggcaacugccccaucugggugaagaccccccugaagcuggccaacggcaccaaguacagaccccccgccaagcugcugaaggagagaggcuucuucggcgccaucgccggcuuccuggagggcggcugggagggcaugaucgccggcuggcacggcuacaccagccacggcgcccacggcguggccguggccgccgaccugaagagcacccaggaggccaucaacaagaucaccaagaaccugaacagccugagcgagcuggaggugaagaaccugcagagacugagcggcgccauggacgagcugcacaacgagauccuggagcuggacgagaagguggacgaccugagagccgacaccaucagcagccagaucgagcuggccgugcugcugagcaacgagggcaucaucaacagcgaggacgagcaccugcuggcccuggagagaaagcugaagaagaugcugggccccagcgccguggacaucggcaacggcugcuucgagaccaagcacaagugcaaccagaccugccuggacagaaucgccgccggcaccuucaacgccggcgaguucagccugcccaccuucgacagccugaacaucaccgccgccagccugaacgacgacggccuggacaaccacaccauccugcuguacuacagcaccgccgccagcagccuggccgugacccugaugcuggcccuguucaucguguacauggugagcagagacaacgugagcugcagcaucugccuguga

SEQ ID NO: 188509 - RNA, 1755 nt, Artificial Sequence
  derived and/or modified CDS sequence (opt4) from hemagglutinin__InfluenzaB__ALE31984
augaaggccaucaucgugcugcugaugguggugaccagcaacgccgacagaaucugcaccggcaucaccagcagcaacagcccccacguggugaagaccgccacccagggcgaggugaacgugaccggcgugaucccccugaccaccacccccaccaagagcuacuucgccaaccugaagggcaccagaaccagaggcaagcugugccccgacugccugaacugcaccgaccuggacguggcccugggcagacccaugugcgugggcaccacccccagcgccaaggccagcauccugcacgaggugagacccgugaccagcggcugcuuccccaucaugcacgacagaaccaagaucagacagcugcccaaccugcugagaggcuacgagaagaucagacugagcacccagaacgugaucgacgccgagaaggcccccggcggccccuacagacugggcaccagcggcagcugccccaacgccaccagcaagaucggcuucuucgccaccauggccugggccgugcccaaggacaacuacaagaacgccaccaacccccagaccguggaggugcccuacaucugcaccgaggaggaggaccagaucaccguguggggcuuccacagcgacaacaagacccagaugaagagccuguacggcgacagcaacccccagaaguucaccagcagcgccaacggcgugaccacccacuacgugagccagaucggcgacuuccccgaccagaccgaggacggcggccugccccagagcggcagaaucgugguggacuacauggugcagaagcccggcaagaccggcaccaucguguaccagagaggcgugcugcugccccagaagguguggugcgccagcggcagaagcaaggugaucaagggcagccugccccugaucggcgaggccgacugccugcacgaggaguacggcggccugaacaagagcaagcccuacuacaccggcaagcacgccaaggccaucggcaacugccccaucugggugaagaccccccugaagcuggccaacggcaccaaguacagaccccccgccaagcugcugaaggagagaggcuucuucggcgccaucgccggcuuccuggagggcggcugggagggcaugaucgccggcuggcacggcuacaccagccacggcgcccacggcguggccguggccgccgaccugaagagcacccaggaggccaucaacaagaucaccaagaaccugaacagccugagcgagcuggaggugaagaaccugcagagacugagcggcgccauggacgagcugcacaacgagauccuggagcuggacgagaagguggacgaccugagagccgacaccaucagcagccagaucgagcuggccgugcugcugagcaacgagggcaucaucaacagcgaggacgagcaccugcuggcccuggagagaaagcugaagaagaugcugggccccagcgccguggacaucggcaacggcugcuucgagaccaagcacaagugcaaccagaccugccuggacagaaucgccgccggcaccuucaacgccggcgaguucagccugcccaccuucgacagccugaacaucaccgccgccagccugaacgacgacggccuggacaaccacaccauccugcuguacuacagcaccgccgccagcagccuggccgugacccugaugcuggccaucuucaucguguacauggugagcagagacaacgugagcugcagcaucugccuguga

SEQ ID NO: 188510 - RNA, 1755 nt, Artificial Sequence; identical to SEQ ID NO: 188349
  derived and/or modified CDS sequence (opt4) from hemagglutinin__InfluenzaB__ALE31985

SEQ ID NO: 188511 - RNA, 1758 nt, Artificial Sequence
  derived and/or modified CDS sequence (opt4) from hemagglutinin__InfluenzaB__ALE31986
augaaggccaucaucgugcugcugaugguggugaccagcaacgccgacagaaucugcaccggcaucaccagcagcaacagcccccacguggugaagaccgccacccagggcgaggugaacgugaccggcgugaucccccugaccaccacccccaccaagagccacuucgccaaccugaagggcaccgagaccagaggcaagcugugccccaagugccugaacugcaccgaccuggacguggcccugggcagacccaagugcaccggcaagauccccagcgccagagugagcauccugcacgaggugagacccgugaccagcggcugcuuccccaucaugcacgacagaaccaagaucagacagcugcccaaccugcugagaggcuacgagcacaucagacugagcacccacaacgugaucaacgccgaggacgcccccggcggccccuacaagaucggcaccagcggcagcugccccaacaucaccaacggcaacggcuucuucgccaccauggccugggccgugcccaagaacgacaagaacaagaccgccaccaacccccugaccaucgaggugcccuacaucugcaccgagggcgaggaccagaucaccguguggggcuuccacagcgacaacgagacccagauggccaagcuguacggcgacagcaagccccagaaguucaccagcagcgccaacggcgugaccacccacuacgugagccagaucggcggcuuccccaaccagaccgaggacggcggccugccccagagcggcagaaucgugaucgacuacauggugcagaagagcggcaagaccggcaccaucaccuaccagagaggcauccugcugccccagaagguguggugcgccagcggcagaagcaaggugaucaagggcagccugccccugaucggcgaggccgacugccugcacgagaaguacggcggccugaacaagagcaagcccuacuacaccggcgagcacgccaaggccgugggcaacugccccaucugggugaagaccccccugaagcuggccaacggcaccaaguacagaccccccgccaagcugcugaaggagagaggcuucuucggcgccaucgccggcuuccuggagggcggcugggagggcaugaucgccggcuggcacggcuacaccagccacggcgcccacggcguggccguggccgccgaccugaagagcacccaggaggccaucaacaagaucaccaagaaccugaacagccugagcgagcuggaggugaagaaccugcagagacugagcggcgccauggacgagcugcacaacgagauccuggagcuggacgagaagguggacgaccugagagccgacaccaucagcagccagaucgagcuggccgugcugcugagcaacgagggcaucaucaacagcgaggacgagcaccugcuggcccuggagagaaagcugaagaagaugcugggccccagcgccguggagaucggcaacggcugcuucgagaccaagcacaagugcaaccagaccugccuggacagaaucgccgccggcaccuucgacgccggcgaguucagccugcccaccuucgacagccugaacaucaccgccgccagccugaacgacgacggccuggacaaccacaccauccugcuguacuacagcaccgccgccagcagccuggccgugacccugaugaucgccaucuucgugguguacauggugagcagagacaacgugagcugcagcaucugccuguga

SEQ ID NO: 188512 - RNA, 1755 nt, Artificial Sequence
  derived and/or modified CDS sequence (opt4) from hemagglutinin__InfluenzaB__ALE31988
augaaggccaucaucgugcugcugaugguggugaccagcaacgccgacagaaucugcaccggcaucaccagcagcaacagcccccacguggugaagaccgccacccagggcgaggugaacgugaccggcgugaucccccugaccaccacccccaccaagagcuacuucgccaaccugaagggcaccagaaccagaggcaagcugugccccgacugccugaacugcaccgaccuggacguggcccugggcagacccaugugcgugggcaccacccccagcgccaaggccagcauccugcacgaggugagacccgugaccagcggcugcuuccccaucaugcacgacagaaccaagaucagacagcugcccaaccugcugagaggcuacgagaagaucagacugagcacccagaacgugaucgacgccgagaaggcccccggcggccccuacagacugggcaccagcggcagcugccccaacgccaccagcaagaucggcuucuucgccaccauggccugggccgugcccaaggacaacuacaagaacgccaccaacccccagaccguggaggugcccuacaucugcaccgagggcgaggaccagaucaccguguggggcuuccacagcgacaacaagacccagaugaagagccuguacggcgacagcaacccccagaaguucaccagcagcgccaacggcgugaccacccacuacgugagccagaucggcgacuuccccgaccagaccgaggacggcggccugccccagagcggcagaaucgugguggacuacauggugcagaagcccggcaagaccggcaccaucguguaccagagaggcgugcugcugccccagaagguguggugcgccagcggcagaagcaaggugaucaagggcagccugccccugaucggcgaggccgacugccugcacgaggaguacggcggccugaacaagagcaagcccuacuacaccggcaagcacgccaaggccaucggcaacugccccaucugggugaagaccccccugaagcuggccaacggcaccaaguacagaccccccgccaagcugcugaaggagagaggcuucuucggcgccaucgccggcuuccuggagggcggcugggagggcaugaucgccggcuggcacggcuacaccagccacggcgcccacggcguggccguggccgccgaccugaagagcacccaggaggccaucaacaagaucaccaagaaccugaacagccugagcgagcuggaggugaagaaccugcagagacugagcggcgccauggacgagcugcacaacgagauccuggagcuggacgagaagguggacgaccugagagccgacaccaucagcagccagaucgagcuggccgugcugcugagcaacgagggcaucaucaacagcgaggacgagcaccugcuggcccuggagagaaagcugaagaagaugcugggccccagcgccguggacaucggcaacggcugcuucgagaccaagcacaagugcaaccagaccugccuggacagaaucgccgccggcaccuucaacgccggcgaguucagccugcccaccuucgacagccugaacaucaccgccgccagccugaacgacgacggccuggacaaccacaccauccugcuguacuacagcaccgccgccagcagccuggccgugacccugaugcuggccaucuucaucguguacauggugagcagagacaacgugagcugcagcaucugccuguga

SEQ ID NO: 188513 - RNA, 1758 nt, Artificial Sequence; identical to SEQ ID NO: 188511
  derived and/or modified CDS sequence (opt4) from hemagglutinin__InfluenzaB__ALE31989

SEQ ID NO: 188514 - RNA, 1758 nt, Artificial Sequence; identical to SEQ ID NO: 188511
  derived and/or modified CDS sequence (opt4) from hemagglutinin__InfluenzaB__ALE31990

SEQ ID NO: 188515 - RNA, 1755 nt, Artificial Sequence; identical to SEQ ID NO: 188349
  derived and/or modified CDS sequence (opt4) from hemagglutinin__InfluenzaB__ALE31991

SEQ ID NO: 188516 - RNA, 1758 nt, Artificial Sequence
  derived and/or modified CDS sequence (opt4) from hemagglutinin__InfluenzaB__ALE31992
augaaggccaucaucgugcugcugaugguggugaccagcaacgccgacagaaucugcaccggcaucaccagcagcaacagcccccacguggugaagaccgccacccagggcgaggugaacgugaccggcgugaucccccugaccaccacccccaccaagagccacuucgccaaccugaagggcaccgagaccagaggcaagcugugccccaagugccugaacugcaccgaccuggacguggcccugggcagacccaagugcaccggcaagauccccagcgccagagugagcauccugcacgaggugagacccgugaccagcggcugcuuccccaucaugcacgacagaaccaagaucagacagcugcccaaccugcugagaggcuacgagcacgugagacugagcacccacaacgugaucaacgccgaggacgcccccggcggccccuacaagaucggcaccagcggcagcugccccaacaucaccaacggcaacggcuucuucgccaccauggccugggccgugcccaagaacgacaagaacaagaccgccaccaacccccugaccaucgaggugcccuacaucugcaccgagagagaggaccagaucaccguguggggcuuccacagcgacaacgagacccagauggccaagcuguacggcgacagcaagccccagaaguucaccagcagcgccaacggcgugaccacccacuacgugagccagaucggcggcuuccccaaccagaccgaggacggcggccugccccagagcggcagaaucgugguggacuacauggugcagaagagcggcaagaccggcaccaucaccuaccagagaggcauccugcugccccagaagguguggugcgccagcggcagaagcaaggugaucaagggcagccugccccugaucggcgaggccgacugccugcacgagaaguacggcggccugaacaagagcaagcccuacuacaccggcgagcacgccaaggccaucggcaacugccccaucugggugaagaccccccugaagcuggccaacggcaccaaguacagaccccccgccaagcugcugaaggagagaggcuucuucggcgccaucgccggcuuccuggagggcggcugggagggcaugaucgccggcuggcacggcuacaccagccacggcgcccacggcguggccguggccgccgaccugaagagcacccaggaggccaucaacaagaucaccaagaaccugaacagccugagcgagcuggaggugaagaaccugcagagacugagcggcgccauggacgagcugcacaacgagauccuggagcuggacgagaagguggacgaccugagagccgacaccaucagcagccagaucgagcuggccgugcugcugagcaacgagggcaucaucaacagcgaggacgagcaccugcuggcccuggagagaaagcugaagaagaugcugggccccagcgccguggagaucggcaacggcugcuucgagaccaagcacaagugcaaccagaccugccuggacagaaucgccgccggcaccuucgacgccggcgaguucagccugcccaccuucgacagccugaacaucaccgccgccagccugaacgacgacggccuggacaaccacaccauccugcuguacuacagcaccgccgccagcagccuggccgugacccugaugaucgccaucuucgugguguacauggugagcagagacaacgugagcugcagcaucugccuguga

SEQ ID NO: 188517 - RNA, 1758 nt, Artificial Sequence; identical to SEQ ID NO: 187925
  derived and/or modified CDS sequence (opt4) from hemagglutinin__InfluenzaB__ALE31993

SEQ ID NO: 188518 - RNA, 1758 nt, Artificial Sequence
  derived and/or modified CDS sequence (opt4) from hemagglutinin__InfluenzaB__ALE31994
augaaggccaucaucgugcugcugaugguggugaccagcaacgccgacagaaucugcaccggcaucaccagcagcaacagcccccacguggugaagaccgccacccagggcgaggugaacgugaccggcgugaucccccugaccaccacccccaccaagagccacuucgccaaccugaagggcaccgagaccagaggcaagcugugccccaagugccugaacugcaccgaccuggacguggcccugggcagacccaagugcaccggcaagauccccagcgccagagugagcauccugcacgaggugagacccgugaccagcggcugcuuccccaucaugcacgacagaaccaagaucagacagcugcccaaccugcugagaggcuacgagcacgugagacugagcacccacaacgugaucaacgccgaggacgcccccggcggccccuacaagaucggcaccagcggcagcugccccaacaucaccaacggcaacggcuucuucgccaccauggccugggccgugcccaagaacgacaagaacaagaccgccaccaacccccugaccaucgaggugcccuacaucugcaccgagggcgaggaccagaucaccguguggggcuuccacagcgacaacgagacccagauggccaagcuguacggcgacagcaagccccagaaguucaccagcagcgccaacggcgugaccacccacuacgugagccagaucggcggcuuccccaaccagaccgaggacggcggccugccccagagcggcagaaucgugguggacuacauggugcagaagagcggcaagaccggcaccaucaccuaccagagaggcauccugcugccccagaagguguggugcgccagcggcagaagcaaggugaucaagggcagccugccccugaucggcgaggccgacugccugcacgagaaguacggcggccugaacaagagcaagcccuacuacaccggcgagcacgccaaggccaucggcaacugccccaucugggugagaaccccccugaagcuggccaacggcaccaaguacagaccccccgccaagcugcugaaggagagaggcuucuucggcgccaucgccggcuuccuggagggcggcugggagggcaugaucgccggcuggcacggcuacaccagccacggcgcccacggcguggccguggccgccgaccugaagagcacccaggaggccaucaacaagaucaccaagaaccugaacagccugagcgagcuggaggugaagaaccugcagagacugagcggcgccauggacgagcugcacaacgagauccuggagcuggacgagaagguggacgaccugagagccgacaccaucagcagccagaucgagcuggccgugcugcugagcaacgagggcaucaucaacagcgaggacgagcaccugcuggcccuggagagaaagcugaagaagaugcugggccccagcgccguggagaucggcaacggcugcuucgagaccaagcacaagugcaaccagaccugccuggacagaaucgccgccggcaccuucgacgccggcgaguucagccugcccaccuucgacagccugaacaucaccgccgccagccugaacgacgacggccuggacaaccacaccauccugcuguacuacagcaccgccgccagcagccuggccgugacccugaugaucgccaucuucgugguguacauggugagcagagacaacgugagcugcagcaucugccuguga

SEQ ID NO: 188519 - RNA, 1755 nt, Artificial Sequence; identical to SEQ ID NO: 188508
  derived and/or modified CDS sequence (opt4) from hemagglutinin__InfluenzaB__ALN39719

SEQ ID NO: 188520 - RNA, 1755 nt, Artificial Sequence; identical to SEQ ID NO: 188349
  derived and/or modified CDS sequence (opt4) from hemagglutinin__InfluenzaB__ALN39720

SEQ ID NO: 188521 - RNA, 1755 nt, Artificial Sequence; identical to SEQ ID NO: 188349
  derived and/or modified CDS sequence (opt4) from hemagglutinin__InfluenzaB__ALN39721

SEQ ID NO: 188522 - RNA, 1755 nt, Artificial Sequence; identical to SEQ ID NO: 188349
  derived and/or modified CDS sequence (opt4) from hemagglutinin__InfluenzaB__ALN39723

SEQ ID NO: 188523 - RNA, 1755 nt, Artificial Sequence; identical to SEQ ID NO: 188349
  derived and/or modified CDS sequence (opt4) from hemagglutinin__InfluenzaB__ALN39724

SEQ ID NO: 188524 - RNA, 1755 nt, Artificial Sequence; identical to SEQ ID NO: 188512
  derived and/or modified CDS sequence (opt4) from hemagglutinin__InfluenzaB__ALN39725

SEQ ID NO: 188525 - RNA, 1755 nt, Artificial Sequence
  derived and/or modified CDS sequence (opt4) from hemagglutinin__InfluenzaB__ALN39726
augaaggccaucaucgugcugcugaugguggugaccagcaacgccgacagaaucugcaccggcaucaccagcagcaacagcccccacguggugaagaccgccacccagggcgaggugaacgugaccggcgugaucccccugaccaccacccccaccaagagcuacuucgccaaccugaagggcaccagaaccagaggcaagcugugccccgacugccugaacugcaccgaccuggacguggcccugggcagacccaugugcgugggcaccacccccagcgccaaggccagcauccugcacgaggugagacccgugaccagcggcugcuuccccaucaugcacgacagaaccaagaucagacagcugcccaaccugcugagaggcuacgagaagaucagacugagcacccagaacgugaucgacgccgagaaggcccccggcggccccuacagacugggcaccagcggcagcugccccaacgccaccagcaagaucggcuucuucgccaccauggccugggccgugcccaaggacaacuacaagaacgccaccaacccccagaccguggaggugcccuacaucugcaccgagggcgaggaccagaucaccguguggggcuuccacagcgacaacaagacccagaugaagagccuguacggcgacagcaacccccagaaguucaccagcagcgccgacggcgugaccacccacuacgugagccagaucggcgacuuccccgaccagaccgaggacggcggccugccccagagcggcagaaucgugguggacuacaugaugcagaagcccggcaagaccggcaccaucguguaccagagaggcgugcugcugccccagaagguguggugcgccagcggcagaagcaaggugaucaagggcagccugccccugaucggcgaggccgacugccugcacgaggaguacggcggccugaacaagagcaagcccuacuacaccggcaagcacgccaaggccaucggcaacugccccaucugggugaagaccccccugaagcuggccaacggcaccaaguacagaccccccgccaagcugcugaaggagagaggcuucuucggcgccaucgccggcuuccuggagggcggcugggagggcaugaucgccggcuggcacggcuacaccagccacggcgcccacggcguggccguggccgccgaccugaagagcacccaggaggccaucaacaagaucaccaagaaccugaacagccugagcgagcuggaggugaagaaccugcagagacugagcggcgccauggacgagcugcacaacgagauccuggagcuggacgagaagguggacgaccugagagccgacaccaucagcagccagaucgagcuggccgugcugcugagcaacgagggcaucaucaacagcgaggacgagcaccugcuggcccuggagagaaagcugaagaagaugcugggccccagcgccguggacaucggcaacggcugcuucgagaccaagcacaagugcaaccagaccugccuggacagaaucgccgccggcaccuucaacgccggcgaguucagccugcccaccuucgacagccugaacaucaccgccgccagccugaacgacgacggccuggacaaccacaccauccugcuguacuacagcaccgccgccagcagccuggccgugacccugaugcuggccaucuucaucguguacauggugagcagagacaacgugagcugcagcaucugccuguga

SEQ ID NO: 188526 - RNA, 1755 nt, Artificial Sequence; identical to SEQ ID NO: 188512
  derived and/or modified CDS sequence (opt4) from hemagglutinin__InfluenzaB__ALN39727

SEQ ID NO: 188527 - RNA, 1755 nt, Artificial Sequence; identical to SEQ ID NO: 188349
  derived and/or modified CDS sequence (opt4) from hemagglutinin__InfluenzaB__ALN39728

SEQ ID NO: 188528 - RNA, 1755 nt, Artificial Sequence; identical to SEQ ID NO: 188349
  derived and/or modified CDS sequence (opt4) from hemagglutinin__InfluenzaB__ALN39729

SEQ ID NO: 188529 - RNA, 1758 nt, Artificial Sequence
  derived and/or modified CDS sequence (opt4) from hemagglutinin__InfluenzaB__ALN39730
augaaggccaucaucgugcugcugaugguggugaccagcaacgccgacagaaucugcaccggcaucaccagcagcaacagcccccacguggugaagaccgccacccagggcgaggugaacgugaccggcgugaucccccugaccaccacccccaccaagagccacuucgccaaccugaagggcaccgagaccagaggcaagcugugccccaagugccugaacugcaccgaccuggacguggcccugggcagacccaagugcaccggcaagauccccagcgccagagugagcauccugcacgaggugagacccgugaccagcggcugcuuccccaucaugcacgacagaaccaagaucagacagcugcccaaccugcugagaggcuacgagcacgugagacugagcacccacaacgugaucaacgccgaggacgcccccggcggccccuacaagaucggcaccagcggcagcugccccaacaucaccaacggcaacggcuucuucgccaccauggccugggccgugcccaagaacgacaagaacaagaccgccaccaacccccugaccaucgaggugcccuacaucugcaccgagggcgaggaccagaucaccguguggggcuuccacagcgacaacgagacccagauggccaagcuguacggcgacagcaagccccagaaguucaccagcagcgccaacggcgugaccacccacuacgugagccagaucggcggcuuccccaaccagaccgaggacggcggccugccccagagcggcagaaucgugguggacuacauggugcagaagagcggcaagaccggcaccaucaccuaccagagaggcauccugcugccccagaagguguggugcgccagcggcagaagcaaggugaucaagggcagccugccccugaucggcgaggccgacugccugcacgagaaguacggcggccugaacaagagcaagcccuacuacaccggcgagcacgccaaggccaucggcaacugccccaucugggugaagaccccccugaagcuggccaacggcaccaaguacagaccccccgccaagcugcugaaggagagaggcuucuucggcgccaucgccggcuuccuggagggcggcugggagggcaugaucgccggcuggcacggcuacaccagccacggcgcccacggcguggccguggccgccgaccugaagagcacccaggaggccaucaacaagaucaccaagaaccugaacagccugagcgagcuggaggugaagaaccugcagagacugagcggcgccauggacgagcugcacaacgagauccuggagcuggacgagaagguggacgaccugagagccgacaccaucagcagccagaucgagcuggccgugcugcugagcaacgagggcaucaucaacagcgaggacgagcaccugcuggcccuggagagaaagcugaagaagaugcugggccccagcgccguggagaucggcaacggcugcuucgagaccaagcacaagugcaaccagaccugccuggacagaaucgccgccggcaccuucgacgccggcgaguucuuccugcccaccuucgacagccugaacaucaccgccgccagccugaacgacgacggccuggacaaccacaccauccugcuguacuacagcaccgccgccagcagccuggccgugacccugaugaucgccaucuucgugguguacauggugagcagagacaacgugagcugcagcaucugccuguga

SEQ ID NO: 188530 - RNA, 1755 nt, Artificial Sequence; identical to SEQ ID NO: 188349
  derived and/or modified CDS sequence (opt4) from hemagglutinin__InfluenzaB__ALN39732

SEQ ID NO: 188531 - RNA, 1755 nt, Artificial Sequence
  derived and/or modified CDS sequence (opt4) from hemagglutinin__InfluenzaB__ALN39733
augaaggccaucaucgugcugcugaugguggugaccagcaacgccgacagaaucugcaccggcaucaccagcagcaacagcccccacguggugaagaccgccacccagggcgaggugaacgugaccggcgugaucccccugaccaccacccccaccaagagcuacuucgccaaccugaagggcaccagaaccagaggcaagcugugccccgacugccugaacugcaccgaccuggacguggcccugggcagacccaugugcgugggcaccacccccagcgccaaggccagcauccugcacgaggugagacccgugaccagcggcugcuuccccaucaugcacgacagaaccaagaucagacagcugcccaaccugcugagaggcuacgagaagaucagacugagcacccagaacgugaucgacgccgagaaggcccccggcggccccuacagacugggcaccagcggcagcugccccaacgccaccagcaagaucggcuucuucgccaccauggccugggccgugcccaaggacaacuacaagaacgccaccaacccccagaccguggaggugcccuacaucugcaccgagggcgaggaccagaucaccguguggggcuuccacagcgacaacaagacccagaugaagagccuguacggcgacagcaacccccagaaguucaccagcagcgccaacggcgugaccacccacuacgugagccagaucggcgacuuccccgaccagaccgaggacggcggccugccccagagcggcagaaucgugguggacuacaugaugcagaagcccggcaagaccggcaccaucguguaccagagaggcgugcugcugccccagaagguguggugcgccagcggcagaagcaaggugaucaagggcagccugccccugaucggcgaggccgacugccugcacgaggaguacggcggccugaacaagagcaagcccuacuacaccggcaagcacgccaaggccaucggcaacugccccaucugggugaagaccccccugaagcuggccaacggcaccaaguacagaccccccgccaagcugcugaaggagagaggcuucuucggcgccaucgccggcuuccuggagggcggcugggagggcaugaucgccggcuggcacggcuacaccagccacggcgcccacggcguggccguggccgccgaccugaagagcacccaggaggccaucaacaagaucaccaagaaccugaacagccugagcgagcuggaggugaagaaccugcagagacugagcggcgccauggacgagcugcacaacgagauccuggagcuggacgagaagguggacgaccugagagccgacaccaucagcagccagaucgagcuggccgugcugcugagcaacgagggcaucaucaacagcgaggacgagcaccugcuggcccuggagagaaagcugaagaagaugcugggccccagcgccguggacaucggcaacggcugcuucgagaccaagcacagaugcaaccagaccugccuggacagaaucgccgccggcaccuucaacgccggcgaguucagccugcccaccuucgacagccugaacaucaccgccgccagccugaacgacgacggccuggacaaccacaccauccugcuguacuacagcaccgccgccagcagccuggccgugacccugaugcuggccaucuucaucguguacauggugagcagagacaacgugagcugcagcaucugccuguga

SEQ ID NO: 188532 - RNA, 1755 nt, Artificial Sequence
  derived and/or modified CDS sequence (opt4) from hemagglutinin__InfluenzaB__ALN39751
augaaggccaucaucgugcugcugaugguggugaccagcaacgccgacagaaucugcaccggcaucaccagcagcaacagcccccacguggugaagaccgccacccagggcgaggugaacgugaccggcgugaucccccugaccaccacccccaccaagagcuacuucgccaaccugaagggcaccagaaccagaggcaagcugugccccgacugccugaacugcaccgaccuggacguggcccugggcagacccaugugcgugggcaccacccccagcgccaaggccagcauccugcacgaggugagacccgugaccagcggcugcuuccccaucaugcacgacagaaccaagaucagacagcugcccaaccugcugagaggcuacgagaagaucagacugagcacccagaacgugaucgacgccgagaaggcccccggcggccccuacagacugggcaccagcggcagcugccccaacgccaccagcaagaucggcuucuucgccaccauggccugggccgugcccaaggacaacuacaagaacgccaccaacccccagaccguggaggugcccuacaucugcaccgagggcgaggaccagaucaccguguggggcuuccacagcgacaacaagacccagaugaagagccuguacggcgacagcaacccccagaaguucaccagcagcgccaacggcgugaccacccacuacgugagccagaucggcgacuuccccgaccagaccgaggacggcggccugccccagagcggcagaaucgugguggacuacaugaugcagaagcccggcaagaccggcaccaucguguaccagagaggcgugcugcugccccagaagguguggugcgccagcggcagaagcaaggugaucaagggcagccugccccugaucggcgaggccgacugccugcacgaggaguacggcggccugaacaagagcaagcccuacuacaccggcaagcacgccaaggccaucggcaacugccccaucugggugaagaccccccugaagcuggccaacggcaccaaguacagaccccccgccaagcugcugaaggagagaggcuucuucggcgccaucgccggcuuccuggagggcggcugggagggcaugguggccggcuggcacggcuacaccagccacggcgcccacggcguggccguggccgccgaccugaagagcacccaggaggccaucaacaagaucaccaagaaccugaacagccugagcgagcuggaggugaagaaccugcagagacugagcggcgccauggacgagcugcacaacgagauccuggagcuggacgagaagguggacgaccugagagccgacaccaucagcagccagaucgagcuggccgugcugcugagcaacgagggcaucaucaacagcgaggacgagcaccugcuggcccuggagagaaagcugaagaagaugcugggccccagcgccguggacaucggcaacggcugcuucgagaccaagcacaagugcaaccagaccugccuggacagaaucgccgccggcaccuucaacgccggcgaguucagccugcccaccuucgacagccugaacaucaccgccgccagccugaacgacgacggccuggacaaccacaccauccugcuguacuacagcaccgccgccagcagccuggccgugacccugaugcuggcccuguucaucguguacauggugagcagagacaacgugagcugcagcaucugccuguga

SEQ ID NO: 188533 - RNA, 1755 nt, Artificial Sequence; identical to SEQ ID NO: 188508
  derived and/or modified CDS sequence (opt4) from hemagglutinin__InfluenzaB__ALN39752

SEQ ID NO: 188534 - RNA, 1755 nt, Artificial Sequence; identical to SEQ ID NO: 188349
  derived and/or modified CDS sequence (opt4) from hemagglutinin__InfluenzaB__ALN39753

SEQ ID NO: 188535 - RNA, 1758 nt, Artificial Sequence
  derived and/or modified CDS sequence (opt4) from hemagglutinin__InfluenzaB__ALN39754
augaaggccaucaucgugcugcugaugguggugaccagcaacgccgacagaaucugcaccggcaucaccagcagcaacagcccccacguggugaagaccgccacccagggcgaggugaacgugaccggcgugaucccccugaccaccacccccaccaagagccacuucgccaaccugaagggcaccgagaccagaggcaagcugugccccaagugccugaacugcaccgaccuggacguggcccugggcagacccaagugcaccggcaagauccccagcgccagagugagcauccugcacgaggugagacccgugaccagcggcugcuuccccaucaugcacgacagaaccaagaucagacagcugcccaaccugcugagaggcuacgagcacgugagacugagcacccacaacgugaucaacgccgaggacgcccccggcggccccuacaagaucggcaccagcggcagcugccccaacaucaccaacggcaacggcuucuucgccaccauggccugggccgugcccaagaacgacaagaacaagaccgccaccaacccccugaccaucgaggugcccuacaucugcaccgagggcgaggaccagaucaccguguggggcuuccacagcgacaacgagacccagauggccaagcuguacggcgacagcaagccccagaaguucaccagcagcgccaacggcgugaccacccacuacgugagccagaucggcggcuuccccaaccagaccgaggacggcggccugccccagagcggcagaaucgugguggacuacauggugcagaagagcggcaagaccggcaccaucaccuaccagagaggcauccugcugccccagaagguguggugcgccagcggcagaagcaaggugaucaagggcagccugccccugaucggcgaggccgacugccugcacgagaaguacggcggccugaacaagagcaagcccuacuacaccggcgagcacgccaaggccaucggcaacugccccaucugggugaagaccccccugaagcuggccaacggcaccaaguacagaccccccgccaagcugcugaaggagagaggcuucuucggcgccaucgccggcuuccuggagggcggcugggagggcaugaucgccggcuggcacggcuacaccagccacggcgcccacggcguggccguggccgccgaccugaagagcacccaggaggccaucaacaagaucaccaagaaccugaacagccugagcgagcuggaggugaagaaccugcagagacugagcggcgccauggacgagcugcacaacgagauccuggagcuggacgagaagguggacgaccugagagccgacaccaucagcagccagaucgagcuggccgugcugcugagcaacgagggcaucaucaacagcgaggacgagcaccugcuggcccuggagagaaagcugaagaagaugcugggccccagcgccguggagaucggcaacggcugcuucgagaccaagcacaagugcaaccagaccugccuggacagaaucgccgccggcaccuucgacgccggcgaguucagccugcccaccuucgacagccugaacaucaccgccgccagccugaacgacgacggccuggacaaccacaccauccugcuguacuacagcaccgccgccagcagccuggccgugacccugaugaucgccaucuucgugguguacauggugagcagagacaacgugagcugcagcaucugccuguga

SEQ ID NO: 188536 - RNA, 1758 nt, Artificial Sequence
  derived and/or modified CDS sequence (opt4) from hemagglutinin__InfluenzaB__ALN39755
augaaggccaucaucgugcugcugcugguggugaccagcaacgccgacagaaucugcaccggcaucaccagcagcaacagcccccacguggugaagaccgccacccagggcgaggugaacgugaccggcgugaucccccugaccaccacccccaccaagagccacuucgccaaccugaagggcaccgagaccagaggcaagcugugccccaagugccugaacugcaccgaccuggacguggcccugggcagacccaagugcaccggcaagauccccagcgccagagugagcauccugcacgaggugagacccgugaccagcggcugcuuccccaucaugcacgacagaaccaagaucagacagcugcccaaccugcugagaggcuacgagcacgugagacugagcacccacaacgugaucaacgccgaggacgcccccggcggccccuacaagaucggcaccagcggcagcugccccaacaucaccaacggcaacggcuucuucgccaccauggccugggccgugcccaagaacgacaagaacaagaccgccaccaacccccugaccaucgaggugcccuacaucugcaccgagggcgaggaccagaucaccguguggggcuuccacagcgacaacgagacccagauggccaagcuguacggcgacagcaagccccagaaguucaccagcagcgccaacggcgugaccacccacuacgugagccagaucggcggcuuccccaaccagaccgaggacggcggccugccccagagcggcagaaucgugguggacuacauggugcagaagagcggcaagaccggcaccaucaccuaccagagaggcauccugcugccccagaagguguggugcgccagcggcagaagcaaggugaucaagggcagccugccccugaucggcgaggccgacugccugcacgagaaguacggcggccugaacaagagcaagcccuacuacaccggcgagcacgccaaggccaucggcaacugccccaucugggugaagaccccccugaagcuggccaacggcaccaaguacagaccccccgccaagcugcugaaggagagaggcuucuucggcgccaucgccggcuuccuggagggcggcugggagggcaugaucgccggcuggcacggcuacaccagccacggcgcccacggcguggccguggccgccgaccugaagagcacccaggaggccaucaacaagaucaccaagaaccugaacagccugagcgagcuggaggugaagaaccugcagagacugagcggcgccauggacgagcugcacaacgagauccuggagcuggacgagaagguggacgaccugagagccgacaccaucagcagccagaucgagcuggccgugcugcugagcaacgagggcaucaucaacagcgaggacgagcaccugcuggcccuggagagaaagcugaagaagaugcugggccccagcgccguggagaucggcaacggcugcuucgagaccaagcacaagugcaaccagaccugccuggacagaaucgccgccggcaccuucgacgccggcgaguucagccugcccaccuucgacagccugaacaucaccgccgccagccugaacgacgacggccuggacaaccacaccauccugcuguacuacagcaccgccgccagcagccuggccgugacccugaugaucgccaucuucgugguguacauggugagcagagacaacgugagcugcagcaucugccuguga

SEQ ID NO: 188537 - RNA, 1755 nt, Artificial Sequence
  derived and/or modified CDS sequence (opt4) from hemagglutinin__InfluenzaB__ALN39756
augaaggccaucaucgugcugcugaugguggugaccagcaacgccgacagaaucugcaccggcaucaccagcagcaacagcccccacguggugaagaccgccacccagggcgaggugaacgugaccggcgugaucccccugaccaccacccccaccaagagcuacuucgccaaccugaagggcaccagaaccagaggcaagcugugccccgacugccugaacugcaccgaccuggacguggcccugggcagacccaugugcgugggcaccacccccagcgccaaggccagcauccugcacgaggugagacccgugaccagcggcugcuuccccaucaugcacgacagaaccaagaucagacagcugcccaaccugcugagaggcuacgagaagaucagacugagcacccagaacgugaucgacgccgagaaggcccccggcggccccuacagacugggcaccagcggcagcugccccaacgccaccagcaagaucggcuucuucgccaccauggccugggccgugcccaaggacaacuacaagaacgccaccaacccccagaccguggaggugcccuacaucugcaccgagggcgaggaccagaucaccguguggggcuuccacagcgacaacaagacccagaugaagagccuguacggcgacagcaacccccagaaguucaccagcagcgccaacggcgugaccacccacuacgugagccagaucggcgacuuccccgaccagaccgaggacggcggccugccccagagcggcagaaucgugguggacuacaugaugcagaagcccggcaagaccggcaccaucguguaccagagaggcgugcugcugccccagaagguguggugcgccagcggcagaagcaaggugaucaagggcagccugccccugaucggcgaggccgacugccugcacgaggaguacggcggccugaacaagagcaagcccuacuacaccggcaagcacgccaaggccaucggcaacugccccaucugggugaagaccccccugaagcuggccaacggcaccaaguacagaccccccgccaagcugcugaaggagagaggcuucuucggcgccaucgccggcuuccuggagggcggcugggagggcaugaucgccggcuggcacggcuacaccagccacggcgcccacggcguggccguggccgccgaccugaagagcacccaggaggccaucaacaagaucaccaagaaccugaacagccugagcgagcuggaggugaagaaccugcagagacugagcggcgccauggacgagcugcacaacgagauccuggagcuggacgagaagguggacgaccugagagccgacaccaucagcagccagaucgagcuggccgugcugcugagcaacgagggcaucaucaacagcgaggacgagcaccugcuggcccuggagagaaagcugaagaagaugcugggccccagcgccguggacaucggcaacggcugcuucgagaccaagcacaagugcaaccagaccugccuggacagaaucgccgccggcaccuucaacgugggcgaguucagccugcccaccuucgacagccugaacaucaccgccgccagccugaacgacgacggccuggacaaccacaccauccugcuguacuacagcaccgccgccagcagccuggccgugacccugaugcuggccaucuucaucguguacauggugagcagagacaacgugagcugcagcaucugccuguga

SEQ ID NO: 188538 - RNA, 1758 nt, Artificial Sequence; identical to SEQ ID NO: 188535
  derived and/or modified CDS sequence (opt4) from hemagglutinin__InfluenzaB__ALN39757

SEQ ID NO: 188539 - RNA, 1755 nt, Artificial Sequence; identical to SEQ ID NO: 188349
  derived and/or modified CDS sequence (opt4) from hemagglutinin__InfluenzaB__ALN39758

SEQ ID NO: 188540 - RNA, 1755 nt, Artificial Sequence
  derived and/or modified CDS sequence (opt4) from hemagglutinin__InfluenzaB__ALN39759
augaagaccaucaucgugcugcugaugguggugaccagcaacgccgacagaaucugcaccggcaucaccagcagcaacagcccccacguggugaagaccgccacccagggcgaggugaacgugaccggcgugaucccccugaccaccacccccaccaagagcuacuucgccaaccugaagggcaccagaaccagaggcaagcugugccccgacugccugaacugcaccgaccuggacguggcccugggcagacccaugugcgugggcaccacccccagcgccaaggccagcauccugcacgaggugagacccgugaccagcggcugcuuccccaucaugcacgacagaaccaagaucagacagcugcccaaccugcugagaggcuacgagaagaucagacugagcacccagaacgugaucgacgccgagaaggcccccggcggccccuacagacugggcaccagcggcagcugccccaacgccaccagcaagaucggcuucuucgccaccauggccugggccgugcccaaggacaacuacaagaacgccaccaacccccagaccguggaggugcccuacaucugcaccgagggcgaggaccagaucaccguguggggcuuccacagcgacaacaagacccagaugaagagccuguacggcgacagcaacccccagaaguucaccagcagcgccaacggcgugaccacccacuacgugagccagaucggcgacuuccccgaccagaccgaggacggcggccugccccagagcggcagaaucgugguggacuacaugaugcagaagcccggcaagaccggcaccaucguguaccagagaggcgugcugcugccccagaagguguggugcgccagcggcagaagcaaggugaucaagggcagccugccccugaucggcgaggccgacugccugcacgaggaguacggcggccugaacaagagcaagcccuacuacaccggcaagcacgccaaggccaucggcaacugccccaucugggugaagaccccccugaagcuggccaacggcaccaaguacagaccccccgccaagcugcugaaggagagaggcuucuucggcgccaucgccggcuuccuggagggcggcugggagggcaugaucgccggcuggcacggcuacaccagccacggcgcccacggcguggccguggccgccgaccugaagagcacccaggaggccaucaacaagaucaccaagaaccugaacagccugagcgagcuggaggugaagaaccugcagagacugagcggcgccauggacgagcugcacaacgagauccuggagcuggacgagaagguggacgaccugagagccgacaccaucagcagccagaucgagcuggccgugcugcugagcaacgagggcaucaucaacagcgaggacgagcaccugcuggcccuggagagaaagcugaagaagaugcugggccccagcgccguggacaucggcaacggcugcuucgagaccaagcacaagugcaaccagaccugccuggacagaaucgccgccggcaccuucaacgccggcgaguucagccugcccaccuucgacagccugaacaucaccgccgccagccugaacgacgacggccuggacaaccacaccauccugcuguacuacagcaccgccgccagcagccuggccgugacccugaugcuggccaucuucaucguguacauggugagcagagacaacgugagcugcagcaucugccuguga

SEQ ID NO: 188541 - RNA, 1758 nt, Artificial Sequence; identical to SEQ ID NO: 188499
  derived and/or modified CDS sequence (opt4) from hemagglutinin__InfluenzaB__ALN39760

SEQ ID NO: 188542 - RNA, 1755 nt, Artificial Sequence; identical to SEQ ID NO: 188349
  derived and/or modified CDS sequence (opt4) from hemagglutinin__InfluenzaB__ALN39761

SEQ ID NO: 188543 - RNA, 1755 nt, Artificial Sequence; identical to SEQ ID NO: 188349
  derived and/or modified CDS sequence (opt4) from hemagglutinin__InfluenzaB__ALN39762

SEQ ID NO: 188544 - RNA, 1755 nt, Artificial Sequence; identical to SEQ ID NO: 188349
  derived and/or modified CDS sequence (opt4) from hemagglutinin__InfluenzaB__ALN39763

SEQ ID NO: 188545 - RNA, 1758 nt, Artificial Sequence; identical to SEQ ID NO: 188535
  derived and/or modified CDS sequence (opt4) from hemagglutinin__InfluenzaB__ALN39764

SEQ ID NO: 188546 - RNA, 1755 nt, Artificial Sequence
  derived and/or modified CDS sequence (opt4) from hemagglutinin__InfluenzaB__ALN39765
augaaggccaucaucgugcugcugaugguggugaccagcaacgccgacagaaucugcaccggcaucaccagcagcaacagcccccacguggugaagaccgccacccagggcgaggugaacgugaccggcgugaucccccugaccaccacccccaccaagagcuacuucgccaaccugaagggcaccagaaccagaggcaagcugugccccgacugccugaacugcaccgaccuggacguggcccugggcagacccaugugcgugggcaccacccccagcgccaaggccagcauccugcacgaggugagacccgugaccagcggcugcuuccccaucaugcacgacagaaccaagaucagacagcugcccaaccugcugagaggcuacgagaagaucagacugagcacccagaacgugaucgacgccgagaaggcccccggcggccccuacagacugggcaccagcggcagcugccccaacgccaccagcaagaucggcuucuucgccaccauggccugggccgugcccaaggacaacuacaagaacgccaccaacccccagaccguggaggugcccuacaucugcaccgagggcgaggaccagaucaccguguggggcuuccacagcgacaacaagacccagaugaagagccuguacggcgacagcaacccccagaaguucaccagcagcgccaacggcgugaccacccacuacgugagccagaucggcgacuuccccgaccagaccgaggacggcggccugccccagagcggcagaaucgugguggacuacaugaugcagaagcccggcaagaccggcaccaucguguaccagagaggcgugcugcugccccagaagguguggugcgccagcggcagaagcaaggugaucaagggcagccugccccugaucggcgaggccgacugccugcacgaggaguacggcggccugaacaagagcaagcccuacuacaccggcaagcacgccaaggccaucggcaacugccccaucugggugaagaccccccugaagcuggccaacggcaccaaguacagaccccccgccaagcugcugaaggagagaggcuucuucggcgccaucgccggcuuccuggagggcggcugggagggcaugaucgccggcuggcacggcuacaccagccacggcgcccacggcguggccguggccgccgaccugaagagcacccaggaggccaucaacaagaucaccaagaaccugaacagccugagcgagcuggaggugaacaaccugcagagacugagcggcgccauggacgagcugcacaacgagauccuggagcuggacgagaagguggacgaccugagagccgacaccaucagcagccagaucgagcuggccgugcugcugagcaacgagggcaucaucaacagcgaggacgagcaccugcuggcccuggagagaaagcugaagaagaugcugggccccagcgccguggacaucggcaacggcugcuucgagaccaagcacaagugcaaccagaccugccuggacagaaucgccgccggcaccuucaacgccggcgaguucagccugcccaccuucgacagccugaacaucaccgccgccagccugaacgacgacggccuggacaaccacaccauccugcuguacuacagcaccgccgccagcagccuggccgugacccugaugcuggcccuguucaucguguacauggugagcagagacaacgugagcugcagcaucugccuguga

SEQ ID NO: 188547 - RNA, 1755 nt, Artificial Sequence; identical to SEQ ID NO: 188512
  derived and/or modified CDS sequence (opt4) from hemagglutinin__InfluenzaB__ALN39766

SEQ ID NO: 188548 - RNA, 1755 nt, Artificial Sequence; identical to SEQ ID NO: 188349
  derived and/or modified CDS sequence (opt4) from hemagglutinin__InfluenzaB__ALN39767

SEQ ID NO: 188549 - RNA, 1755 nt, Artificial Sequence; identical to SEQ ID NO: 188512
  derived and/or modified CDS sequence (opt4) from hemagglutinin__InfluenzaB__ALN39768

SEQ ID NO: 188550 - RNA, 1755 nt, Artificial Sequence
  derived and/or modified CDS sequence (opt4) from hemagglutinin__InfluenzaB__ALN39769
augaaggccaucaucgugcugcugaugguggugaccagcaacgccgacagaaucugcaccggcaucaccagcagcaacagcccccacguggugaagaccgccacccagggcgaggugaacgugaccggcgugaucccccugaccaccacccccaccaagagcuacuucgccaaccugaagggcaccagaaccagaggcaagcugugccccgacugccugaacugcaccgaccuggacguggcccugggcagacccaugugcgugggcaccacccccagcgccaaggccagcauccugcacgaggugagacccgugaccagcggcugcuuccccaucaugcacggcagaaccaagaucagacagcugcccaaccugcugagaggcuacgagaagaucagacugagcacccagaacgugaucgacgccgagaaggcccccggcggccccuacagacugggcaccagcggcagcugccccaacgccaccagcaagaucggcuucuucgccaccauggccugggccgugcccaaggacaacuacaagaacgccaccaacccccagaccguggaggugcccuacaucugcaccgagggcgaggaccagaucaccguguggggcuuccacagcgacaacaagacccagaugaagagccuguacggcgacagcaacccccagaaguucaccagcagcgccaacggcgugaccacccacuacgugagccagaucggcgacuuccccgaccagaccgaggacggcggccugccccagagcggcagaaucgugguggacuacaugaugcagaagcccggcaagaccggcaccaucguguaccagagaggcgugcugcugccccagaagguguggugcgccagcggcagaagcaaggugaucaagggcagccugccccugaucggcgaggccgacugccugcacgaggaguacggcggccugaacaagagcaagcccuacuacaccggcaagcacgccaaggccaucggcaacugccccaucugggugaagaccccccugaagcuggccaacggcaccaaguacagaccccccgccaagcugcugaaggagagaggcuucuucggcgccaucgccggcuuccuggagggcggcugggagggcaugaucgccggcuggcacggcuacaccagccacggcgcccacggcguggccguggccgccgaccugaagagcacccaggaggccaucaacaagaucaccaagaaccugaacagccugagcgagcuggaggugaagaaccugcagagacugagcggcgccauggacgagcugcacaacgagauccuggagcuggacgagaagguggacgaccugagagccgacaccaucagcagccagaucgagcuggccgugcugcugagcaacgagggcaucaucaacagcgaggacgagcaccugcuggcccuggagagaaagcugaagaagaugcugggccccagcgccguggacaucggcaacggcugcuucgagaccaagcacaagugcaaccagaccugccuggacagaaucgccgccggcaccuucaacgccggcgaguucagccugcccaccuucgacagccugaacaucaccgccgccagccugaacgacgacggccuggacaaccacaccauccugcuguacuacagcaccgccgccagcagccuggccgugacccugaugcuggccaucuucaucguguacauggugagcagagacaacgugagcugcagcaucugccuguga

SEQ ID NO: 188551 - RNA, 1755 nt, Artificial Sequence; identical to SEQ ID NO: 188508
  derived and/or modified CDS sequence (opt4) from hemagglutinin__InfluenzaB__ALN39770

SEQ ID NO: 188552 - RNA, 1755 nt, Artificial Sequence; identical to SEQ ID NO: 188508
  derived and/or modified CDS sequence (opt4) from hemagglutinin__InfluenzaB__ALN39771

SEQ ID NO: 188553 - RNA, 1755 nt, Artificial Sequence; identical to SEQ ID NO: 188349
  derived and/or modified CDS sequence (opt4) from hemagglutinin__InfluenzaB__ALN39773

SEQ ID NO: 188554 - RNA, 1755 nt, Artificial Sequence; identical to SEQ ID NO: 188349
  derived and/or modified CDS sequence (opt4) from hemagglutinin__InfluenzaB__ALN39774

SEQ ID NO: 188555 - RNA, 1758 nt, Artificial Sequence
  derived and/or modified CDS sequence (opt4) from hemagglutinin__InfluenzaB__ALN39775
augcaggccaucaucgugcugcugaugguggugaccagcaacgccgacagaaucugcaccggcaucaccagcagcaacagcccccacguggugaagaccgccacccagggcgaggugaacgugaccggcgugaucccccugaccaccacccccaccaagagccacuucgccaaccugaagggcaccgagaccagaggcaagcugugccccaagugccugaacugcaccgaccuggacguggcccugggcagacccaagugcaccggcaagauccccagcgccagagugagcauccugcacgaggugagacccgugaccagcggcugcuuccccaucaugcacgacagaaccaagaucagacagcugcccaaccugcugagaggcuacgagcacaucagacugagcacccacaacgugaucaacgccgaggacgcccccggcggccccuacaagaucggcaccagcggcagcugccccaacaucaccaacggcaacggcuucuucgccaccauggccugggccgugcccaagaacgacaagaacaagaccgccaccaacccccugaccaucgaggugcccuacaucugcaccgagggcgaggaccagaucaccguguggggcuuccacagcgacaacgagacccagauggccaagcuguacggcgacagcaagccccagaaguucaccagcagcgccaacggcgugaccacccacuacgugagccagaucggcggcuuccccaaccagaccgaggacggcggccugccccagagcggcagaaucgugaucgacuacauggugcagaagagcggcaagaccggcaccaucaccuaccagagaggcauccugcugccccagaagguguggugcgugagcggcagaagcaaggugaucaagggcagccugccccugaucggcgaggccgacugccugcacgagaaguacggcggccugaacaagagcaagcccuacuacaccggcgagcacgccaaggccgugggcaacugccccaucugggugaagaccccccugaagcuggccaacggcaccaaguacagaccccccgccaagcugcugaaggagagaggcuucuucggcgccaucgccggcuuccuggagggcggcugggagggcaugaucgccggcuggcacggcuacaccagccacggcgcccacggcguggccguggccgccgaccugaagagcacccaggaggccaucaacaagaucaccaagaaccugaacagccugagcgagcuggaggugaagaaccugcagagacugagcggcgccauggacgagcugcacaacgagauccuggagcuggacgagaagguggacgaccugagagccgacaccaucagcagccagaucgagcuggccgugcugcugagcaacgagggcaucaucaacagcgaggacgagcaccugcuggcccuggagagaaagcugaagaagaugcugggccccagcgccguggagaucggcaacggcugcuucgagaccaagcacaagugcaaccagaccugccuggacagaaucgccgccggcaccuucgacgccggcgaguucagccugcccaccuucgacagccugaacaucaccgccgccagccugaacgacgacggccuggacaaccacaccauccugcuguacuacagcaccgccgccagcagccuggccgugacccugaugaucgccaucuucgugguguacauggugagcagagacaacgugagcugcagcaucugccuguga

SEQ ID NO: 188556 - RNA, 1755 nt, Artificial Sequence
  derived and/or modified CDS sequence (opt4) from hemagglutinin__InfluenzaB__ALN39776
augaaggccaucaucauccugcugaugguggugaccagcaacgccgacagaaucugcaccggcaucaccagcagcaacagcccccacguggugaagaccgccacccagggcgaggugaacgugaccggcgugaucccccugaccaccacccccaccaagagcuacuucgccaaccugaagggcaccagaaccagaggcaagcugugccccgacugccugaacugcaccgaccuggacguggcccugggcagacccaugugcgugggcaccacccccagcgccaaggccagcauccugcacgaggugagacccgugaccagcggcugcuuccccaucaugcacgacagaaccaagaucagacagcugcccaaccugcugagaggcuacgagaagaucagacugagcacccagaacgugaucgacgccgagaaggcccccggcggccccuacagacugggcaccagcggcagcugccccaacgccaccagcaagaucggcuucuucgccaccauggccugggccgugcccaaggacaacuacaagaacgccaccaacccccagaccguggaggugcccuacaucugcaccgagggcgaggaccagaucaccguguggggcuuccacagcgacaacaagacccagaugaagagccuguacggcgacagcaacccccagaaguucaccagcagcgccaacggcgugaccacccacuacgugagccagaucggcgacuuccccgaccagaccgaggacggcggccugccccagagcggcagaaucgugguggacuacaugaugcagaagcccggcaagaccggcaccaucguguaccagagaggcgugcugcugccccagaagguguggugcgccagcggcagaagcaaggugaucaagggcagccugccccugaucggcgaggccgacugccugcacgaggaguacggcggccugaacaagagcaagcccuacuacaccggcaagcacgccaaggccaucggcaacugccccaucugggugaagaccccccugaagcuggccaacggcaccaaguacagaccccccgccaagcugcugaaggagagaggcuucuucggcgccaucgccggcuuccuggagggcggcugggagggcaugaucgccggcuggcacggcuacaccagccacggcgcccacggcguggccguggccgccgaccugaagagcacccaggaggccaucaacaagaucaccaagaaccugaacagccugagcgagcuggaggugaagaaccugcagagacugagcggcgccauggacgagcugcacaacgagauccuggagcuggacgagaagguggacgaccugagagccgacaccaucagcagccagaucgagcuggccgugcugcugagcaacgagggcaucaucaacagcgaggacgagcaccugcuggcccuggagagaaagcugaagaagaugcugggccccagcgccguggacaucggcaacggcugcuucgagaccaagcacaagugcaaccagaccugccuggacagaaucgccgccggcaccuucaacgccggcgaguucagccugcccaccuucgacagccugaacaucaccgccgccagccugaacgacgacggccuggacaaccacaccauccugcuguacuacagcaccgccgccagcagccuggccgugacccugaugcuggccaucuucaucguguacauggugagcagagacaacgugagcugcagcaucugccuguga

SEQ ID NO: 188557 - RNA, 1755 nt, Artificial Sequence; identical to SEQ ID NO: 188512
  derived and/or modified CDS sequence (opt4) from hemagglutinin__InfluenzaB__ALN39778

SEQ ID NO: 188558 - RNA, 1758 nt, Artificial Sequence; identical to SEQ ID NO: 188535
  derived and/or modified CDS sequence (opt4) from hemagglutinin__InfluenzaB__ALN39779

SEQ ID NO: 188559 - RNA, 1755 nt, Artificial Sequence; identical to SEQ ID NO: 188349
  derived and/or modified CDS sequence (opt4) from hemagglutinin__InfluenzaB__ALN39780

SEQ ID NO: 188560 - RNA, 1758 nt, Artificial Sequence; identical to SEQ ID NO: 188535
  derived and/or modified CDS sequence (opt4) from hemagglutinin__InfluenzaB__ALN39781

SEQ ID NO: 188561 - RNA, 1758 nt, Artificial Sequence; identical to SEQ ID NO: 188499
  derived and/or modified CDS sequence (opt4) from hemagglutinin__InfluenzaB__ALN39782

SEQ ID NO: 188562 - RNA, 1755 nt, Artificial Sequence
  derived and/or modified CDS sequence (opt4) from hemagglutinin__InfluenzaB__ALN39783
augaaggccaucaucgugcugcugaugguggugaccagcaacgccgacagaaucugcaccggcaucaccagcagcaacagcccccacguggugaagaccgccacccagggcgaggugaacgugaccggcgugaucccccugaccaccacccccaccaagagcuacuucgccaaccugaagggcaccagaaccagaggcaagcugugccccgacugccugaacugcaccgaccuggacguggcccugggcagacccaugugcgugggcaccacccccagcgccaaggccagcauccugcacgaggugagacccgugaccagcggcugcuuccccaucaugcacgacagaaccaagaucagacagcugcccaaccugcugagaggcuacgagaagaucagacugagcacccagaacgugaucgacgccgagaaggcccccggcggccccuacagacugggcaccagcggcagcugccccaacgccaccagcaagaucggcuucuucgccaccauggccugggccgugcccaaggacaacuacaagaacgccaccaaccugcagaccguggaggugcccuacaucugcaccgagggcgaggaccagaucaccguguggggcuuccacagcgacaacaagacccagaugaagagccuguacggcgacagcaacccccagaaguucaccagcagcgccaacggcgugaccacccacuacgugagccagaucggcgacuuccccgaccagaccgaggacggcggccugccccagagcggcagaaucgugguggacuacauggugcagaagcccggcaagaccggcaccaucguguaccagagaggcgugcugcugccccagaagguguggugcgccagcggcagaagcaaggugaucaagggcagccugccccugaucggcgaggccgacugccugcacgaggaguacggcggccugaacaagagcaagcccuacuacaccggcaagcacgccaaggccaucggcaacugccccaucugggugaagaccccccugaagcuggccaacggcaccaaguacagaccccccgccaagcugcugaaggagagaggcuucuucggcgccaucgccggcuuccuggagggcggcugggagggcaugaucgccggcuggcacggcuacaccagccacggcgcccacggcguggccguggccgccgaccugaagagcacccaggaggccaucaacaagaucaccaagaaccugaacagccugagcgagcuggaggugaagaaccugcagagacugagcggcgccauggacgagcugcacaacgagauccuggagcuggacgagaagguggacgaccugagagccgacaccaucagcagccagaucgagcuggccgugcugcugagcaacgagggcaucaucaacagcgaggacgagcaccugcuggcccuggagagaaagcugaagaagaugcugggccccagcgccguggacaucggcaacggcugcuucgagaccaagcacaagugcaaccagaccugccuggacagaaucgccgccggcaccuucaacgccggcgaguucagccugcccaccuucgacagccugaacaucaccgccgccagccugaacgacgacggccuggacaaccacaccauccugcuguacuacagcaccgccgccagcagccuggccgugacccugaugcuggccaucuucaucguguacauggugagcagagacaacgugagcugcagcaucugccuguga

SEQ ID NO: 188563 - RNA, 1758 nt, Artificial Sequence; identical to SEQ ID NO: 188511
  derived and/or modified CDS sequence (opt4) from hemagglutinin__InfluenzaB__ALN39784

SEQ ID NO: 188564 - RNA, 1758 nt, Artificial Sequence; identical to SEQ ID NO: 188535
  derived and/or modified CDS sequence (opt4) from hemagglutinin__InfluenzaB__ALN39785

SEQ ID NO: 188565 - RNA, 1755 nt, Artificial Sequence; identical to SEQ ID NO: 188349
  derived and/or modified CDS sequence (opt4) from hemagglutinin__InfluenzaB__ALN39786

SEQ ID NO: 188566 - RNA, 1758 nt, Artificial Sequence; identical to SEQ ID NO: 188535
  derived and/or modified CDS sequence (opt4) from hemagglutinin__InfluenzaB__ALN39787

SEQ ID NO: 188567 - RNA, 1758 nt, Artificial Sequence; identical to SEQ ID NO: 188535
  derived and/or modified CDS sequence (opt4) from hemagglutinin__InfluenzaB__ALN39788

SEQ ID NO: 188568 - RNA, 1755 nt, Artificial Sequence
  derived and/or modified CDS sequence (opt4) from hemagglutinin__InfluenzaB__ALN39790
augaaggccaucaucgugcugcugaugguggugaccagcgacgccgacagaaucugcaccggcaucaccagcagcaacagcccccacguggugaagaccgccacccagggcgaggugaacgugaccggcgugaucccccugaccaccacccccaccaagagcuacuucgccaaccugaagggcaccagaaccagaggcaagcugugccccgacugccugaacugcaccgaccuggacguggcccugggcagacccaugugcgugggcaccacccccagcgccaaggccagcauccugcacgaggugagacccgugaccagcggcugcuuccccaucaugcacgacagaaccaagaucagacagcugcccaaccugcugagaggcuacgagaagaucagacugagcacccagaacgugaucgacgccgagaaggcccccggcggccccuacagacugggcaccagcggcagcugccccaacgccaccagcaagaucggcuucuucgccaccauggccugggccgugcccaaggacaacuacaagaacgccaccaacccccagaccguggaggugcccuacaucugcaccgagggcgaggaccagaucaccguguggggcuuccacagcgacaacaagacccagaugaagagccuguacggcgacagcaacccccagagauucaccagcagcgccaacggcgugaccacccacuacgugagccagaucggcgacuuccccgaccagaccgaggacggcggccugccccagagcggcagaaucgugguggacuacauggugcagaagcccggcaagaccggcaccaucguguaccagagaggcgugcugcugccccagaagguguggugcgccagcggcagaagcaaggugaucaagggcagccugccccugaucggcgaggccgacugccugcacgaggaguacggcggccugaacaagagcaagcccuacuacaccggcaagcacgccaaggccaucggcaacugccccaucugggugaagaccccccugaagcuggccaacggcaccaaguacagaccccccgccaagcugcugaaggagagaggcuucuucggcgccaucgccggcuuccuggagggcggcugggagggcaugaucgccggcuggcacggcuacaccagccacggcgcccacggcguggccguggccgccgaccugaagagcacccaggaggccaucaacaagaucaccaagaaccugaacagccugagcgagcuggaggugaagaaccugcagagacugagcggcgccauggacgagcugcacaacgagauccuggagcuggacgagaagguggacgaccugagagccgacaccaucagcagccagaucgagcuggccgugcugcugagcaacgagggcaucaucaacagcgaggacgagcaccugcuggcccuggagagaaagcugaagaagaugcugggccccagcgccguggacaucggcaacggcugcuucgagaccaagcacaagugcaaccagaccugccuggacagaaucgccgccggcaccuucaacgccggcgaguucagccugcccaccuucgacagccugaacaucaccgccgccagccugaacgacgacggccuggacaaccacaccauccugcuguacuacagcaccgccgccagcagccuggccgugacccugaugcuggccaucuucaucguguacauggugagcagagacaacgugagcugcagcaucugccuguga

SEQ ID NO: 188569 - RNA, 1755 nt, Artificial Sequence
  derived and/or modified CDS sequence (opt4) from hemagglutinin__InfluenzaB__ALN39791
augaaggccaucaucgugcugcugaugguggugaugagcaacgccgacagaaucugcaccggcaucaccagcagcaacagcccccacguggugaagaccgccacccagggcgaggugaacgugaccggcgugaucccccugaccaccacccccaccaagagcuacuucgccaaccugaagggcaccagaaccagaggcaagcugugccccgacugccugaacugcaccgaccuggacguggcccugggcagacccaugugcgugggcaccacccccagcgccaaggccagcauccugcacgaggugagacccgugaccagcggcugcuuccccaucaugcacgacagaaccaagaucagacagcugcccaaccugcugagaggcuacgagaagaucagacugagcacccagaacgugaucgacgccgagaaggcccccggcggccccuacagacugggcaccagcggcagcugccccaacgccaccagcaagaucggcuucuucgccaccauggccugggccgugcccaaggacaacuacaagaacgccaccaacccccagaccguggaggugcccuacaucugcaccgagggcgaggaccagaucaccguguggggcuuccacagcgacaacaagacccagaugaagagccuguacggcgacagcaacccccagaaguucaccagcagcgccaacggcgugaccacccacuacgugagccagaucggcgacuuccccgaccagaccgaggacggcggccugccccagagcggcagaaucgugguggacuacauggugcagaagcccggcaagaccggcaccaucguguaccagagaggcgugcugcugccccagaagguguggugcgccagcggcagaagcaaggugaucaagggcagccugccccugaucggcgaggccgacugccugcacgaggaguacggcggccugaacaagagcaagcccuacuacaccggcaagcacgccaaggccaucggcaacugccccaucugggugaagaccccccugaagcuggccaacggcaccaaguacagaccccccgccaagcugcugaaggagagaggcuucuucggcgccaucgccggcuuccuggagggcggcugggagggcaugaucgccggcuggcacggcuacaccagccacggcgcccacggcguggccguggccgccgaccugaagagcacccaggaggccaucaacaagaucaccaagaaccugaacagccugagcgagcuggaggugaagaaccugcagagacugagcggcgccauggacgagcugcacaacgagauccuggagcuggacgagaagguggacgaccugagagccgacaccaucagcagccagaucgagcuggccgugcugcugagcaacgagggcaucaucaacagcgaggacgagcaccugcuggcccuggagagaaagcugaagaagaugcugggccccagcgccguggacaucggcaacggcugcuucgagaccaagcacaagugcaaccagaccugccuggacagaaucgccgccggcaccuucaacgccggcgaguucagccugcccaccuucgacagccugaacaucaccgccgccagccugaacgacgacggccuggacaaccacaccauccugcuguacuacagcaccgccgccagcagccuggccgugacccugaugcuggccaucuucaucguguacauggugagcagagacaacgugagcugcagcaucugccuguga

SEQ ID NO: 188570 - RNA, 1758 nt, Artificial Sequence; identical to SEQ ID NO: 188535
  derived and/or modified CDS sequence (opt4) from hemagglutinin__InfluenzaB__ALN39792

SEQ ID NO: 188571 - RNA, 1758 nt, Artificial Sequence; identical to SEQ ID NO: 188535
  derived and/or modified CDS sequence (opt4) from hemagglutinin__InfluenzaB__ALN39793

SEQ ID NO: 188572 - RNA, 1755 nt, Artificial Sequence
  derived and/or modified CDS sequence (opt4) from hemagglutinin__InfluenzaB__ALN39794
augaaggccaucaucauccugcugaugguggugaccagcaacgccgacagaaucugcaccggcaucaccagcagcaacagcccccacguggugaagaccgccacccagggcgaggugaacgugaccggcgugaucccccugaccaccacccccaccaagagcuacuucgccaaccugaagggcaccagaaccagaggcaagcugugccccgacugccugaacugcaccgaccuggacguggcccugggcagacccaugugcgugggcaccacccccagcgccaaggccagcauccugcacgaggugagacccgugaccagcggcugcuuccccaucaugcacgacagaaccaagaucagacagcugcccaaccugcugagaggcuacgagaagaucagacugagcacccagaacgugaucgacgccgagaaggcccccggcggccccuacagacugggcaccagcggcagcugccccaacgccaccagcaagaucggcuucuucgccaccauggccugggccgugcccaaggacaacuacaagaacgccaccaacccccagaccguggaggugcccuacaucugcaccgagggcgaggaccagaucaccguguggggcuuccacagcgacaacaagacccagaugaagagccuguacggcgacagcaacccccagaaguucaccagcagcgccgacggcgugaccacccacuacgugagccagaucggcgacuuccccgaccagaccgaggacggcggccugccccagagcggcagaaucgugguggacuacaugaugcagaagcccggcaagaccggcaccaucguguaccagagaggcgugcugcugccccagaagguguggugcgccagcggcagaagcaaggugaucaagggcagccugccccugaucggcgaggccgacugccugcacgaggaguacggcggccugaacaagagcaagcccuacuacaccggcaagcacgccaaggccaucggcaacugccccaucugggugaagaccccccugaagcuggccaacggcaccaaguacagaccccccgccaagcugcugaaggagagaggcuucuucggcgccaucgccggcuuccuggagggcggcugggagggcaugaucgccggcuggcacggcuacaccagccacggcgcccacggcguggccguggccgccgaccugaagagcacccaggaggccaucaacaagaucaccaagaaccugaacagccugagcgagcuggaggugaagaaccugcagagacugagcggcgccauggacgagcugcacaacgagauccuggagcuggacgagaagguggacgaccugagagccgacaccaucagcagccagaucgagcuggccgugcugcugagcaacgagggcaucaucaacagcgaggacgagcaccugcuggcccuggagagaaagcugaagaagaugcugggccccagcgccguggacaucggcaacggcugcuucgagaccaagcacaagugcaaccagaccugccuggacagaaucgccgccggcaccuucaacgccggcgaguucagccugcccaccuucgacagccugaacaucaccgccgccagccugaacgacgacggccuggacaaccacaccauccugcuguacuacagcaccgccgccagcagccuggccgugacccugaugcuggccaucuucaucguguacauggugagcagagacaacgugagcugcagcaucugccuguga

SEQ ID NO: 188573 - RNA, 1755 nt, Artificial Sequence; identical to SEQ ID NO: 188512
  derived and/or modified CDS sequence (opt4) from hemagglutinin__InfluenzaB__ALN39795

SEQ ID NO: 188574 - RNA, 1758 nt, Artificial Sequence
  derived and/or modified CDS sequence (opt4) from hemagglutinin__InfluenzaB__ALN39796
augaaggccaucaucgugcugcugaugguggugaccagcaacgccgacagaaucugcaccggcaucaccagcagcaacagcccccacguggugaagaccgccacccagggcgaggugaacgugaccggcgugaucccccugaccaccacccccaccaagagccacuucgccaaccugaagggcaccgagaccagaggcaagcugugccccaagugccugaacugcaccgaccuggacguggcccugggcagacccaagugcaccggcaagauccccagcgccagagugagcauccugcacgaggugagacccgugaccagcggcugcuuccccaucaugcacgacagaaccaagaucagacagcugcccaaccugcugagaggcuacgagcacaucagacugagcacccacaacgugaucaacgccgaggacgcccccggcggccccuacaagaucggcaccagcggcagcugccccaacgccaccaacggcaacggcuucuucgccaccauggccugggccgugcccaagaacgacaagaacaagaccgccaccaacccccugaccaucgaggugcccuacaucugcaccgagggcgaggaccagaucaccguguggggcuuccacagcgacaacgagacccagauggccaagcuguacggcgacagcaagccccagaaguucaccagcagcgccaacggcgugaccacccacuacgugagccagaucggcggcuuccccaaccagaccgaggacggcggccugccccagagcggcagaaucgugguggacuacauggugcagaagagcggcaagaccggcaccaucaccuaccagagaggcauccugcugccccagaagguguggugcgccagcggcagaagcaaggugaucaagggcagccugccccugaucggcgaggccgacugccugcacgagaaguacggcggccugaacaagagcaagcccuacuacaccggcgagcacgccaaggccaucggcaacugccccaucugggugaagaccccccugaagcuggccaacggcaccaaguacagaccccccgccaagcugcugaaggagagaggcuucuucggcgccaucgccggcuuccuggagggcggcugggagggcaugaucgccggcuggcacggcuacaccagccacggcgcccacggcguggccguggccgccgaccugaagagcacccaggaggccaucaacaagaucaccaagaaccugaacagccugagcgagcuggaggugaagaaccugcagagacugagcggcgccauggacgagcugcacaacgagauccuggagcuggacgagaagguggacgaccugagagccgacaccaucagcagccagaucgagcuggccgugcugcugagcaacgagggcaucaucaacagcgaggacgagcaccugcuggcccuggagagaaagcugaagaagaugcugggccccagcgccguggagaucggcaacggcugcuucgagaccaagcacaagugcaaccagaccugccuggacagaaucgccgccggcaccuucgacgccggcgaguucagccugcccaccuucgacagccugaacaucaccgccgccagccugaacgacgacggccuggacaaccacaccauccugcuguacuacagcaccgccgccagcagccuggccgugacccugaugaucgccaucuucgugguguacauggugagcagagacaacgugagcugcagcaucugccuguga

SEQ ID NO: 188575 - RNA, 1755 nt, Artificial Sequence; identical to SEQ ID NO: 188512
  derived and/or modified CDS sequence (opt4) from hemagglutinin__InfluenzaB__ALN39797

SEQ ID NO: 188576 - RNA, 1755 nt, Artificial Sequence
  derived and/or modified CDS sequence (opt4) from hemagglutinin__InfluenzaB__ALN39798
augaaggccaucaucgugcugcugaugguggugaccagcaacgccgacagaaucugcaccggcaucaccagcagcagcagcccccacguggugaagaccgccacccagggcgaggugaacgugaccggcgugaucccccugaccaccacccccaccaagagcuacuucgccaaccugaagggcaccagaaccagaggcaagcugugccccgacugccugaacugcaccgaccuggacguggcccugggcagacccaugugcgugggcaccacccccagcgccaaggccagcauccugcacgaggugagacccgugaccagcggcugcuuccccaucaugcacgacagaaccaagaucagacagcugcccaaccugcugagaggcuacgagaagaucagacugagcacccagaacgugaucgacgccgagaaggcccccggcggccccuacagacugggcaccagcggcagcugccccaacgccaccagcaagaucggcuucuucgccaccauggccugggccgugcccaaggacaacuacaagaacgccaccaacccccagaccguggaggugcccuacaucugcaccgagggcgaggaccagaucaccguguggggcuuccacagcgacaacaagacccagaugaagagccuguacggcgacagcaacccccagaaguucaccagcagcgccaacggcgugaccacccacuacgugagccagaucggcgacuuccccgaccagaccgaggacggcggccugccccagagcggcagaaucgugguggacuacaugaugcagaagcccggcaagaccggcaccaucguguaccagagaggcgugcugcugccccagaagguguggugcgccagcggcagaagcaaggugaucaagggcagccugccccugaucggcgaggccgacugccugcacgaggaguacggcggccugaacaagagcaagcccuacuacaccggcaagcacgccaaggccaucggcaacugccccaucugggugaagaccccccugaagcuggccaacggcaccaaguacagaccccccgccaagcugcugaaggagagaggcuucuucggcgccaucgccggcuuccuggagggcggcugggagggcaugaucgccggcuggcacggcuacaccagccacggcgcccacggcguggccguggccgccgaccugaagagcacccaggaggccaucaacaagaucaccaagaaccugaacagccugagcgagcuggaggugaagaaccugcagagacugagcggcgccauggacgagcugcacaacgagauccuggagcuggacgagaagguggacgaccugagagccgacaccaucagcagccagaucgagcuggccgugcugcugagcaacgagggcaucaucaacagcgaggacgagcaccugcuggcccuggagagaaagcugaagaagaugcugggccccagcgccguggacaucggcaacggcugcuucgagaccaagcacaagugcaaccagaccugccuggacagaaucgccgccggcaccuucaacgccggcgaguucagccugcccaccuucgacagccugaacaucaccgccgccagccugaacgacgacggccuggacaaccacaccauccugcuguacuacagcaccgccgccagcagccuggccgugacccugaugcuggccaucuucaucguguacauggugagcagagacaacgugagcugcagcaucugccuguga

SEQ ID NO: 188577 - RNA, 1755 nt, Artificial Sequence; identical to SEQ ID NO: 188349
  derived and/or modified CDS sequence (opt4) from hemagglutinin__InfluenzaB__ALN39799

SEQ ID NO: 188578 - RNA, 1755 nt, Artificial Sequence
  derived and/or modified CDS sequence (opt4) from hemagglutinin__InfluenzaB__ALN39800
augaaggccaucaucgugcugcugaugguggugaccagcaacgccgacagaaucugcaccggcaucaccagcagcaacagcccccacguggugaagaccgccacccagggcgaggugaacgugaccggcgugaucccccugaccaccacccccaccaagagcuacuucgccaaccugaagggcaccagaaccagaggcaagcugugccccgacugccugaacugcaccgaccuggacguggcccugggcagacccaugugcgugggcaccacccccagcgccaaggccagcauccugcacgaggugagacccgugaccagcggcugcuuccccaucaugcacgacagaaccaagaucagacagcugcccaaccugcugagaggcuacgagaagaucagacugagcacccagaacgugaucgacgccgagaaggcccccggcggccccuacagacugggcaccagcggcagcugccccaacgccaccagcaagaucggcuucuucgccaccauggccugggccgugcccaaggacaacuacaagaacgccaccaacccccagaccguggaggugcccuacaucugcaccgagggcgaggaccagaucaccguguggggcuuccacagcgacaacaagacccagaugaagagccuguacggcgacagcaacccccagaaguucaccagcagcgccaacggcgugaccacccacuacgugagccagaucggcgacuuccccgaccagaccgaggacggcggccugccccagagcggcagaaucgugguggacuacaugaugcagaagcccggcaagaccggcaccaucguguaccagagaggcgugcugcugccccagaagguguggugcgccagcggcagaagcaaggugaucaagggcagccugccccugaucggcgaggccgacugccugcacgaggaguacggcggccugaacaagagcaagcccuacuacaccggcaagcacgccaaggccaucggcaacugccccaucugggugaagaccccccugaagcuggccaacggcaccaaguacagaccccccgccaagcugcugaaggagagaggcuucuucggcgccaucgccggcuuccuggagggcggcugggagggcaugaucgccggcuggcacggcuacaccagccacggcgcccacggcguggccguggccgccgaccugaagagcacccaggaggccaucaacaagaucaccaagaaccugaacagccugagcgagcuggaggugaagaaccugcagagacugagcggcgccauggacgagcugcacaacgagauccuggagcuggacgagaagguggacgaccugagagccgacaccaucagcagccagaucgagcuggccgugcugcugagcaacgagggcaucaucaacagcgaggacgagcaccugcuggcccuggagaagaagcugaagaagaugcugggccccagcgccguggacaucggcaacggcugcuucgagaccaagcacaagugcaaccagaccugccuggacagaaucgccgccggcaccuucaacgccggcgaguucagccugcccaccuucgacagccugaacaucaccgccgccagccugaacgacgacggccuggacaaccacaccauccugcuguacuacagcaccgccgccagcagccuggccgugacccugaugcuggccaucuucaucguguacauggugagcagagacaacgugagcugcagcaucugccuguga

SEQ ID NO: 188579 - RNA, 1755 nt, Artificial Sequence; identical to SEQ ID NO: 188569
  derived and/or modified CDS sequence (opt4) from hemagglutinin__InfluenzaB__ALN39801

SEQ ID NO: 188580 - RNA, 1755 nt, Artificial Sequence; identical to SEQ ID NO: 188512
  derived and/or modified CDS sequence (opt4) from hemagglutinin__InfluenzaB__ALN39802

SEQ ID NO: 188581 - RNA, 1755 nt, Artificial Sequence; identical to SEQ ID NO: 188569
  derived and/or modified CDS sequence (opt4) from hemagglutinin__InfluenzaB__ALN39803

SEQ ID NO: 188582 - RNA, 1755 nt, Artificial Sequence; identical to SEQ ID NO: 188508
  derived and/or modified CDS sequence (opt4) from hemagglutinin__InfluenzaB__ALN39804

SEQ ID NO: 188583 - RNA, 1758 nt, Artificial Sequence; identical to SEQ ID NO: 188535
  derived and/or modified CDS sequence (opt4) from hemagglutinin__InfluenzaB__ALN39805

SEQ ID NO: 188584 - RNA, 1758 nt, Artificial Sequence; identical to SEQ ID NO: 187049
  derived and/or modified CDS sequence (opt4) from hemagglutinin__InfluenzaB__ACN29380

SEQ ID NO: 188585 - RNA, 1758 nt, Artificial Sequence; identical to SEQ ID NO: 187381
  derived and/or modified CDS sequence (opt4) from hemagglutinin__InfluenzaB__EPI498048

SEQ ID NO: 188586 - RNA, 1758 nt, Artificial Sequence
  derived and/or modified CDS sequence (opt4) from hemagglutinin__InfluenzaB__ANC28539
augaaggccaucaucgugcugcugaugguggugaccagcaacgccgacagaaucugcaccggcaucaccagcagcaacagcccccacguggugaagaccgccacccagggcgaggugaacgugaccggcgugaucccccugaccaccacccccaccaagagccacuucgccaaccugaagggcaccgagaccagaggcaagcugugccccaagugccugaacugcaccgaccuggacguggcccugggcagacccaagugcaccggcaagauccccagcgccagagugagcauccugcacgaggugagacccgugaccagcggcugcuuccccaucaugcacgacagaaccaagaucagacagcugcccaaccugcugagaggcuacgagcacaucagacugagcacccacaacgugaucaacgccgagaacgcccccggcggccccuacaagaucggcaccagcggcagcugccccaacaucaccaacggcaacggcuucuucgccaccauggccugggccgugcccaagaacgacaagaacaagaccgccaccaacccccugaccaucgaggugcccuacaucugcaccgagggcgaggaccagaucaccguguggggcuuccacagcgacaacgaggcccagauggccaagcuguacggcgacagcaagccccagaaguucaccagcagcgccaacggcgugaccacccacuacgugagccagaucggcggcuuccccaaccagaccgaggacggcggccugccccagagcggcagaaucgugguggacuacauggugcagaagagcggcaagaccggcaccaucaccuaccagagaggcauccugcugccccagaagguguggugcgccagcggcagaagcaaggugaucaagggcagccugccccugaucggcgaggccgacugccugcacgagaaguacggcggccugaacaagagcaagcccuacuacaccggcgagcacgccaaggccaucggcaacugccccaucugggugaagaccccccugaagcuggccaacggcaccaaguacagaccccccgccaagcugcugaaggagagaggcuucuucggcgccaucgccggcuuccuggagggcggcugggagggcaugaucgccggcuggcacggcuacaccagccacggcgcccacggcguggccguggccgccgaccugaagagcacccaggaggccaucaacaagaucaccaagaaccugaacagccugagcgagcuggaggugaagaaccugcagagacugagcggcgccauggacgagcugcacaacgagauccuggagcuggacgagaagguggacgaccugagagccgacaccaucagcagccagaucgagcuggccgugcugcugagcaacgagggcaucaucaacagcgaggacgagcaccugcuggcccuggagagaaagcugaagaagaugcugggccccagcgccguggagaucggcaacggcugcuucgagaccaagcacaagugcaaccagaccugccuggacagaaucgccgccggcaccuucgacgccggcgaguucagccugcccaccuucgacagccugaacaucaccgccgccagccugaacgacgacggccuggacaaccacaccauccugcuguacuacagcaccgccgccagcagccuggccgugacccugaugaucgccaucuucgugguguacauggugagcagagacaacgugagcugcagcaucugccuguga

SEQ ID NO: 188587 - RNA, 1758 nt, Artificial Sequence
  derived and/or modified CDS sequence (opt4) from hemagglutinin__InfluenzaB__EPI827073
augaaggccaucaucgugcugcugaugguggugaccagcaacgccgacagaaucugcaccggcaucaccagcagcaacagcccccacguggugaagaccgccacccagggcgaggugaacgugaccggcgugaucccccugaccaccacccccaccaagagccacuucgccaaccugaagggcaccgagaccagaggcaagcugugccccaagugccugaacugcaccgaccuggacguggcccugggcagacccaagugcaccggcaagauccccagcgccagagugagcauccugcacgaggugagacccgugaccagcggcugcuuccccaucaugcacgacagaaccaagaucagacagcugcccaaccugcugagaggcuacgagcacaucagacugagcacccacaacgugaucaacgccgagaacgcccccggcggccccuacaagaucggcaccagcggcagcugccccaacaucaccaacggcaacggcuucuucgccaccauggccugggccgugcccaagaacgacaagaacaagaccgccaccaacccccugaccaucgaggugcccuacaucugcaccgagggcgaggaccagaucaccguguggggccugcacagcgacaacgagauccagauggccaagcuguacggcgacagcaagccccagaaguucaccagcagcgccaacggcgugaccacccacuacgugagccagaucggcggcuuccccaaccagaccgaggacggcggccugccccagagcggcagaaucgugguggacuacauggugcagaagagcggcaagaccggcaccaucaccuaccagagaggcauccugcugccccagaagguguggugcgccagcggcagaagcaaggugaucaagggcagccugccccugaucggcgaggccgacugccugcacgagaaguacggcggccugaacaagagcaagcccuacuacaccggcgagcacgccaaggccaucggcaacugccccaucugggugaagaccccccugaagcuggccaacggcaccaaguacagaccccccgccaagcugcugaaggagagaggcuucuucggcgccaucgccggcuuccuggagggcggcugggagggcaugaucgccggcuggcacggcuacaccagccacggcgcccacggcguggccguggccgccgaccugaagagcacccaggaggccaucaacaagaucaccaagaaccugaacagccugagcgagcuggaggugaagaaccugcagagacugagcggcgccauggacgagcugcacaacgagauccuggagcuggacgagaagguggacgaccugagagccgacaccaucagcagccagaucgagcuggccgugcugcugagcaacgagggcaucaucaacagcgaggacgagcaccugcuggcccuggagagaaagcugaagaagaugcugggccccagcgccguggagaucggcaacggcugcuucgagaccaagcacaagugcaaccagaccugccuggacagaaucgccgccggcaccuucgacgccggcgaguucagccugcccaccuucgacagccugaacaucaccgccgccagccugaacgacgacggccuggacaaccacaccauccugcuguacuacagcaccgccgccagcagccuggccgugacccugaugaucgccaucuucgugguguacauggugagcagagacaacgugagcugcagcaucugccuguga

SEQ ID NO: 188588 - RNA, 1758 nt, Artificial Sequence; identical to SEQ ID NO: 186807
  derived and/or modified CDS sequence (opt4) from hemagglutinin__InfluenzaB__EPI244699

SEQ ID NO: 188589 - RNA, 1758 nt, Artificial Sequence; identical to SEQ ID NO: 186800
  derived and/or modified CDS sequence (opt4) from hemagglutinin__InfluenzaB__EPI244702

SEQ ID NO: 188590 - RNA, 1755 nt, Artificial Sequence; identical to SEQ ID NO: 188189
  derived and/or modified CDS sequence (opt4) from hemagglutinin__InfluenzaB__EPI540671

SEQ ID NO: 188591 - RNA, 1755 nt, Artificial Sequence
  derived and/or modified CDS sequence (opt4) from hemagglutinin__InfluenzaB__EPI573303
augaaggccaucaucgugcugcugaugguggugaccagcaacgccgacagaaucugcaccggcaucaccagcagcaacagcccccacguggugaagaccgccacccagggcgaggugaacgugaccggcgugaucccccugaccaccacccccaccaagagcuacuucgccaaccugaagggcaccagaaccagaggcaagcugugccccgacugccugaacugcaccgaccuggacguggcccugggcagacccaugugcgugggcaccacccccagcgccaaggccagcauccugcacgaggugagacccgugaccagcggcugcuuccccaucaugcacgacagaaccaagaucagacagcugcccaaccugcugagaggcuacgagaagaucagacugagcacccagaacgugaucgacgccgagaaggcccccggcggccccuacagacugggcaccagcggcagcugccccaacgccaccagcaagaucggcuucuucgccaccauggccugggccgugcccaaggacaacuacaagaacgccaccaacccccugaccguggaggugcccuacaucugcaccgagggcgaggaccagaucaccguguggggcuuccacagcgacgacaagacccagaugaagagccuguacggcgacagcaacccccagaaguucaccagcagcgccaacggcgugaccacccacuacgugagccagaucggcgacuuccccgaccagaccgaggacggcggccugccccagagcggcagaaucgugguggacuacaugaugcagaagcccggcaagaccggcaccaucguguaccagagaggcgugcugcugccccagaagguguggugcgccagcggcagaagcaaggugaucaagggcagccugccccugaucggcgaggccgacugccugcacgaggaguacggcggccugaacaagagcaagcccuacuacaccggcaagcacgccaaggccaucggcaacugccccaucugggugaagaccccccugaagcuggccaacggcaccaaguacagaccccccgccaagcugcugaaggagagaggcuucuucggcgccaucgccggcuuccuggagggcggcugggagggcaugaucgccggcuggcacggcuacaccagccacggcgcccacggcguggccguggccgccgaccugaagagcacccaggaggccaucaacaagaucaccaagaaccugaacagccugagcgagcuggaggugaagaaccugcagagacugagcggcgccauggacgagcugcacaacgagauccuggagcuggacgagaagguggacgaccugagagccgacaccaucagcagccagaucgagcuggccgugcugcugagcaacgagggcaucaucaacagcgaggacgagcaccugcuggcccuggagagaaagcugaagaagaugcugggccccagcgccguggacaucggcaacggcugcuucgagaccaagcacaagugcaaccagaccugccuggacagaaucgccgccggcaccuucaacgccggcgaguucagccugcccaccuucgacagccugaacaucaccgccgccagccugaacgacgacggccuggacaaccacaccauccugcuguacuacagcaccgccgccagcagccuggccgugacccugaugcuggccaucuucaucguguacauggugagcagagacaacgugagcugcagcaucugccuguga

SEQ ID NO: 188592 - RNA, 1755 nt, Artificial Sequence
  derived and/or modified CDS sequence (opt4) from hemagglutinin__InfluenzaB__EPI829466
augaaggccaucaucgugcugcugaugguggugaccagcaacgccgacagaaucugcaccggcaucaccagcagcaacagcccccacguggugaagaccgccacccagggcgaggugaacgugaccggcgugaucccccugaccaccacccccaccaagagcuacuucgccaaccugaagggcaccagaaccagaggcaagcugugccccgacugccugaacugcaccgaccuggacguggcccugggcagacccaugugcgugggcaccacccccagcgccaaggccagcauccugcacgaggugagacccgugaccagcggcugcuuccccaucaugcacgacagaaccaagaucagacagcugcccaaccugcugagaggcuacgagaagaucagacugagcacccagaacgugaucgacgccgagaaggcccccggcggccccuacagacugggcaccagcggcagcugccccaacgccaccagcaagaucggcuucuucgccaccauggccugggccgugcccaaggacaacuacaagaacgccaccaacccccugaccguggaggugcccuacaucugcaccgagggcgaggaccagaucaccguguggggcuuccacagcgacgacaagacccagaugaagagccuguacggcgacagcaacccccagaaguucaccagcagcgccaacggcgugaccacccacuacgugagccagaucggcgacuuccccgaccagaccgaggacgagggccugccccagagcggcagaaucgugguggacuacaugaugcagaagcccggcaagaccggcaccaucguguaccagagaggcgugcugcugccccagaagguguggugcgccagcggcagaagcaaggugaucaagggcagccugccccugaucggcgaggccgacugccugcacgaggaguacggcggccugaacaagagcaagcccuacuacaccggcaagcacgccaaggccaucggcaacugccccaucugggugaagaccccccugaagcuggccaacggcaccaaguacagaccccccgccaagcugcugaaggagagaggcuucuucggcgccaucgccggcuuccuggagggcggcugggagggcaugaucgccggcuggcacggcuacaccagccacggcgcccacggcguggccguggccgccgaccugaagagcacccaggaggccaucaacaagaucaccaagaaccugaacagccugagcgagcuggaggugaagaaccugcagagacugagcggcgccauggacgagcugcacaacgagauccuggagcuggacgagaagguggacgaccugagagccgacaccaucagcagccagaucgagcuggccgugcugcugagcaacgagggcaucaucaacagcgaggacgagcaccugcuggcccuggagagaaagcugaagaagaugcugggccccagcgccguggacaucggcaacggcugcuucgagaccaagcacaagugcaaccagaccugccuggacagaaucgccgccggcaccuucaacgccggcgaguucagccugcccaccuucgacagccugaacaucaccgccgccagccugaacgacgacggccuggacaaccacaccauccugcuguacuacagcaccgccgccagcagccuggccgugacccugaugcuggccaucuucaucguguacauggugagcagagacaacgugagcugcagcaucugccuguga

SEQ ID NO: 188593 - RNA, 1755 nt, Artificial Sequence
  derived and/or modified CDS sequence (opt4) from hemagglutinin__InfluenzaB__EPI684429
augaaggccaucaucgugcugcugaugguggugaugagcaacgccgacagaaucugcaccggcaucaccagcagcaacagcccccacguggugaagaccgccacccagggcgaggugaacgugaccggcgugaucccccugaccaccacccccaccaagagcuacuucgccaaccugaagggcaccagaaccagaggcaagcugugccccgacugccugaacugcaccgaccuggacguggcccugggcagacccaugugcgugggcaccacccccagcgccaaggccagcauccugcacgaggugagacccgugaccagcggcugcuuccccaucaugcacgacagaaccaagaucagacagcugcccaaccugcugagaggcuacgagaagaucagacugagcacccagaacgugaucgacgccgagaaggcccccggcggccccuacagacugggcaccagcggcagcugccccaacgccaccagcaagaucggcuucuucgccaccauggccugggccgugcccaaggacaacuacaagaacgccaccaacccccagaccguggaggugcccuacaucugcaccgagggcgaggaccagaucaccguguggggcuuccacagcgacaacaagacccagaugaagagccuguacggcgacagcaacccccagaaguucaccagcagcgccaacggcgugaccacccacuacgugagccagaucggcgacuuccccgaccagaccgaggacggcggccugccccagagcggcagaaucgugguggacuacauggugcagaagcccggcaagaccggcaccaucguguaccagagaggcgugcugcugccccagaagguguggugcgugagcggcagaagcaaggugaucaagggcagccugccccugaucggcgaggccgacugccugcacgaggaguacggcggccugaacaagagcaagcccuacuacaccggcaagcacgccaaggccaucggcaacugccccaucugggugaagaccccccugaagcuggccaacggcaccaaguacagaccccccgccaagcugcugaaggagagaggcuucuucggcgccaucgccggcuuccuggagggcggcugggagggcaugaucgccggcuggcacggcuacaccagccacggcgcccacggcguggccguggccgccgaccugaagagcacccaggaggccaucaacaagaucaccaagaaccugaacagccugagcgagcuggaggugaagaaccugcagagacugagcggcgccauggacgagcugcacaacgagauccuggagcuggacgagaagguggacgaccugagagccgacaccaucagcagccagaucgagcuggccgugcugcugagcaacgagggcaucaucaacagcgaggacgagcaccugcuggcccuggagagaaagcugaagaagaugcugggccccagcgccguggacaucggcaacggcugcuucgagaccaagcacaagugcaaccagaccugccuggacagaaucgccgccggcaccuucaacgccggcgaguucagccugcccaccuucgacagccugaacaucaccgccgccagccugaacgacgacggccuggacaaccacaccauccugcuguacuacagcaccgccgccagcagccuggccgugacccugaugcuggccaucuucaucguguacauggugagcagagacaacgugagcugcagcaucugccuguga

SEQ ID NO: 188594 - RNA, 1758 nt, Artificial Sequence; identical to SEQ ID NO: 186812
  derived and/or modified CDS sequence (opt4) from hemagglutinin__InfluenzaB__AFH58447

SEQ ID NO: 188595 - RNA, 1758 nt, Artificial Sequence
  derived and/or modified CDS sequence (opt4) from hemagglutinin__InfluenzaB__EPI173279
augaaggccaucaucgugauccugaugguggugaccagcaacgccgacagaaucugcaccggcaucaccagcagcaacagcccccacguggugaagaccgccacccagggcgaggugaacgugaccggcgugaucccccugaccaccacccccaccaagagccacuucgccaaccugaagggcaccgagaccagaggcaagcugugccccaagugccugaacugcaccgaccuggacguggcccugggcagacccaagugcaccggcaagauccccagcgccagagugagcauccugcacgaggugagacccgugaccagcggcugcuuccccaucaugcacgacagaaccaagaucagacagcugcccaaccugcugagaggcuacgagcacaucagacugagcacccacaacgugaucaacgccgagaacgcccccggcggccccuacaagaucggcaccagcggcagcugccccaacaucaccaacggcaacggcuucuucgccaccauggccugggccgugcccaagaacgacaagaacaagaccgccaccaacccccugaccaucgaggugcccuacaucugcaccgagggcgaggaccagaucaccguguggggcuuccacagcgacagcgagacccagauggccaagcuguacggcgacagcaagccccagaaguucaccagcagcgccaacggcgugaccacccacuacgugagccagaucggcggcuuccccaaccagaccgaggacggcggccugccccagagcggcagaaucgugguggacuacauggugcagaagagcggcaagaccggcaccaucaccuaccagagaggcauccugcugccccagaagguguggugcgccagcggcagaagcaaggugaucaagggcagccugccccugaucggcgaggccgacugccugcacgagaaguacggcggccugaacaagagcaagcccuacuacaccggcgagcacgccaaggccaucggcaacugccccaucugggugaagaccccccugaagcuggccaacggcaccaaguacagaccccccgccaagcugcugaaggagagaggcuucuucggcgccaucgccggcuuccuggagggcggcugggagggcaugaucgccggcuggcacggcuacaccagccacggcgcccacggcguggccguggccgccgaccugaagagcacccaggaggccaucaacaagaucaccaagaaccugaacagccugagcgagcuggaggugaagaaccugcagagacugagcggcgccauggacgagcugcacaacgagauccuggagcuggacgagaagguggacgaccugagagccgacaccaucagcagccagaucgagcuggccgugcugcugagcaacgagggcaucaucaacagcgaggacgagcaccugcuggcccuggagagaaagcugaagaagaugcugggccccagcgccguggagaucggcaacggcugcuucgagaccaagcacaagugcaaccagaccugccuggacagaaucgccgccggcaccuucgacgccggcgaguucagccugcccaccuucgacagccugaacaucaccgccgccagccugaacgacgacggccuggacaaccacaccauccugcuguacuacagcaccgccgccagcagccuggccgugacccugaugaucgccaucuucgugguguacauggugagcagagacaacgugagcugcagcaucugccuguga

SEQ ID NO: 188596 - RNA, 1758 nt, Artificial Sequence; identical to SEQ ID NO: 187381
  derived and/or modified CDS sequence (opt4) from hemagglutinin__InfluenzaB__EPI163726

SEQ ID NO: 188597 - RNA, 1758 nt, Artificial Sequence; identical to SEQ ID NO: 188535
  derived and/or modified CDS sequence (opt4) from hemagglutinin__InfluenzaB__EPI636340

SEQ ID NO: 188598 - RNA, 1758 nt, Artificial Sequence
  derived and/or modified CDS sequence (opt4) from hemagglutinin__InfluenzaB__EPI645995
augaaggccaucaucgugcugcugaugguggugaccagcaacgccgacagaaucugcaccggcaucaccagcagcaacagcccccacguggugaagaccgccacccagggcgaggugaacgugaccggcgugaucccccugaccaccacccccaccaagagccacuucgccaaccugaagggcaccgagaccagaggcaagcugugccccaagugccugaacugcaccgaccuggacguggcccugggcagacccaagugcaccggcaagauccccagcgccagagugagcauccugcacgaggugagacccgugaccagcggcugcuuccccaucaugcacgacagaaccaagaucagacagcugcccaaccugcugagaggcuacgagcacgugagacugagcacccacaacgugaucaacgccgaggacgcccccggcggccccuacaagaucggcaccagcggcagcugccccaacaucaccaacggcaacggcuucuucgccaccauggccugggccgugcccaagaacgacaagaacaagaccgccaccaacccccugaccaucgaggugcccuacaucugcaccgagggcgaggaccagaucaccguguggggcuuccacagcgacgacgagacccagauggccaagcuguacggcgacagcaagccccagaaguucaccagcagcgccaacggcgugaccacccacuacgugagccagaucggcggcuuccccaaccagaccgaggacggcggccugccccagagcggcagaaucgugguggacuacauggugcagaagagcggcaagaccggcaccaucaccuaccagagaggcauccugcugccccagaagguguggugcgccagcggcagaagcaaggugaucaagggcagccugccccugaucggcgaggccgacugccugcacgagaaguacggcggccugaacaagagcaagcccuacuacaccggcgagcacgccaaggccaucggcaacugccccaucugggugaagaccccccugaagcuggccaacggcaccaaguacagaccccccgccaagcugcugaaggagagaggcuucuucggcgccaucgccggcuuccuggagggcggcugggagggcaugaucgccggcuggcacggcuacaccagccacggcgcccacggcguggccguggccgccgaccugaagagcacccaggaggccaucaacaagaucaccaagaaccugaacagccugagcgagcuggaggugaagaaccugcagagacugagcggcgccauggacgagcugcacaacgagauccuggagcuggacgagaagguggacgaccugagagccgacaccaucagcagccagaucgagcuggccgugcugcugagcaacgagggcaucaucaacagcgaggacgagcaccugcuggcccuggagagaaagcugaagaagaugcugggccccagcgccguggagaucggcaacggcugcuucgagaccaagcacaagugcaaccagaccugccuggacagaaucgccgccggcaccuucgacgccggcgaguucagccugcccaccuucgacagccugaacaucaccgccgccagccugaacgacgacggccuggacaaccacaccauccugcuguacuacagcaccgccgccagcagccuggccgugacccugaugaucgccaucuucgugguguacauggugagcagagacaacgugagcugcagcaucugccuguga

SEQ ID NO: 188599 - RNA, 1755 nt, Artificial Sequence; identical to SEQ ID NO: 188189
  derived and/or modified CDS sequence (opt4) from hemagglutinin__InfluenzaB__EPI539769

SEQ ID NO: 188600 - RNA, 1755 nt, Artificial Sequence; identical to SEQ ID NO: 188591
  derived and/or modified CDS sequence (opt4) from hemagglutinin__InfluenzaB__EPI551249

SEQ ID NO: 188601 - RNA, 1755 nt, Artificial Sequence
  derived and/or modified CDS sequence (opt4) from hemagglutinin__InfluenzaB__EPI544259
augaaggccaucaucgugcugcugaugguggugaccagcaacgccgacagaaucugcaccggcaucaccagcagcaacagcccccacguggugaagaccgccacccagggcgaggugaacgugaccggcgugaucccccugaccaccacccccaccaagagcuacuucgccaaccugaagggcaccagaaccagaggcaagcugugccccgacugccugaacugcaccgaccuggacguggcccugggcagacccaugugcgugggcaccacccccagcgccaaggccagcauccugcacgaggugagacccgugaccagcggcugcuuccccaucaugcacgacagaaccaagaucagacagcugcccaaccugcugagaggcuacgagaagaucagacugagcacccagaacgugaucgacgccgagaaggcccccggcggccccuacagacugggcaccagcggcagcugccccaacgccaccagcaagaucggcuucuucgccaccauggccugggccgugcccaaggacaacuacaagaacgccaccaacccccugaccguggaggugcccuacaucugcaccgagggcgaggaccagaucaccguguggggcuuccacagcgacaacaagaaccagaugaagagccuguacggcgacagcaacccccagaaguucaccagcagcgccaacggcgugaccacccacuacgugagccagaucggcgacuuccccgaccagaccgaggacggcggccugccccagagcggcagaaucgugguggacuacaugaugcagaagcccggcaagaccggcaccaucguguaccagagaggcgugcugcugccccagaagguguggugcgccagcggcagaagcaaggugaucaagggcagccugccccugaucggcgaggccgacugccugcacgaggaguacggcggccugaacaagagcaagcccuacuacaccggcaagcacgccaaggccaucggcaacugccccaucugggugaagaccccccugaagcuggccaacggcaccaaguacagaccccccgccaagcugcugaaggagagaggcuucuucggcgccaucgccggcuuccuggagggcggcugggagggcaugaucgccggcuggcacggcuacaccagccacggcgcccacggcguggccguggccgccgaccugaagagcacccaggaggccaucaacaagaucaccaagaaccugaacagccugagcgagcuggaggugaagaaccugcagagacugagcggcgccauggacgagcugcacaacgagauccuggagcuggacgagaagguggacgaccugagagccgacaccaucagcagccagaucgagcuggccgugcugcugagcaacgagggcaucaucaacagcgaggacgagcaccugcuggcccuggagagaaagcugaagaagaugcugggccccagcgccguggacaucggcaacggcugcuucgagaccaagcacaagugcaaccagaccugccuggacagaaucgccgccggcaccuucaacgccggcgaguucagccugcccaccuucgacagccugaacaucaccgccgccagccugaacgacgacggccuggacaaccacaccauccugcuguacuacagcaccgccgccagcagccuggccgugacccugaugcuggccaucuucaucguguacauggugagcagagacaacgugagcugcagcaucugccuguga

SEQ ID NO: 188602 - RNA, 1755 nt, Artificial Sequence
  derived and/or modified CDS sequence (opt4) from hemagglutinin__InfluenzaB__EPI592699
augaaggccaucaucgugcugcugaugguggugaccagcaacgccgacagaaucugcaccggcaucaccagcagcaacagcccccacguggugaagaccgccacccagggcgaggugaacgugaccggcgugaucccccugaccaccacccccaccaagagcuacuucgccaaccugaagggcaccagaaccagaggcaagcugugccccgacugccugaacugcaccgaccuggacguggcccugggcagacccaugugcgugggcaccacccccagcgccaaggccagcauccugcacgaggugagacccgugaccagcggcugcuuccccaucaugcacgacagaaccaagaucagacagcugcccaaccugcugagaggcuacgagaagaucagacugagcacccagaacgugaucgacgccgagaaggcccccggcggccccuacagacugggcaccagcggcagcugccccaacgccaccagcaagaucggcuucuucgccaccauggccugggccgugcccaaggacaacuacaagaacgccaccaacccccagaccguggaggugcccuacaucugcaccgagggcgaggaccagaucaccguguggggcuuccacagcgacaacaagauccagaugaagagccuguacggcgacagcaacccccagaaguucaccagcagcgccaacggcgugaccacccacuacgugagccagaucggcgacuuccccgaccagaccgaggacggcggccugccccagagcggcagaaucgugguggacuacauggugcagaagcccggcaagaccggcaccaucguguaccagagaggcgugcugcugccccagaagguguggugcgccagcggcagaagcaaggugaucaagggcagccugccccugaucggcgaggccgacugccugcacgaggaguacggcggccugaacaagagcaagcccuacuacaccggcaagcacgccaaggccaucggcaacugccccaucugggugaagaccccccugaagcuggccaacggcaccaaguacagaccccccgccaagcugcugaaggagagaggcuucuucggcgccaucgccggcuuccuggagggcggcugggagggcaugaucgccggcuggcacggcuacaccagccacggcgcccacggcguggccguggccgccgaccugaagagcacccaggaggccaucaacaagaucaccaagaaccugaacagccugagcgagcuggaggugaagaaccugcagagacugagcggcgccauggacgagcugcacaacgagauccuggagcuggacgagaagguggacgaccugagagccgacaccaucagcagccagaucgagcuggccgugcugcugagcaacgagggcaucaucaacagcgaggacgagcaccugcuggcccuggagagaaagcugaagaagaugcugggccccagcgccguggacaucggcaacggcugcuucgagaccaagcacaagugcaaccagaccugccuggacagaaucgccgccggcaccuucaacgccggcgaguucagccugcccaccuucgacagccugaacaucaccgccgccagccugaacgacgacggccuggacaaccacaccauccugcuguacuacagcaccgccgccagcagccuggccgugacccugaugcuggccaucuucaucguguacauggugagcagagacaacgugagcugcagcaucugccuguga

SEQ ID NO: 188603 - RNA, 1755 nt, Artificial Sequence; identical to SEQ ID NO: 188512
  derived and/or modified CDS sequence (opt4) from hemagglutinin__InfluenzaB__EPI592707

SEQ ID NO: 188604 - RNA, 1755 nt, Artificial Sequence
  derived and/or modified CDS sequence (opt4) from hemagglutinin__InfluenzaB__EPI693094
augaaggccaucaucgugcugcugaugguggugaccagcaacgccgacagaaucugcaccggcaucaccagcagcaacagcccccacguggugaagaccgccacccagggcgaggugaacgugaccggcgugaucccccugaccaccacccccaccaagagcuacuucgccaaccugaagggcaccagaaccagaggcaagcugugccccgacugccugaacugcaccgaccuggacguggcccugggcagacccaugugcgugggcaccacccccagcgccaaggccagcauccugcacgaggugagacccgugaccagcggcugcuuccccaucaugcacgacagaaccaagaucagacagcugcccaaccugcugagaggcuacgagaagaucagacugagcacccagaacgugaucgacgccgagaaggcccccggcggccccuacagacugggcaccagcgagagcugccccaacgccaccagcaagaucggcuucuucgccaccauggccugggccgugcccaaggacaacuacaagaacgccaccaacccccagaccguggaggugcccuacaucugcaccgagggcgaggaccagaucaccguguggggcuuccacagcgacaacaagauccagaugaagagccuguacggcgacagcaacccccagaaguucaccagcagcgccaacggcgugaccacccacuacgugagccagaucggcgacuuccccgaccagaccgaggacggcggccugccccagagcggcagaaucgugguggacuacauggugcagaagcccggcaagaccggcaccaucguguaccagagaggcgugcugcugccccagaagguguggugcgccagcggcagaagcaaggugaucaagggcagccugccccugaucggcgaggccgacugccugcacgaggaguacggcggccugaacaagagcaagcccuacuacaccggcaagcacgccaaggccaucggcaacugccccaucugggugaagaccccccugaagcuggccaacggcaccaaguacagaccccccgccaagcugcugaaggagagaggcuucuucggcgccaucgccggcuuccuggagggcggcugggagggcaugaucgccggcuggcacggcuacaccagccacggcgcccacggcguggccguggccgccgaccugaagagcacccaggaggccaucaacaagaucaccaagaaccugaacagccugagcgagcuggaggugaagaaccugcagagacugagcggcgccauggacgagcugcacaacgagauccuggagcuggacgagaagguggacgaccugagagccgacaccaucagcagccagaucgagcuggccgugcugcugagcaacgagggcaucaucaacagcgaggacgagcaccugcuggcccuggagagaaagcugaagaagaugcugggccccagcgccguggacaucggcaacggcugcuucgagaccaagcacaagugcaaccagaccugccuggacagaaucgccgccggcaccuucaacgccggcgaguucagccugcccaccuucgacagccugaacaucaccgccgccagccugaacgacgacggccuggacaaccacaccauccugcuguacuacagcaccgccgccagcagccuggccgugacccugaugcuggccaucuucaucguguacauggugagcagagacaacgugagcugcagcaucugccuguga

SEQ ID NO: 188605 - RNA, 1758 nt, Artificial Sequence; identical to SEQ ID NO: 188535
  derived and/or modified CDS sequence (opt4) from hemagglutinin__InfluenzaB__EPI678796

SEQ ID NO: 188606 - RNA, 1758 nt, Artificial Sequence
  derived and/or modified CDS sequence (opt4) from hemagglutinin__InfluenzaB__EPI721064
augaaggccaucaucgugcugcugaugguggugaccagcaacgccgacagaaucugcaccggcaucaccagcagcaacagcccccacguggugaagaccgccacccagggcgaggugaacgugaccggcgugaucccccugaccaccacccccaccaagagccacuucgccaaccugaagggcaccgagaccagaggcaagcugugccccaagugccugaacugcaccgaccuggacguggcccugggcagacccaagugcaccggcaagauccccagcgccagagugagcauccugcacgaggugagacccgugaccagcggcugcuuccccaucaugcacgacagaaccaagaucagacagcugcccaaccugcugagaggcuacgagcacgugagacugagcacccacaacgugaucaacgccgaggacgcccccggcggccccuacaagaucggcaccagcagaagcugccccaacaucaccaacggcaacggcuucuucgccaccauggccugggccgugcccaagaacgacaagaacaagaccgccaccaacccccugaccaucgaggugcccuacaucugcaccgagggcgaggaccagaucaccguguggggcuuccacagcgacaacgagacccagauggccaagcuguacggcgacagcaagccccagaaguucaccagcagcgccaacggcgugaccacccacuacgugagccagaucggcggcuuccccaaccagaccgaggacggcggccugccccagagcggcagaaucgugguggacuacauggugcagaagagcggcaagaccggcaccaucaccuaccagagaggcauccugcugccccagaagguguggugcgccagcggcagaagcaaggugaucaagggcagccugccccugaucggcgaggccgacugccugcacgagaaguacggcggccugaacaagagcaagcccuacuacaccggcgagcacgccaaggccaucggcaacugccccaucugggugaagaccccccugaagcuggccaacggcaccaaguacagaccccccgccaagcugcugaaggagagaggcuucuucggcgccaucgccggcuuccuggagggcggcugggagggcaugaucgccggcuggcacggcuacaccagccacggcgcccacggcguggccguggccgccgaccugaagagcacccaggaggccaucaacaagaucaccaagaaccugaacagccugagcgagcuggaggugaagaaccugcagagacugagcggcgccauggacgagcugcacaacgagauccuggagcuggacgagaagguggacgaccugagagccgacaccaucagcagccagaucgagcuggccgugcugcugagcaacgagggcaucaucaacagcgaggacgagcaccugcuggcccuggagagaaagcugaagaagaugcugggccccagcgccguggagaucggcaacggcugcuucgagaccaagcacaagugcaaccagaccugccuggacagaaucgccgccggcaccuucgacgccggcgaguucagccugcccaccuucgacagccugaacaucaccgccgccagccugaacgacgacggccuggacaaccacaccauccugcuguacuacagcaccgccgccagcagccuggccgugacccugaugaucgccaucuucgugguguacauggugagcagagacaacgugagcugcagcaucugccuguga

SEQ ID NO: 188607 - RNA, 1758 nt, Artificial Sequence; identical to SEQ ID NO: 186816
  derived and/or modified CDS sequence (opt4) from hemagglutinin__InfluenzaB__EPI328904

SEQ ID NO: 188608 - RNA, 1755 nt, Artificial Sequence
  derived and/or modified CDS sequence (opt4) from hemagglutinin__InfluenzaB__EPI543191
augaaggccaucaucgugcugcugaugguggugaccagcaacgccgacagaaucugcaccggcaucaccagcagcaacagcccccacguggugaagaccgccacccagggcgaggugaacgugaccggcgugaucccccugaccaccacccccaccaagagcuacuucgccaaccugaagggcaccagaaccagaggcaagcugugccccgacugccugaacugcaccgaccuggacguggcccugggcagacccaugugcgugggcaccacccccagcgccaaggccagcauccugcacgaggugagacccgugaccagcggcugcuuccccaucaugcacgacagaaccaagaucagacagcugcccaaccugcugagaggcuacgagaagaucagacugagcacccagaacgugaucgacgccgagaaggcccccggcggccccuacagacugggcaccagcggcagcugccccaacgccaccagcaagaucggcuucuucgccaccauggccugggccgugcccaaggacaacuacaagaacgccaccaacccccugaccguggaggugcccuacaucugcaccgagggcgaggaccagaucaccguguggggcuuccacagcgacaagaagacccagaugaagagccuguacggcgacagcaacccccagaaguucaccagcagcgccaacggcgugaccacccacuacgugagccagaucggcgacuuccccgaccagaccgaggacggcggccugccccagagcggcagaaucgugguggacuacaugaugcagaagcccggcaagaccggcaccaucguguaccagagaggcgugcugcugccccagaagguguggugcgccagcggcagaagcaaggugaucaagggcagccugccccugaucggcgaggccgacugccugcacgaggaguacggcggccugaacaagagcaagcccuacuacaccggcaagcacgccaaggccaucggcaacugccccaucugggugaagaccccccugaagcuggccaacggcaccaaguacagaccccccgccaagcugcugaaggagagaggcuucuucggcgccaucgccggcuuccuggagggcggcugggagggcaugaucgccggcuggcacggcuacaccagccacggcgcccacggcguggccguggccgccgaccugaagagcacccaggaggccaucaacaagaucaccaagaaccugaacagccugagcgagcuggaggugaagaaccugcagagacugagcggcgccauggacgagcugcacaacgagauccuggagcuggacgagaagguggacgaccugagagccgacaccaucagcagccagaucgagcuggccgugcugcugagcaacgagggcaucaucaacagcgaggacgagcaccugcuggcccuggagagaaagcugaagaagaugcugggccccagcgccguggacaucggcaacggcugcuucgagaccaagcacaagugcaaccagaccugccuggacagaaucgccgccggcaccuucaacgccggcgaguucagccugcccaccuucgacagccugaacaucaccgccgccagccugaacgacgacggccuggacaaccacaccauccugcuguacuacagcaccgccgccagcagccuggccgugacccugaugcuggccaucuucaucguguacauggugagcagagacaacgugagcugcagcaucugccuguga

SEQ ID NO: 188609 - RNA, 1755 nt, Artificial Sequence; identical to SEQ ID NO: 188189
  derived and/or modified CDS sequence (opt4) from hemagglutinin__InfluenzaB__EPI500359

SEQ ID NO: 188610 - RNA, 1755 nt, Artificial Sequence
  derived and/or modified CDS sequence (opt4) from hemagglutinin__InfluenzaB__EPI543185
augaaggccaucaucgugcugcugaugguggugaccagcaacgccgacagaaucugcaccggcaucaccagcagcaacagcccccacguggugaagaccgccacccagggcgaggugaacgugaccggcgugaucccccugaccaccacccccaccaagagcuacuucgccaaccugaagggcaccagaaccagaggcaagcugugccccgacugccugaacugcaccgaccuggacguggcccugggcagacccaugugcgugggcaccacccccagcgccaaggccagcauccugcacgaggugagacccgugaccagcggcugcuuccccaucaugcacgacagaaccaagaucagacagcugcccaaccugcugagaggcuacgagaagaucagacugagcacccagaacgugaucgacgccgagaaggcccccggcggccccuacagacugggcaccagcggcagcugccccaacgccaccagcaagaucggcuucuucgccaccauggccugggccgugcccaaggacaacuacaagaacgccaccaacccccagaccguggaggugcccuacaucugcaccgagggcgaggaccagaucaccguguggggcuuccacagcgacaacaagaaccagaugaagagccuguacggcgacagcaacccccagaaguucaccagcagcgccaacggcgugaccacccacuacgugagccagaucggcgacuuccccgaccagaccgaggacggcggccugccccagagcggcagaaucgugguggacuacaugaugcagaagcccggcaagaccggcaccaucguguaccagagaggcgugcugcugccccagaagguguggugcgccagcggcagaagcaaggugaucaagggcagccugccccugaucggcgaggccgacugccugcacgaggaguacggcggccugaacaagagcaagcccuacuacaccggcaagcacgccaaggccaucggcaacugccccaucugggugaagaccccccugaagcuggccaacggcaccaaguacagaccccccgccaagcugcugaaggagagaggcuucuucggcgccaucgccggcuuccuggagggcggcugggagggcaugaucgccggcuggcacggcuacaccagccacggcgcccacggcguggccguggccgccgaccugaagagcacccaggaggccaucaacaagaucaccaagaaccugaacagccugagcgagcuggaggugaagaaccugcagagacugagcggcgccauggacgagcugcacaacgagauccuggagcuggacgagaagguggacgaccugagagccgacaccaucagcagccagaucgagcuggccgugcugcugagcaacgagggcaucaucaacagcgaggacgagcaccugcuggcccuggagagaaagcugaagaagaugcugggccccagcgccguggacaucggcaacggcugcuucgagaccaagcacaagugcaaccagaccugccuggacagaaucgccgccggcaccuucaacgccggcgaguucagccugcccaccuucgacagccugaacaucaccgccgccagccugaacgacgacggccuggacaaccacaccauccugcuguacuacagcaccgccgccagcagccuggccgugacccugaugcuggccaucuucaucguguacauggugagcagagacaacgugagcugcagcaucugccuguga

SEQ ID NO: 188611 - RNA, 1755 nt, Artificial Sequence; identical to SEQ ID NO: 188349
  derived and/or modified CDS sequence (opt4) from hemagglutinin__InfluenzaB__EPI536447

SEQ ID NO: 188612 - RNA, 1755 nt, Artificial Sequence; identical to SEQ ID NO: 186818
  derived and/or modified CDS sequence (opt4) from hemagglutinin__InfluenzaB__NP_056660

SEQ ID NO: 188613 - RNA, 1755 nt, Artificial Sequence
  derived and/or modified CDS sequence (opt4) from hemagglutinin__InfluenzaB__ABG85167
augaaggccaucaucgugcugcugaugguggugaccagcaacgccgacagaaucugcaccggcaucaccagcagcaacagcccccacguggugaagaccgccacccagggcgaggugaacgugaccggcgugaucccccugaccaccacccccaccagaagccacuucgccaaccugaagggcacccagaccagaggcaagcugugccccaacugcuucaacugcaccgaccuggacguggcccugggcagacccaagugcaugggcaacauccccagcgccaaggugagcauccugcacgaggugaagcccgugaccagcggcugcuuccccaucaugcacgacagaaccaagaucagacagcugcccaaccugcugagaggcuacgagaacaucagacugagcaccagcaacgugaucaacgccgagaccgcccccggcggccccuacaaggugggcaccagcggcagcugccccaacguggccaacagaaacggcuucuucaacaccauggccugggugauccccaaggacaacaacaagaccgccaucaaccccgugaccguggaggugcccuacaucugcagcgagggcgaggaccagaucaccguguggggcuuccacagcgacgacaagacccagauggagagacuguacggcgacagcaacccccagaaguucaccagcagcgccaacggcgugaccacccacuacgugagccagaucggcggcuuccccaaccagaccgaggacgagggccugaagcagagcggcagaaucgugguggacuacauggugcagaagcccggcaagaccggcaccaucguguaccagagaggcauccugcugccccagaagguguggugcgccagcggcagaagcaaggugaucaagggcagccugccccugaucggcgaggccgacugccugcacgagaaguacggcggccugaacaagagcaagcccuacuacaccggcgagcacgccaaggccaucggcaacugccccaucugggugaagaccccccugaagcuggccaacggcaccaaguacagaccccccgccaagcugcugaaggagagaggcuucuucggcgccaucgccggcuuccuggagggcggcugggagggcaugaucgccggcuggcacggcuacaccagccacggcgcccacggcguggccguggccgccgaccugaagagcacccaggaggccaucaacaagaucaccaagaaccugaacagccugagcgagcuggaggugaagaaccugcagagacugagcggcgccaugaacggccugcacgacgagauccuggagcuggacgagaagguggacgaccugagagccgacaccaucagcagccagaucgagcuggccgugcugcugagcaacgagggcaucaucaacagcgaggacgagcaccugcuggcccuggagagaaagcugaagaagaugcugggccccagcgccguggagaucggcaacggcugcuucgagaccaagcacaagugcaaccagaccugccuggacagaaucgccgccggcaccuucaacgccggcgacuucagccugcccaccuucgacagccugaacaucaccgccgccagccugaacgacgacgaccuggacaaccacaccauccugcuguacuacagcaccgccgccagcagccuggccgugacccugaugaucgccaucuucaucguguacauggugagcagagacaacgugagcugcagcaucugccuguga

SEQ ID NO: 188614 - RNA, 1755 nt, Artificial Sequence
  derived and/or modified CDS sequence (opt4) from hemagglutinin__InfluenzaB__EPI376346
augaaggccaucaucgugcugcugaugguggugaccagcaacgccgacagaaucugcaccggcaucaccagcagcaacagcccccacguggugaagaccgccacccagggcgaggugaacgugaccggcgugaucccccugaccaccacccccaccaagagcuacuucgccaaccugaagggcaccaagaccagaggcaagcugugccccgacugccugaacugcaccgaccuggacguggcccugggcagacccaugugcgugggcaccacccccagcgccaaggccagcauccugcacgaggugagacccgugaccagcggcugcuuccccaucaugcacgacagaaccaagaucagacagcuggccaaccugcugagaggcuacgagaacaucagacugagcacccagaacgugaucgacgccgagaaggcccccggcggccccuacagacugggcaccagcggcagcugccccaacgccaccagcaagagcggcuucuucgccaccauggccugggccgugcccaaggacaacaacaagaacgccaccaacccccugaccguggaggugcccuacaucugcgccgagggcgaggaccagaucaccguguggggcuuccacagcgacgacaagacccagaugaagaaccuguacggcgacagcaacccccagaaguucaccagcagcgccaacggcgugaccacccacuacgugagccagaucggcggcuuccccgaccagaccgaggacggcggccugccccagagcggcagaaucgugguggacuacaugaugcagaagcccggcaagaccggcaccaucguguaccagagaggcgugcugcugccccagaagguguggugcgccagcggcagaagcaaggugaucaagggcagccugccccugaucggcgaggccgacugccugcacgagaaguacggcggccugaacaagagcaagcccuacuacaccggcgagcacgccaaggccaucggcaacugccccaucugggugaagaccccccugaagcuggccaacggcaccaaguacagaccccccgccaagcugcugaaggagagaggcuucuucggcgccaucgccggcuuccuggagggcggcugggagggcaugaucgccggcuggcacggcuacaccagccacggcgcccacggcguggccguggccgccgaccugaagagcacccaggaggccaucaacaagaucaccaagaaccugaacagccugagcgagcuggaggugaagaaccugcagagacugagcggcgccauggacgagcugcacaacgagauccuggagcuggacgagaagguggacgaccugagagccgacaccaucagcagccagaucgagcuggccgugcugcugagcaacgagggcaucaucaacagcgaggacgagcaccugcuggcccuggagagaaagcugaagaagaugcugggccccagcgccguggacaucggcaacggcugcuucgagaccaagcacaagugcaaccagaccugccuggacagaaucgccgccggcaccuucaacgccggcgaguucagccugcccaccuucgacagccugaacaucaccgccgccagccugaacgacgacggccuggacaaccacaccauccugcuguacuacagcaccgccgccagcagccuggccgugacccugaugcuggccaucuucaucguguacauggugagcagagacaacgugagcugcagcaucugccuguga

SEQ ID NO: 188615 - RNA, 1755 nt, Artificial Sequence; identical to SEQ ID NO: 186914
  derived and/or modified CDS sequence (opt4) from hemagglutinin__InfluenzaB__EPI368425

SEQ ID NO: 188616 - RNA, 1755 nt, Artificial Sequence; identical to SEQ ID NO: 186880
  derived and/or modified CDS sequence (opt4) from hemagglutinin__InfluenzaB__ACH53430

SEQ ID NO: 188617 - RNA, 1758 nt, Artificial Sequence; identical to SEQ ID NO: 186705
  derived and/or modified CDS sequence (opt4) from hemagglutinin__InfluenzaB__EPI331151

SEQ ID NO: 188618 - RNA, 1758 nt, Artificial Sequence
  derived and/or modified CDS sequence (opt4) from hemagglutinin__InfluenzaB__EPI356777
augaaggccaucaucgugcugcugaugguggugaccagcaacgccgacagaaucugcaccggcaucaccagcagcaacagcccccacguggugaagaccgccacccagggcgaggugaacgugaccggcgugaucccccugaccaccacccccaccaagagccacuucgccaaccugaagggcaccgagaccagaggcaagcugugccccaagugccugaacugcaccgaccuggacguggcccugggcagacccaagugcaccggcaagauccccagcgccagagugagcauccugcacgaggugagacccgugaccagcggcugcuuccccaucaugcacgacagaaccaagaucagacagcugcccaaccugcugagaggcuacgagcacaucagacugagcacccacaacgugaucaacgccgagaacgcccccggcggccccuacaagaucggcaccagcggcagcugccccaacgugaccaacggcaacggcuucuucgccaccauggccugggccgugcccaagaacgacaagaacaagaccgccaccaacccccugaccaucgaggugcccuacaucugcaccgagggcgaggaccagaucaccguguggggcuuccacagcgacgacgagacccagauggccaagcuguacggcgacagcaagccccagaaguucaccagcagcgccaacggcgugaccacccacuacgugagccagaucggcggcuuccccaaccagaccgaggacggcggccugccccagagcggcagaaucgugguggacuacauggugcagaagagcggcaagaccggcaccaucaccuaccagagaggcauccugcugccccagaagguguggugcgccagcggcagaagcaaggugaucaagggcagccugccccugaucggcgaggccgacugccugcacgagaaguacggcggccugaacaagagcaagcccuacuacaccggcgagcacgccaaggccaucggcaacugccccaucugggugaagaccccccugaagcuggccaacggcaccaaguacagaccccccgccaagcugcugaaggagagaggcuucuucggcgccaucgccggcuuccuggagggcggcugggagggcaugaucgccggcuggcacggcuacaccagccacggcgcccacggcguggccguggccgccgaccugaagagcacccaggaggccaucaacaagaucaccaagaaccugaacagccugagcgagcuggaggugaagaaccugcagagacugagcggcgccauggacgagcugcacaacgagauccuggagcuggacgagaagguggacgaccugagagccgacaccaucagcagccagaucgagcuggccgugcugcugagcaacgagggcaucaucaacagcgaggacgagcaccugcuggcccuggagagaaagcugaagaagaugcugggccccagcgccguggagaucggcaacggcugcuucgagaccaagcacaagugcaaccagaccugccuggacagaaucgccgccggcaccuucgacgccggcgaguucagccugcccaccuucgacagccugaacaucaccgccgccagccugaacgacgacggccuggacaaccacaccauccugcuguacuacagcaccgccgccagcagccuggccgugacccugaugaucgccaucuucgugguguacauggugagcagagacaacgugagcugcagcaucugccuguga

SEQ ID NO: 188619 - RNA, 1752 nt, Artificial Sequence; identical to SEQ ID NO: 186487
  derived and/or modified CDS sequence (opt4) from hemagglutinin__InfluenzaB__CY018349

SEQ ID NO: 188620 - RNA, 1752 nt, Artificial Sequence
  derived and/or modified CDS sequence (opt4) from hemagglutinin__InfluenzaB__AY581945
augaaggccaucaucgugcugcugaugguggugaccagcaacgccgacagaaucugcaccggcaucaccagcagcaacagcccccacguggugaagaccgccacccagggcgaggugaacgugaccggcgugaucccccugaccaccacccccaccaagagccacuucgccaaccugaagggcaccaagaccagaggcaagcugugccccaacugccugaacugcaccgaccuggacguggcccuggccagacccaugugcgugggcaccacccccagcgccaaggccagcauccugcacgaggugagacccgugaccagcggcugcuuccccaucaugcacgacagaaccaagaucagacagcugcccaaccugcugagaggcuacgagaacaucagacugagcacccagaacgugaucaacgccgagagagcccccggcggccccuacagacugggcaccagcggcagcugccccaacgugaccagcagagacggcuucuucgccaccauggccugggccgugcccagagacaacaagaccgccaccaacccccugaccguggaggugcccuacaucugcaccaagggcgaggaccagaucaccguguggggcuuccacagcgacaacaagacccagaugaagaaccuguacggcgacagcaacccccagaaguucaccagcagcgccaacggcgugaccacccacuacgugagccagaucggcggcuuccccaaccagaccgaggacggcggccugccccagagcggcagaaucgugguggacuacauggugcagaagcccggcaagaccggcaccaucguguaccagagaggcgugcugcugccccagaagguguggugcgccagcggcagaagcaaggugaucaagggcagccugccccugaucggcgaggccgacugccugcacgagaaguacggcggccugaacaagagcaagcccuacuacaccggcgagcacgccaaggccaucggcaacugccccaucugggugaagaccccccugaagcuggccaacggcaccaaguacagaccccccgccaagcugcugaaggagagaggcuucuucggcgccaucgccggcuuccuggagggcggcugggagggcaugaucgccggcuggcacggcuacaccagccacggcgcccacggcguggccguggccgccgaccugaagagcacccaggaggccaucaacaagaucaccaagaaccugaacagccugagcgagcuggaggugaagaaccugcagagacugagcggcgccauggacgagcugcacaacgagauccuggagcuggacgagaagguggacgaccugagagccgacaccaucagcagccagaucgagcuggccgugcugcugagcaacgagggcaucaucaacagcgaggacgagcaccugcuggcccuggagagaaagcugaagaagaugcugggccccagcgccguggacaucggcaacggcugcuucgagaccaagcacaagugcaaccagaccugccuggacagaaucgccgccggcaccuucaacgccggcgaguucagccugcccaccuucgacagccugaacaucaccgccgccagccugaacgacgacggccuggacaaccacaccauccugcuguacuacagcaccgccgccagcagccuggccgugacccugaugaucgccaucuucaucguguacauggugagcagagacaacgugagcugcagcaucugccuguga

SEQ ID NO: 188621 - RNA, 1755 nt, Artificial Sequence; identical to SEQ ID NO: 188368
  derived and/or modified CDS sequence (opt4) from hemagglutinin__InfluenzaB__EPI541351

SEQ ID NO: 188622 - RNA, 1755 nt, Artificial Sequence
  derived and/or modified CDS sequence (opt4) from hemagglutinin__InfluenzaB__EPI541760
augaaggccgugaucgugcugcugaugguggugaccagcaacgccgacagaaucugcaccggcaucaccagcagcaacagcccccacguggugaagaccgccacccagggcgaggugaacgugaccggcgugaucccccugaccaccacccccaccaagagcuacuucgccaaccugaagggcaccagaaccagaggcaagcugugccccgacugccugaacugcaccgaccuggacguggcccugggcagacccaugugcgugggcaccacccccagcgccaaggccagcauccugcacgaggugagacccgugaccagcggcugcuuccccaucaugcacgacagaaccaagaucagacagcugcccaaccugcugagaggcuacgagaagaucagacugagcacccagaacgugaucgacgccgagaaggcccccggcggccccuacagacugggcaccagcggcagcugccccaacgccaccagcaagaucggcuucuucgccaccauggccugggccgugcccaaggacaacuacaagaacgccaccaacccccugaccguggaggugcccuacaucugcaccgagggcgaggaccagaucaccguguggggcuuccacagcgacaacaagacccagaugaagagccuguacggcgacagcaacccccagaaguucaccagcagcgccaacggcgugaccacccacuacgugagccagaucggcgacuuccccgaccagaccgaggacggcggccugccccagagcggcagaaucgugguggacuacaugaugcagaagcccggcaagaccggcaccaucguguaccagagaggcgugcugcugccccagaagguguggugcgccagcggcagaagcaaggugaucaagggcagccugccccugaucggcgaggccgacugccugcacgaggaguacggcggccugaacaagagcaagcccuacuacaccggcaagcacgccaaggccaucggcaacugccccaucugggugaagaccccccugaagcuggccaacggcaccaaguacagaccccccgccaagcugcugaaggagagaggcuucuucggcgccaucgccggcuuccuggagggcggcugggagggcaugaucgccggcuggcacggcuacaccagccacggcgcccacggcguggccguggccgccgaccugaagagcacccaggaggccaucaacaagaucaccaagaaccugaacagccugagcgagcuggaggugaagaaccugcagagacugagcggcgccauggacgagcugcacaacgagauccuggagcuggacgagaagguggacgaccugagagccgacaccaucagcagccagaucgagcuggccgugcugcugagcaacgagggcaucaucaacagcgaggacgagcaccugcuggcccuggagagaaagcugaagaagaugcugggccccagcgccguggacaucggcaacggcugcuucgagaccaagcacaagugcaaccagaccugccuggacagaaucgccgccggcaccuucaacgccggcgaguucagccugcccaccuucgacagccugaacaucaccgccgccagccugaacgacgacggccuggacaaccacaccauccugcuguacuacagcaccgccgccagcagccuggccgugacccugaugcuggccaucuucaucguguacauggugagcagagacaacgugagcugcagcaucugccuguga

SEQ ID NO: 188623 - RNA, 1758 nt, Artificial Sequence; identical to SEQ ID NO: 186947
  derived and/or modified CDS sequence (opt4) from hemagglutinin__InfluenzaB__EPI477397

SEQ ID NO: 188624 - RNA, 1758 nt, Artificial Sequence
  derived and/or modified CDS sequence (opt4) from hemagglutinin__InfluenzaB__EPI492571
augaaggccaucaucgugcugcugaugguggugaccagcaacgccgacagaaucugcaccggcaucaccagcagcaacagcccccacguggugaagaccgccacccagggcgaggugaacgugaccggcgugaucccccugaccaccacccccaccaagagccacuucgccaaccugaagggcaccgagaccagaggcaagcugugccccaagugccugaacugcaccgaccuggacguggcccugggcagacccaagugcaccggcaagauccccagcgccagagugagcauccugcacgaggugagacccgugaccagcggcugcuuccccaucaugcacgacagaaccaagaucagacagcugcccaaccugcugagaggcuacgagcacaucagacugagcacccacaacgugaucaacgccgaggacgcccccggcggccccuacaagaucggcaccagcggcagcugccccaacgugaccaacggcaacggcuucuucgccaccauggccugggccgugcccaagaacgacaagaacaagaccgccaccaacccccugaccaucgaggugcccuacaucugcaccgagggcgaggaccagaucaccguguggggcuuccacagcgacaucgagacccagauggccaagcuguacggcgacagcaagccccagaaguucaccagcagcgccaacggcgugaccacccacuacgugagccagaucggcggcuuccccaaccagaccgaggacggcggccugccccagagcggcagaaucgugguggacuacauggugcagaagagcggcaagaccggcaccaucaccuaccagagaggcauccugcugccccagaagguguggugcgccagcggcagaagcaaggugaucaagggcagccugccccugaucggcgaggccgacugccugcacgagaaguacggcggccugaacaagagcaagcccuacuacaccggcgagcacgccaaggccaucggcaacugccccaucugggugaagaccccccugaagcuggccaacggcaccaaguacagaccccccgccaagcugcugaaggagagaggcuucuucggcgccaucgccggcuuccuggagggcggcugggagggcaugaucgccggcuggcacggcuacaccagccacggcgcccacggcguggccguggccgccgaccugaagagcacccaggaggccaucaacaagaucaccaagaaccugaacagccugagcgagcuggaggugaagaaccugcagagacugagcggcgccauggacgagcugcacaacgagauccuggagcuggacgagaagguggacgaccugagagccgacaccaucagcagccagaucgagcuggccgugcugcugagcaacgagggcaucaucaacagcgaggacgagcaccugcuggcccuggagagaaagcugaagaagaugcugggccccagcgccguggagaucggcaacggcugcuucgagaccaagcacaagugcaaccagaccugccuggacagaaucgccgccggcaccuucgacgccggcgaguucagccugcccaccuucgacagccugaacaucaccgccgccagccugaacgacgacggccuggacaaccacaccauccugcuguacuacagcaccgccgccagcagccuggccgugacccugaugaucgccaucuucgugguguacauggugagcagagacaacgugagcugcagcaucugccuguga

SEQ ID NO: 188625 - RNA, 1758 nt, Artificial Sequence
  derived and/or modified CDS sequence (opt4) from hemagglutinin__InfluenzaB__EPI498340
augaaggccaucaucgugcugcugaugguggugaccagcaacgccgacagaaucugcaccggcaucaccagcagcaacagcccccacguggugaagaccgccacccagggcgaggugaacgugaccggcgugaucccccugaccaccacccccaccaagagccacuucgccaaccugaagggcaccgagaccagaggcaagcugugccccaagugccugaacugcaccgaccuggacguggcccugggcagacccaagugcaccggcaagauccccagcgccagagugagcauccugcacgaggugagacccgugaccagcggcugcuuccccaucaugcacgacagaaccaagaucagacagcugcccaaccugcugagaggcuacgagcacaucagacugagcacccacaacgugaucaacaccgaggacgcccccggcggccccuacaagaucggcaccagcggcagcugccccaacgugaccaacggcaacggcuucuucgccaccauggccugggccgugcccaagaacgacaagaacaagaccgccaccaacccccugaccaucgaggugcccuacaucugcaccgagggcgaggaccagaucaccguguggggcuuccacagcgacaucgagacccagauggccaagcuguacggcgacagcaagccccagaaguucaccagcagcgccaacggcgugaccacccacuacgugagccagaucggcggcuuccccaaccagaccgaggacggcggccugccccagagcggcagaaucgugguggacuacauggugcagaagagcggcaagaccggcaccaucaccuaccagagaggcauccugcugccccagaagguguggugcgccagcggcagaagcaaggugaucaagggcagccugccccugaucggcgaggccgacugccugcacgagaaguacggcggccugaacaagagcaagcccuacuacaccggcgagcacgccaaggccaucggcaacugccccaucugggugaagaccccccugaagcuggccaacggcaccaaguacagaccccccgccaagcugcugaaggagagaggcuucuucggcgccaucgccggcuuccuggagggcggcugggagggcaugaucgccggcuggcacggcuacaccagccacggcgcccacggcguggccguggccgccgaccugaagagcacccaggaggccaucaacaagaucaccaagaaccugaacagccugagcgagcuggaggugaagaaccugcagagacugagcggcgccauggacgagcugcacaacgagauccuggagcuggacgagaagguggacgaccugagagccgacaccaucagcagccagaucgagcuggccgugcugcugagcaacgagggcaucaucaacagcgaggacgagcaccugcuggcccuggagagaaagcugaagaagaugcugggccccagcgccguggagaucggcaacggcugcuucgagaccaagcacaagugcaaccagaccugccuggacagaaucgccgccggcaccuucgacgccggcgaguucagccugcccaccuucgacagccugaacaucaccgccgccagccugaacgacgacggccuggacaaccacaccauccugcuguacuacagcaccgccgccagcagccuggccgugacccugaugaucgccaucuucgugguguacauggugagcagagacaacgugagcugcagcaucugccuguga

SEQ ID NO: 188626 - RNA, 1758 nt, Artificial Sequence
  derived and/or modified CDS sequence (opt4) from hemagglutinin__InfluenzaB__EPI516490
augaaggccaucaucgugcugcugaugguggugaccagcaacgccgacagaaucugcaccggcaucaccagcagcaacagcccccacguggugaagaccgccacccagggcgaggugaacgugaccggcgugaucccccugaccaccacccccaccaagagccacuucgccaaccugaagggcaccgagaccagaggcaagcugugccccaagugccugaacugcaccgaccuggacguggcccugggcagacccaagugcaccggcaagauccccagcgccagagugagcauccugcacgaggugagacccgugaccagcggcugcuuccccaucaugcacgacagaaccaagaucagacagcugcccaaccugcugagaggcuacgagcacaucagacugagcacccacaacgugaucaacgccgaggacgcccccggcggccccuacaagaucggcaccagcggcagcugccccaacgugaccaacggcaacggcuucuucgccaccauggccugggccgugcccaagaacgacaagaacaagaccgccaccaacccccugaccaucgaggugcccuacaucugcaccgagggcgaggaccagaucaccguguggggcuuccacagcgacaacgagauccagauggccaagcuguacggcgacagcaagccccagaaguucaccagcagcgccaacggcgugaccacccacuacgugagccagaucggcggcuuccccaaccagaccgaggacggcggccugccccagagcggcagaaucgugguggacuacauggugcagaagagcggcaagaccggcaccaucaccuaccagagaggcauccugcugccccagaagguguggugcgccagcggcagaagcaaggugaucaagggcagccugccccugaucggcgaggccgacugccugcacgagaaguacggcggccugaacaagagcaagcccuacuacaccggcgagcacgccaaggccaucggcaacugccccaucugggugaagaccccccugaagcuggccaacggcaccaaguacagaccccccgccaagcugcugaaggagagaggcuucuucggcgccaucgccggcuuccuggagggcggcugggagggcaugaucgccggcuggcacggcuacaccagccacggcgcccacggcguggccguggccgccgaccugaagagcacccaggaggccaucaacaagaucaccaagaaccugaacagccugagcgagcuggaggugaagaaccugcagagacugagcggcgccauggacgagcugcacaacgagauccuggagcuggacgagaagguggacgaccugagagccgacaccaucagcagccagaucgagcuggccgugcugcugagcaacgagggcaucaucaacagcgaggacgagcaccugcuggcccuggagagaaagcugaagaagaugcugggccccagcgccguggagaucggcaacggcugcuucgagaccaagcacaagugcaaccagaccugccuggacagaaucgccgccggcaccuucgacgccggcgaguucagccugcccaccuucgacagccugaacaucaccgccgccagccugaacgacgacggccuggacaaccacaccauccugcuguacuacagcaccgccgccagcagccuggccgugacccugaugaucgccaucuucgugguguacauggugagcagagacaacgugagcugcagcaucugccuguga

SEQ ID NO: 188627 - RNA, 1755 nt, Artificial Sequence; identical to SEQ ID NO: 188189
  derived and/or modified CDS sequence (opt4) from hemagglutinin__InfluenzaB__EPI538119

SEQ ID NO: 188628 - RNA, 1755 nt, Artificial Sequence; identical to SEQ ID NO: 188608
  derived and/or modified CDS sequence (opt4) from hemagglutinin__InfluenzaB__EPI538125

SEQ ID NO: 188629 - RNA, 1755 nt, Artificial Sequence
  derived and/or modified CDS sequence (opt4) from hemagglutinin__InfluenzaB__EPI556422
augaaggccaucaucgugcugcugaugguggugaccagcaacgccgacagaaucugcaccggcaucaccagcagcaacagcccccacguggugaagaccgccacccagggcgaggugaacgugaccggcgugaucccccugaccaccacccccaccaagagcuacuucgccaaccugaagggcaccagaaccagaggcaagcugugccccgacugccugaacugcaccgaccuggacguggcccugggcagacccaugugcgugggcaccacccccagcgccaaggccagcauccugcacgaggugagacccgugaccagcggcugcuuccccaucaugcacgacagaaccaagaucagacagcugcccaaccugcugagaggcuacgagaagaucagacugagcacccagaacgugaucgacgccgagaaggcccccggcggccccuacagacugggcaccagcggcagcugccccaacgccaccagcaagaucggcuucuucgccaccauggccugggccgugcccaaggacaacuacaagaacgccaccaacccccugaccguggaggugcccuacaucugcaccgagggcgaggaccagaucaccguguggggcuuccacagcgacaucaagacccagaugaagagccuguacggcgacagcaacccccagaaguucaccagcagcgccaacggcgugaccacccacuacgugagccagaucggcgacuuccccgaccagaccgaggacggcggccugccccagagcggcagaaucgugguggacuacaugaugcagaagcccggcaagaccggcaccaucguguaccagagaggcgugcugcugccccagaagguguggugcgccagcggcagaagcaaggugaucaagggcagccugccccugaucggcgaggccgacugccugcacgaggaguacggcggccugaacaagagcaagcccuacuacaccggcaagcacgccaaggccaucggcaacugccccaucugggugaagaccccccugaagcuggccaacggcaccaaguacagaccccccgccaagcugcugaaggagagaggcuucuucggcgccaucgccggcuuccuggagggcggcugggagggcaugaucgccggcuggcacggcuacaccagccacggcgcccacggcguggccguggccgccgaccugaagagcacccaggaggccaucaacaagaucaccaagaaccugaacagccugagcgagcuggaggugaagaaccugcagagacugagcggcgccauggacgagcugcacaacgagauccuggagcuggacgagaagguggacgaccugagagccgacaccaucagcagccagaucgagcuggccgugcugcugagcaacgagggcaucaucaacagcgaggacgagcaccugcuggcccuggagagaaagcugaagaagaugcugggccccagcgccguggacaucggcaacggcugcuucgagaccaagcacaagugcaaccagaccugccuggacagaaucgccgccggcaccuucaacgccggcgaguucagccugcccaccuucgacagccugaacaucaccgccgccagccugaacgacgacggccuggacaaccacaccauccugcuguacuacagcaccgccgccagcagccuggccgugacccugaugcuggccaucuucaucguguacauggugagcagagacaacgugagcugcagcaucugccuguga

SEQ ID NO: 188630 - RNA, 1755 nt, Artificial Sequence
  derived and/or modified CDS sequence (opt4) from hemagglutinin__InfluenzaB__EPI614608
augaaggccaucaucgugcugcugaugguggugaccagcaacgccgacagaaucugcaccggcaucaccagcagcaacagcccccacguggugaagaccgccacccagggcgaggugaacgugaccggcgugaucccccugaccaccacccccaccaagagcuacuucgccaaccugaagggcaccagaaccagaggcaagcugugccccgacugccugaacugcaccgaccuggacguggcccugggcagacccaugugcgugggcaccacccccagcgccaaggccagcauccugcacgaggugagacccaucaccagcggcugcuuccccaucaugcacgacagaaccaagaucagacagcugcccaaccugcugagaggcuacgagaagaucagacugagcacccagaacgugaucgacgccgagaaggcccccggcggccccuacagacugggcaccagcggcagcugccccaacgccaccagcaagaucggcuucuucgccaccauggccugggccgugcccaaggacaacuacaagaacgccaccaacccccugaccguggaggugcccuacaucugcaccgagggcgaggaccagaucaccguguggggcuuccacagcgacgagaagacccagaugaagagccuguacggcgacagcaacccccagaaguucaccagcagcgccaacggcgugaccacccacuacgugagccagaucggcgacuuccccgaccagaccgaggacggcggccugccccagagcggcagaaucgugguggacuacaugaugcagaagcccggcaagaccggcaccaucguguaccagagaggcgugcugcugccccagaagguguggugcgccagcggcagaagcaaggugaucaagggcagccugccccugaucggcgaggccgacugccugcacgaggaguacggcggccugaacaagagcaagcccuacuacaccggcaagcacgccaaggccaucggcaacugccccaucugggugaagaccccccugaagcuggccaacggcaccaaguacagaccccccgccaagcugcugaaggagagaggcuucuucggcgccaucgccggcuuccuggagggcggcugggagggcaugaucgccggcuggcacggcuacaccagccacggcgcccacggcguggccguggccgccgaccugaagagcacccaggaggccaucaacaagaucaccaagaaccugaacagccugagcgagcuggaggugaagaaccugcagagacugagcggcgccauggacgagcugcacaacgagauccuggagcuggacgagaagguggacgaccugagagccgacaccaucagcagccagaucgagcuggccgugcugcugagcaacgagggcaucaucaacagcgaggacgagcaccugcuggcccuggagagaaagcugaagaagaugcugggccccagcgccguggacaucggcaacggcugcuucgagaccaagcacaagugcaaccagaccugccuggacagaaucgccgccggcaccuucaacgccggcgaguucagccugcccaccuucgacagccugaacaucaccgccgccagccugaacgacgacggccuggacaaccacaccauccugcuguacuacagcaccgccgccagcagccuggccgugacccugaugcuggccaucuucaucguguacauggugagcagagacaacgugagcugcagcaucugccuguga

SEQ ID NO: 188631 - RNA, 1755 nt, Artificial Sequence
  derived and/or modified CDS sequence (opt4) from hemagglutinin__InfluenzaB__EPI614610
augaaggccaucaucgugcugcugaugguggugaccagcaacgccgacagaaucugcaccggcaucaccagcagcaacagcccccacguggugaagaccgccacccagggcgaggugaacgugaccggcgugaucccccugaccaccacccccaccaagagcuacuucgccaaccugaagggcaccagaaccagaggcaagcugugccccgacugccugaacugcaccgaccuggacguggcccugggcagacccaugugcgugggcaccacccccagcgccaaggccagcauccugcacgaggugagacccgugaccagcggcugcuuccccaucaugcacgacagaaccaagaucagacagcugcccaaccugcugagaggcuacgagaagaucagacugagcacccagaacgugaucgacgccgagaaggcccccggcggccccuacagacugggcaccagcggcagcugccccaacgccaccagcaagaucggcuucuucgccaccauggccugggccgugcccaaggacaacuacaagaacgccaccaacccccugaccguggaggugcccuacaucugcaccgagggcgaggaccagaucaccguguggggcuuccacagcgacgagaagacccagaugaagagccuguacggcgacagcaacccccagaaguucaccagcagcgccaacggcgugaccacccacuacgugagccagaucggcgacuuccccgaccagaccgaggacggcggccugccccagagcggcagaaucgugguggacuacaugaugcagaagcccggcaagaccggcaccaucguguaccagagaggcgugcugcugccccagaagguguggugcgccagcggcagaagcaaggugaucaagggcagccugccccugaucggcgaggccgacugccugcacgaggaguacggcggccugaacaagagcaagcccuacuacaccggcaagcacgccaaggccaucggcaacugccccaucugggugaagaccccccugaagcuggccaacggcaccaaguacagaccccccgccaagcugcugaaggagagaggcuucuucggcgccaucgccggcuuccuggagggcggcugggagggcaugaucgccggcuggcacggcuacaccagccacggcgcccacggcguggccguggccgccgaccugaagagcacccaggaggccaucaacaagaucaccaagaaccugaacagccugagcgagcuggaggugaagaaccugcagagacugagcggcgccauggacgagcugcacaacgagauccuggagcuggacgagaagguggacgaccugagagccgacaccaucagcagccagaucgagcuggccgugcugcugagcaacgagggcaucaucaacagcgaggacgagcaccugcuggcccuggagagaaagcugaagaagaugcugggccccagcgccguggacaucggcaacggcugcuucgagaccaagcacaagugcaaccagaccugccuggacagaaucgccgccggcaccuucaacgccggcgaguucagccugcccaccuucgacagccugaacaucaccgccgccagccugaacgacgacggccuggacaaccacaccauccugcuguacuacagcaccgccgccagcagccuggccgugacccugaugcuggccaucuucaucguguacauggugagcagagacaacgugagcugcagcaucugccuguga

SEQ ID NO: 188632 - RNA, 1758 nt, Artificial Sequence
  derived and/or modified CDS sequence (opt4) from hemagglutinin__InfluenzaB__AAA43697
augaaggccaucaucgugcugcugaugguggugaccagcaacgccgacagaaucugcaccggcaucaccagcagcaacagcccccacguggugaagaccgccacccagggcgaggugaacgugaccggcgugaucccccugaccaccacccccaccaagagccacuucgccaaccugaagggcaccaagaccagaggcaagcugugccccaagugccugaacugcaccgaccuggacguggcccuggccagacccaagugcaugggcaccauccccagcgccaaggccagcauccugcacgaggugaagcccgugaccagcggcugcuuccccaucaugcacgacagaaccaagaucagacagcugcccaaccugcugagaggcuacgagcacaucagacugagcacccacaacgugaucaacgccgagaccgcccccggcggccccuacaaggugggcaccagcggcagcugccccaacgugaccaacggcaacggcuucuucgccaccauggccugggccgugcccaagaacgacaacaacaagaccgccaccaacccccugaccguggaggugcccuacaucugcaccgagggcgaggaccagaucaccguguggggcuuccacagcgacagcgagacccagauggugaagcuguacggcgacagcaagccccagaaguucaccagcagcgccaacggcgugaccacccacuacgugagccagaucggcggcuuccccaaccaggccgaggacggcggccugccccagagcggcagaaucgugguggacuacauggugcagaagagcggcaagaccggcaccaucaccuaccagagaggcauccugcugccccagaagguguggugcgccagcggcagaagcaaggugaucaagggcagccugccccugaucggcgaggccgacugccugcacgagaaguacggcggccugaacaagagcaagcccuacuacaccggcgagcacgccaaggccaucggcaacugccccaucugggugaagaccccccugaagcuggccaacggcaccaaguacagaccccccgccaagcugcugaaggagagaggcuucuucggcgccaucgccggcuuccuggagggcggcugggagggcaugaucgccggcuggcacggcuacaccagccacggcgcccacggcguggccguggccgccgaccugaagagcacccaggaggccaucaacaagaucaccaagaaccugaacagccugagcgagcuggaggugaagaaccugcagagacugagcggcgccauggacgagcugcacaacgagauccuggagcuggacgagaagguggacgaccugagagccgacaccaucagcagccagaucgagcuggccgugcugcugagcaacgagggcaucaucaacagcgaggacgagcaccugcuggcccuggagagaaagcugaagaagaugcugggccccagcgccguggagaucggcaacggcugcuucgagaccaagcacaagugcaaccagaccugccuggacagaaucgccgccggcaccuucaacgccggcgaguucagccugcccaccuucgacagccugaacaucaccgccgccagccugaacgacgacggccuggacaaccacaccauccugcuguacuacagcaccgccgccagcagccuggccgugacccugaugaucgccaucuucaucguguacauggugagcagagacaacgugagcugcagcaucugccuguga

SEQ ID NO: 188633 - RNA, 1755 nt, Artificial Sequence
  derived and/or modified CDS sequence (opt4) from hemagglutinin__InfluenzaB__EPI271545
augaaggccaucaucgugcugcugaugguggugaccagcaacgccgacagaaucugcaccggcaucaccagcagcaacagcccccacguggugaagaccgccacccagggcgaggugaacgugaccggcgugaucccccugaccaccacccccaccaagagcuacuucgccaaccugaagggcaccagaaccagaggcaagcugugccccgacugccugaacugcaccgaccuggacguggcccugggcagacccaugugcgugggcaccacccccagcgccaaggccagcauccugcacgaggugagacccgugaccagcggcugcuuccccaucaugcacgacagaaccaagaucagacagcugcccaaccugcugagaggcuacgagaacaucagacugagcacccagaacgugaucgacgccgagaaggcccccggcggccccuacagacugggcaccagcggcagcugccccaacgccaccagcaagaucggcuucuucgccaccauggccugggccgugcccaaggacaacuacaagaacgccaccaacccccugaccguggaggugcccuacaucugcaccgagggcgaggaccagaucaccguguggggcuuccacagcgacaacaagacccagaugaagagccuguacggcgacagcaacccccagaaguucaccagcagcgccaacggcgugaccacccacuacgugagccagaucggcgacuuccccgaccagaccgaggacggcggccugccccagagcggcagaaucgugguggacuacaugaugcagaagcccggcaagaccggcaccaucguguaccagagaggcgugcugcugccccagaagguguggugcgccagcggcagaagcaaggugaucaagggcagccugccccugaucggcgaggccgacugccugcacgagaaguacggcggccugaacaagagcaagcccuacuacaccggcgagcacgccaaggccaucggcaacugccccaucugggugaagaccccccugaagcuggccaacggcaccaaguacagaccccccgccaagcugcugaaggagagaggcuucuucggcgccaucgccggcuuccuggagggcggcugggagggcaugaucgccggcuggcacggcuacaccagccacggcgcccacggcguggccguggccgccgaccugaagagcacccaggaggccaucaacaagaucaccaagaaccugaacagccugagcgagcuggaggugaagaaccugcagagacugagcggcgccauggacgagcugcacaacgagauccuggagcuggacgagaagguggacgaccugagagccgacaccaucagcagccagaucgagcuggccgugcugcugagcaacgagggcaucaucaacagcgaggacgagcaccugcuggcccuggagagaaagcugaagaagaugcugggccccagcgccguggacaucggcaacggcugcuucgagaccaagcacaagugcaaccagaccugccuggacagaaucgccgccggcaccuucaacgccggcgaguucagccugcccaccuucgacagccugaacaucaccgccgccagccugaacgacgacggccuggacaaccacaccauccugcuguacuacagcaccgccgccagcagccuggccgugacccugaugcuggccaucuucaucguguacauggugagcagagacaacgugagcugcagcaucugccuguga

SEQ ID NO: 188634 - RNA, 1755 nt, Artificial Sequence
  derived and/or modified CDS sequence (opt4) from hemagglutinin__InfluenzaB__AGB08329
augaaggccaucaucgugcugcugaugguggugaccagcaacgccgacagaaucugcaccggcaucaccagcagcaacagcccccacguggugaagaccgccacccagggcgaggugaacgugaccggcgugaucccccugaccaccacccccaccaagagcuacuucgccaaccugaagggcaccagaaccagaggcaagcugugccccgacugccugaacugcaccgaccuggacguggcccugggcagacccaugugcgugggcaccacccccagcgccaaggccagcauccugcacgaggugagacccgugaccagcggcugcuuccccaucaugcacgacagaaccaagaucagacagcugcccaaccugcugagaggcuacgagaacaucagacugagcacccagaacgugaucgacgccgagaaggcccccggcggccccuacagacugggcaccagcggcagcugccccaacgccaccagcaagaucggcuucuucgccaccauggccugggccgugcccaaggacaacuacaagaacgccaccaacccccugaccguggaggugcccuacaucugcaccgagggcgaggaccagaucaccguguggggcuuccacagcgacaacaagauccagaugaagagccuguacggcgacagcaacccccagaaguucaccagcagcgccaacggcgugaccacccacuacgugagccagaucggcgacuuccccgaccagaccgaggacggcggccugccccagagcggcagaaucgugguggacuacaugaugcagaagcccggcaagaccggcaccaucguguaccagagaggcgugcugcugccccagaagguguggugcgccagcggcagaagcaaggugaucaagggcagccugccccugaucggcgaggccgacugccugcacgagaaguacggcggccugaacaagagcaagcccuacuacaccggcgagcacgccaaggccaucggcaacugccccaucugggugaagaccccccugaagcuggccaacggcaccaaguacagaccccccgccaagcugcugaaggagagaggcuucuucggcgccaucgccggcuuccuggagggcggcugggagggcaugaucgccggcuggcacggcuacaccagccacggcgcccacggcguggccguggccgccgaccugaagagcacccaggaggccaucaacaagaucaccaagaaccugaacagccugagcgagcuggaggugaagaaccugcagagacugagcggcgccauggacgagcugcacaacgagauccuggagcuggacgagaagguggacgaccugagagccgacaccaucagcagccagaucgagcuggccgugcugcugagcaacgagggcaucaucaacagcgaggacgagcaccugcuggcccuggagagaaagcugaagaagaugcugggccccagcgccguggacaucggcaacggcugcuucgagaccaagcacaagugcaaccagaccugccuggacagaaucgccgccggcaccuucaacgccggcgaguucagccugcccaccuucgacagccugaacaucaccgccgccagccugaacgacgacggccuggacaaccacaccauccugcuguacuacagcaccgccgccagcagccuggccgugacccugaugcuggccaucuucaucguguacauggugagcagagacaacgugagcugcagcaucugccuguga

SEQ ID NO: 188635 - RNA, 1755 nt, Artificial Sequence; identical to SEQ ID NO: 186815
  derived and/or modified CDS sequence (opt4) from hemagglutinin__InfluenzaB__EPI294880

SEQ ID NO: 188636 - RNA, 1752 nt, Artificial Sequence; identical to SEQ ID NO: 186526
  derived and/or modified CDS sequence (opt4) from hemagglutinin__InfluenzaB__CY018765

SEQ ID NO: 188637 - RNA, 1401 nt, Artificial Sequence
  derived and/or modified CDS sequence (opt4) from neuraminidase__InfluenzaB__AAN39743
augcugcccagcaccauccagacccugacccuguuccugaccagcggcggcgugcugcugagccuguacgugagcgcccugcugagcuaccugcuguacagcgacauccugcugaaguucagccccaccaaggugaucgcccccaccaugagccuggacugcgccaacgccagcaacgugcaggccgugaaccacagcgccaccgaggagaugaccuuccugcugcccgagcccgaguggaccuaccccagacugagcugccagggcagcaccuuccagaaggcccugcugaucagcccccacagauucggcgaggccaagggcaacagcgccccccugaucaucagagagcccuucaucgccugcggccccaaggagugcauccacuucgcccugacccacuacgccgcccagcccggcggcuacuacaacggcaccagagaggacagaaacaagcugagacaccugaucagcgugaaccugggcaagauccccaccguggagaacagcaucuuccacauggccgccuggagcggcagcgccugccacgacggcagagaguggaccuacaucggcguggacggccccgacagcaacgcccugaucaagaucaaguacggcgaggccuacaccgacaccuaccacagcuacgccaacaacauccugagaacccaggagagcgccugcaacugcaucggcggcgacugcuaccugaugaucaccgacggcagcgccagcggcaucagcagaugcagauuccugaagaucagagagggcagaaucaucaaggagaucuuccccaccggcagaguggagcacaccgaggagugcaccugcggcuucgccagcaacaagaccaucgagugcgugugcagagacaacagcuacaccgccaagagacccuucgugaagcugaacguggagaccgacaccgccgagaucagacugaugugcaccgagaccuaccuggacacccccagacccgacgacggcagcaucaccggccccugcgagagcaacggcgacaagggcaacggcggcaucaagggcggcuucgugcaccagagaauggccagcagaaucggcagaugguacagcagaaccaugagcaagaccaagagaaugggcauggagcuguacgugaaguacgacggcgaccccuggaccgacagcgacgcccuggcccccagcggcgugauggugagcauggaggagcccggcugguacagcuucggcuucgagaucaaggacaagaagugcgacgugcccugcaucggcaucgagauggugcacgacggcggcaagaagaccuggcacagcgccgccaccgccaucuacugccugaugggcagcggccagcugcugugggacaccgugaccggcguggacauggcccuguga

SEQ ID NO: 188638 - RNA, 1401 nt, Artificial Sequence
  derived and/or modified CDS sequence (opt4) from neuraminidase__InfluenzaB__AAN39747
augcugcccagcaccauccagacccugauccuguuccugaccagcggcggcgugcugcugagccuguacgugagcgcccugcugagcuaccugcuguacagcgacauccugcugaaguucagccccaccaagaucaucgcccccaccaugagccuggacugcgccaacgccagcaacgugcaggccgugaaccacagcgccaccaaggagaugaccuuccugcugcccgagcccgaguggaccuaccccagacugagcugccagggcagcaccuuccagaaggcccugcugaucagcccccacagauucggcgaggccaagggcaacagcgccccccugaucaucagagagcccuucaucgccugcggccccaaggagugcaagcacuucgcccugacccacuacgccgcccagcccggcggcuacuacaacggcaccagagaggacagaaacaagcugagacaccugaucagcgugaaccugggcaagauccccaccguggagaacagcaucuuccacauggccgccuggagcggcagcgccugccacgacggcagagaguggaccuacaucggcguggacggccccgacagcaacgcccugaucaagaucaaguacggcgaggccuacaccgacaccuaccacagcuacgccaacaacauccugagaacccaggagagcgccugcaacugcaucggcggcgacugcuaccugaugaucaccgacggcagcgccagcggcaucagcaagugcagauuccugaagaucagagagggcagaaucaucaaggagaucuuccccaccggcagaguggagcacaccgaggagugcaccugcggcuucgccagcaacaagaccaucgagugcgccugcagagacaacagcuacaccgccaagagacccuucgugaagcugaacguggagaccgacaccgccgagaucagacugaugugcaccaagaccuaccuggacacccccagacccgacgacggcagcaucaccggccccugcgagagcaacggcgacaagggcagcggcggcaucaagggcggcuucgugcaccagagaauggccagcaagaucggcagaugguacagcagaaccaugagcaagaccaagagaaugggcauggagcuguacgugaaguacgacggcgaccccuggaccgacagcgacgcccuggcccccagcggcgugauggugagcaucgaggagcccggcugguacagcuucggcuucgagaucaaggacaagaagugcgacgugcccugcaucggcaucgagauggugcacgacggcggcaagaagaccuggcacagcgccgccaccgccaucuacugccugaugggcagcggccagcugcugugggacaccgugaccggcguggacauggcccuguga

SEQ ID NO: 188639 - RNA, 1401 nt, Artificial Sequence
  derived and/or modified CDS sequence (opt4) from neuraminidase__InfluenzaB__AAN39749
augcugcccagcaccauccagacccugacccuguuccugaccagcggcggcgugcugcugagccuguacgugagcgcccugcugagcuaccugcuguacagcgacauccugcugaaguucagccccaccaaggugaucgcccccaccaugagccuggacugcgccaacgccagcaacgugcaggccgugaaccacagcgccaccgaggagaugaccuuccugcugcccgagcccgaguggaccuaccccagacugagcugccagggcagcaccuuccagaaggcccugcugaucagcccccacagauucggcgaggccaagggcaacagcgccccccugaucaucagagagcccuucaucgccugcggccccaaggagugcaagcacuucgcccugacccacuacgccgcccagcccggcggcuacuacaacggcaccagagaggacagaaacaagcugagacaccugaucagcgugaaccugggcaagauccccaccguggagaacagcaucuuccacauggccgccuggagcggcagcgccugccacgacggcagagaguggaccuacaucggcguggacggccccgacagcaacgcccugaucaagaucaaguacggcgaggccuacaccgacaccuaccacagcuacgccaacaacauccugagaacccaggagagcgccugcaacugcaucggcggcgacugcuaccugaugaucaccgacggcagcgccagcggcaucagcagaugcagauuccugaagaucagagagggcagaaucaucaaggagaucuuccccaccggcagaguggagcacaccgaggagugcaccugcggcuucgccagcaacaagaccaucgagugcgccugcagagacaacagcuacaccgccaagagacccuucgugaagcugaacguggagaccgacaccgccgagaucagacugaugugcaccgagaccuaccuggacacccccagacccgacgacggcagcaucaccggccccugcgagagcaacggcgacaagggcaacggcggcaucaagggcggcuucgugcaccagagaauggccagcagaaucggcagaugguacagcagaaccaugagcaagaccaagagaaugggcauggagcuguacgugaaguacgacggcgaccccuggaccgacagcgacgcccuggcccccagcggcgugauggugagcauggaggagcccggcugguacagcuucggcuucgagaucaaggacaagaagugcgacgugcccugcaucggcaucgagauggugcacgacggcggcaagaagaccuggcacagcgccgccaccgccaucuacugccugaugggcagcggccagcugcugugggacaccgugaccggcguggacauggcccuguga

SEQ ID NO: 188640 - RNA, 1401 nt, Artificial Sequence
  derived and/or modified CDS sequence (opt4) from neuraminidase__InfluenzaB__AAN39751
augcugcccagcaccauccagacccugacccuguuccugaccagcggcggcgugcugcugagccuguacgugagcgcccugcugagcuaccugcuguacagcgacauccugcugaaguucagccccaccaaggugaucgcccccaccaugagccuggacugcgccaacgccagcaacgugcaggccgugaaccacagcgccaccgaggagaugaccuuccugcugcccgagcccgaguggaccuaccccagacugagcugccagggcagcaccuuccagaaggcccugcugaucagcccccacagauucggcgaggccaagggcaacagcgccccccugaucaucagagagcccuucaucgccugcggccccaaggagugcaagcacuucgcccugacccacuacgccgcccagcccggcggcuacuacaacggcaccagagaggacagaaacaagcugagacaccugaucagcgugaaccugggcaagauccccaccguggagaacagcaucuuccacauggccgccuggagcggcagcgccugccacgacggcagagaguggaccuacaucggcguggacggccccgacagcaacgcccugaucaagaucaaguacggcgaggccuacaccgacaccuaccacagcuacgccaacaacauccugagaacccaggagagcgccugcaacugcaucggcggcgacugcuaccugaugaucaccgacggcagcgccagcggcaucagcagaugcagauuccugaagaucagagagggcagaauccugaaggagaucuuccccaccggcagaguggagcacaccgaggagugcaccugcggcuucgccagcaacaagaccaucgagugcgccugcagagacaacagcuacaccgccaagagacccuucgugcagcugaacguggagaccgacaccgccgagaucagacugaugugcaccgagaccuaccuggacacccccagacccgacgacggcagcaucaccggccccugcgagagcaacggcgacaagggcaacggcggcaucaagggcggcuucgugcaccagagaauggccagcagaaucggcagaugguacagcagaaccaugagcaagaccaagagaaugggcauggaccuguacgugaaguacgacggcgaccccuggaccgacagcgacgcccuggcccccagcggcgugauggugagcauggaggagcccggcugguacagcuucggcuucgagaucaaggacaagaagugcgacgugcccugcaucggcaucgagauggugcacgacggcggcaagaagaccuggcacagcgccgccaccgccaucuacugccugaugggcagcggccagcugcugugggacaccgugaccggcguggacauggcccuguga

SEQ ID NO: 188641 - RNA, 1401 nt, Artificial Sequence
  derived and/or modified CDS sequence (opt4) from neuraminidase__InfluenzaB__AAN39753
augcugcccagcaccauccagacccugacccuguuccugaccagcggcggcgugcugcugagccuguacgugagcgcccugcugagcuaccugcuguacagcgacauccugcugaaguucagccccaccaaggugaucgcccccaccaugagccuggacugcgccaacgccagcaacgugcaggccgugaaccacagcgccaccgaggagaugaccuuccugcugcccgagcccgaguggaccuaccccagacugagcugccagggcagcaccuuccagaaggcccugcugaucagcccccacagauucggcgaggccaagggcaacagcgccccccugaucaucagagagcccuucaucgccugcggccccaaggagugcaagcacuucgcccugacccacuacgccgcccagcccggcgaguacuacaacggcaccagagaggacagaaacaagcugagacaccugaucagcgugaaccugggcaagauccccaccguggagaacagcaucuuccacauggccgccuggagcggcagcgccugccacgacggcagagaguggaccuacaucggcguggacggccccgacagcaacgcccugaucaagaucaaguacggcgaggccuacaccgacaccuaccacagcuacgccaacaacauccugagaacccaggagagcgccugcaacugcaucggcggcgacugcuaccugaugaucaccgacggcagcgccagcggcaucagcagaugcagauuccugaagaucagagagggcagaaucaucaaggagaucuuccccaccggcagaguggagcacaccgaggagugcaccugcggcuucgccagcaacaagaccaucgagugcgccugcagagacaacagcuacaccgccaagagacccuucgugaagcugaacguggagaccgacaccgccgagaucagacugaugugcaccgagaccuaccuggacacccccagacccgacgacggcagcaucaccggccccugcgagagcaacggcgacaagggcaacggcggcaucaagggcggcuucgugcaccagagaauggccagcagaaucggcagaugguacagcagaaccaugagcaagaccaagagaaugggcauggagcuguacgugaaguacgacggcgaccccuggaccgacagcgacgcccuggcccccagcggcgugauggugagcauggaggagcccggcugguacagcuucggcuucgagaucaaggacaagaagugcgacgugcccugcaucggcaucgagauggugcacgacggcggcaagaagaccuggcacagcgccgccaccgccaucuacugccugaugggcagcggccagcugcugugggacaccgugaccggcguggacauggcccuguga

SEQ ID NO: 188642 - RNA, 1401 nt, Artificial Sequence
  derived and/or modified CDS sequence (opt4) from neuraminidase__InfluenzaB__AAN39759
augcugcccagcaccauccagacccugacccuguuccugaccagcggcggcgugcugcugagccuguacgugagcgccagccugagcuaccugcuguacagcgacauccugcugaagcugagccccaccgagaucaccgcccccaccaugccccuggacugcgccaacgccagcaacgugcaggccgugaacagaagcgccaccaagggcgugacccugcugcugcccgagcccgaguggaccuaccccagacugagcugccccggcagcaccuuccagaaggcccugcugaucagcccccacagauucggcgagaccaagggcaacagcgccccccugaucaucagagagcccuucaucgccugcggccccaaggagugcaagcacuucgcccugacccacuacgccgcccagcccggcggcuacuacaacggcaccagagaggacagaaacaagcugagacaccugaucagcgugaagcugggcaagauccccaccguggagaacagcaucuuccacauggccgccuggagcggcagcgccugccacgacggcaaggaguggaccuacaucggcguggacggccccgacagcaacgcccugcugaagaucaaguacggcgaggccuacaccgacaccuaccacagcuacgccaacaacauccugagaacccaggagagcgccugcaacugcaucggcggcaacugcuaccugaugaucaccgacggcagcgccagcggcaucagcgagugcagauuccugaagaucagagagggcagaaucaucaaggagaucuuccccaccggcagagugaagcacaccgaggagugcaccugcggcuucgccagcaacaagaccaucgagugcgccugcagagacaacagcuacaccgccaagagacccuucgugaagcugaacguggagaccgacaccgccgagaucagacugaugugcaccgagaccuaccuggacacccccagacccgacgacggcagcaucaccggccccugcgagagcaacggcgacaagggcagcggcggcaucaagggcggcuucgugcaccagagaauggagagcaagaucggcagaugguacagcagaaccaugagcaagaccaagagaaugggcaugggccuguacgugaaguacgacggcgaccccuggaccgacagcgacgcccuggcccugagcggcgugauggugagcaucgaggagcccggcugguacagcuucggcuucgagaucaaggacaagaagugcgacgugcccugcaucggcaucgagauggugcacgacggcggcaaggagaccuggcacagcgccgccaccgccaucuacugccugaugggcagcggccagcugcugugggacaccgugaccggcguggacauggcccuguga

SEQ ID NO: 188643 - RNA, 1401 nt, Artificial Sequence
  derived and/or modified CDS sequence (opt4) from neuraminidase__InfluenzaB__AAN39761
augcugcccagcaccauccagacccugacccuguuccugaccagcggcggcgugcugcugagccuguacgugagcgccagccugagcuaccugcuguacagcgacauccugcugaaguucagccagaccgagaucaccgcccccaccaugccccuggacugcgccaacgccagcaacgugcaggccgugaacagaagcgccaccaagggcgugacccugcugcugcccgagcccgaguggaccuaccccagacugagcugccccggcagcaccuuccagaaggcccugcugaucagcccccacagauucggcgagaccaagggcaacagcgccccccugaucaucagagagcccuucaucgccugcggccccaaggagugcaagcacuucgcccugacccacuacgccgcccagcccggcggcuacuacaacggcaccagagaggacagaaacaagcugagacaccugaucagcgugaagcugggcaagauccccaccguggagaacagcaucuuccacauggccgccuggagcggcagcgccugccacgacggcagagaguggaccuacaucggcguggacggccccgacagcaacgcccugcugaagaucaaguacggcgaggccuacaccgacaccuaccacagcuacgccaagaacauccugagaacccaggagagcgccugcaacugcaucggcggcgacugcuaccugaugaucaccgacggcagcgccagcggcaucagcgagugcagauuccugaagaucagagagggcagaaucaucaaggagaucuuccccaccggcagaaucaagcacaccgaggagugcaccugcggcuucgccagcaacaagaccaucgagugcgccugcagagacaacagcuacaccgccaagagacccuucgugaagcugaacguggagaccgacaccgccgagaucagacugaugugcaccgagaccuaccuggacacccccagacccgacgacggcagcaucaccggccccugcgagagcaacggcgacaagggcagcggcggcaucaagggcggcuucgugcaccagagaauggccagcaagaucggcagaugguacagcagaaccaugagcaagaccaagagaaugggcaugggccuguacgugaaguacgacggcgaccccuggaccgacagcgaggcccuggcccugagcggcgugauggugagcauggaggagcccggcugguacagcuucggcuucgagaucaaggacaagaagugcgacgugcccugcaucggcaucgagauggugcacgacggcggcaagaccaccuggcacagcgccgccaccgccaucuacugccugaugggcagcggccagcugcugugggacaccgugaccggcguggacauggcccuguga

SEQ ID NO: 188644 - RNA, 1401 nt, Artificial Sequence
  derived and/or modified CDS sequence (opt4) from neuraminidase__InfluenzaB__AAN39769
augcugcccagcaccauccagacccugacccuguuccugaccagcggcggcgugcugcugagccuguacgugagcgcccugcugagcuaccugcuguacagcgacauccugcugaaguucagccccaccaagaucaucgcccccaccaccagccuggacagcgccaacgccagcaacuuccaggccgugaaccacagcgccaccaaggagaugaccuuccugcugcccgagcccgaguggaccuaccccagacugagcugccagggcagcaccuuccagaaggcccugcugaucagcccccacagauucggcgaggccaagggcaacagcgccccccugaucaucagagagcccuucaucgccugcggccccaaggagugcaagcacuucgcccugacccacuacgccgcccagcccggcggcuacuacaacggcaccagagaggacagaaacaagcugagacaccugaucagcgugaaccugggcaagauccccaccguggagaacagcaucuuccacauggccgccuggagcggcagcgccugccacgacggcagagaguggaccuacaucggcguggacggccccgacagcaacgcccugaucaagaucaaguacggcgaggccuacaccgacaccuaccacagcuacgccaacaacauccugagaacccaggagagcgccugcaacugcaucggcggcgacugcuaccugaugaucaccgacggcagcgccagcggcaucagcaagugcagauuccugaagaucagagagggcagaaucaucaaggagaucuuccccaccggcagaguggagcacaccgaggagugcaccugcggcuucgccagcaacaagaccaucgagugcgccugcagagacaacagcuacaccgccaagagacccuucgugaagcugaacguggagaccgacaccgccgagaucagacugaugugcaccgagaccuaccuggacacccccagacccgacgacggcagcaucaccggccccugcgagagcaacggcgacaagggcagcggcggcaucaagggcggcuucgugcaccagagaauggccagcaagaucggcagaugguacagcagaaccaugagcaagaccaagagaaugggcauggagcuguacgugaaguacgacggcgaccccuggaccgacagcgacgcccuggcccccagcggcgugauggugagcaucgaggagcccggcugguacagcuucggcuucgagaucaaggacaagaagugcgacgugcccugcaucggcaucgagauggugcacgacggcggcaagaccaccuggcacagcgccgccaccgccaucuacugccugaugggcagcggccagcugcugugggacaccgugaccggcguggacauggcccuguga

SEQ ID NO: 188645 - RNA, 1401 nt, Artificial Sequence
  derived and/or modified CDS sequence (opt4) from neuraminidase__InfluenzaB__AAN39771
augcugcccagcaccauccagacccugacccuguuccugaccagcggcggcgugcugcugagccuguacgugagcgcccugcugagcuaccugcuguacagcgacauccugcugaaguucagccccaccaagaucaucgcccccaccaccagccuggacagcgccaacgccagcaacuuccaggccgugaaccacagcgccaccaaggagaugaccuuccugcugcccgagcccgaguggaccuaccccagacugagcugccagggcagcaccuuccagaaggcccugcugaucagcccccacagauucggcgaggccaagggcaacagcgccccccugaucaucagagagcccuucaucgccugcggccccaaggagugcaagcacuucgcccugacccacuacgccgcccagcccggcggcuacuacaacggcaccagagaggacagaaacaagcugagacaccugaucagcgugaaccugggcaagauccccaccguggagaacagcaucuuccacauggccgccuggagcggcagcgccugccacgacggcagagaguggaccuacaucggcguggacggccccgacagcaacgcccugaucaagaucaaguacggcgaggccuacaccgacaccuaccacagcuacgccaacaacauccugagaacccaggagagcgccugcaacugcaucggcggcgacugcuaccugaugaucaccgacggcagcgccagcggcaucagcaagugcagauuccugaagaucagagagggcagaaucgugaaggagaucuuccccaccggcagaguggagcacaccgaggagugcaccugcggcuucgccagcaacaagaccaucgagugcgccugcagagacaacagcuacaccgccaagagacccuucgugaagcugaacguggagaccgacaccgccgagaucagacugaugugcaccgagaccuaccuggacacccccagacccgacgacggcagcaucaccggccccugcgagagcaacggcgacaagggcagcggcggcaucaagggcggcuucgugcaccagagaauggccagcaagaucggcagaugguacagcagaaccaugagcaagaccaagagaaugggcauggagcuguacgugaaguacgacggcgaccccuggaccgacagcgacgcccuggaccccagcggcgugauggugagcaucgaggagcccggcugguacagcuucggcuucgagaucaaggacaagaagugcgacgugcccugcaucggcaucgagauggugcacgacggcggcaagaccaccuggcacagcgccgccaccgccaucuacugccugaugggcagcggccagcugcugugggacaccaucaccggcguggacauggcccuguga

SEQ ID NO: 188646 - RNA, 1401 nt, Artificial Sequence
  derived and/or modified CDS sequence (opt4) from neuraminidase__InfluenzaB__AAN39773
augcugcccagcaccauccagacccugacccuguuccugaccagcggcggcgugcugcugagccuguacgugagcgcccugcugagcuaccugcuguacagcgacauccugcugaaguucagccccaccaagaucaucgcccccaccaccagccuggacagcgccaacgccagcaacuuccaggccgugaaccacagcgccaccaaggagaugaccuuccugcugcccgagcccgaguggaccuaccccagacugagcugccagggcagcaccuuccagaaggcccugcugaucagcccccacagauucggcgaggccaagggcaacagcgccccccugaucaucagagagcccuucaucgccugcggccccaaggagugcaagcacuucgcccugacccacuacgccgcccagcccggcggcuacuacaacggcaccagagaggacagaaacaagcugagacaccugaucagcgugaacuucggcaagauccccaccguggagaacagcaucuuccacauggccgccuggagcggcagcgccugccacgacggcagagaguggaccuacaucggcguggacggccccgacagcaacgcccugaucaagaucaaguacggcgaggccuacaccgacaccuaccacagcuacgccaacaacauccugagaacccaggagagcgccugcaacugcaucggcggcgacugcuaccugaugaucaccgacggcagcgccagcggcaucagcaagugcagauuccugaagaucagagagggcagaaucgugaaggagaucuuccccaccggcagaguggagcacaccgaggagugcaccugcggcuucgccagcaacaagaccaucgagugcgccugcagagacaacagcuacaccgccaagagacccuucgugaagcugaacguggagaccgacaccgccgagaucagacugaugugcaccgagaccuaccuggacacccccagacccgacgacggcagcaucaccggccccugcgagagcaacggcgacaagggcagcggcggcaucaagggcggcuucgugcaccagagaauggccagcaagaucggcagaugguacagcagaaccaugagcaagaccaagagaaugggcauggagcuguacgugaaguacgacggcgaccccuggaccgacagcgacgcccuggcccccagcggcgugauggugagcaucgaggagcccggcugguacagcuucggcuucgagaucaaggacaagaagugcgacgugcccugcaucggcaucgagauggugcacgacggcggcaagaccaccuggcacagcgccgccaccgccaucuacugccugaugggcagcggccagcugcugugggacaccaucaccggcguggacauggcccuguga

SEQ ID NO: 188647 - RNA, 1401 nt, Artificial Sequence
  derived and/or modified CDS sequence (opt4) from neuraminidase__InfluenzaB__AAN39775
augcugcccagcaccauccagacccugacccuguuccugaccagcggcggcgugcugcugagccuguacgugagcgcccugcugagcuaccugcuguacagcgacauccugcugaaguucagccccaccaagaucaucgcccccaccaccagccuggacagcgccaacgccagcaacuuccaggccgugaaccacagcgccaccaaggagaugaccuuccugcugcccgagcccgaguggaccuaccccagacugagcugccagggcagcaccuuccagaaggcccugcugaucagcccccacagauucggcgaggccaagggcaacagcgccccccugaucaucagagagcccuucaucgccugcggccccaaggagugcaagcacuucgcccugacccacuacgccgcccagcccggcggcuacuacaacggcaccagagaggacagaaacaagcugagacaccugaucagcgugaaccugggcaagauccccaccguggagaacagcaucuuccacauggccgccuggagcggcagcgccugccacgacggcaaggaguggaccuacaucggcguggacggccccgacagcaacgcccugaucaagaucaaguacggcgaggccuacaccgacaccuaccacagcuacgccaacaacauccugagaacccaggagagcgccugcaacugcaucggcggcgacugcuaccugaugaucaccgacggcagcgccagcggcaucagcaagugcagauuccugaagaucagagagggcagaaucaucaaggagaucuuccccaccggcagaguggagcacaccgaggagugcaccugcggcuucgccagcaacaagaccaucgagugcgccugcagagacaacagcuacaccgccaagagacccuucgugaagcugaacguggagaccgacaccgccgagaucagacugaugugcaccgagaccuaccuggacacccccagacccgacgacggcagcaucaccggccccugcgagagcaacggcgacaagggcagcggcggcaucaagggcggcuucgugcaccagagaauggccagcaagaucggcagaugguacagcagaaccaugagcaagaccaagagaaugggcauggagcuguacgugaaguacgacggcgaccccuggaccgacagcgacgcccuggcccccagcggcgugauggugagcaucgaggagcccggcugguacagcuucggcuucgagaucaaggacaagaagugcgacgugcccugcaucggcaucgagauggugcacgacggcggcaagaccaccuggcacagcgccgccaccgccaucuacugccugaugggcagcggccagcugcugugggacaccgugaccggcguggacauggcccuguga

SEQ ID NO: 188648 - RNA, 1401 nt, Artificial Sequence
  derived and/or modified CDS sequence (opt4) from neuraminidase__InfluenzaB__AAN39777
augcugcccagcaccauccagacccugacccuguuccugaccagcggcggcgugcugcugagccuguacgugagcgccagccugagcuaccugcuguacagcgacauccugcugaaguucagccagaccgagaucaccgcccccaccaugccccuggacugcgccaacgccagcaacgugcaggccgugaacagaagcgccaccaagggcgugacccugcugccccccgagcccgaguggaccuaccccagacugagcugccccggcagcaccuuccagaaggcccugcugaucagcccccacagauucggcgagaccaagggcaacagcgccccccugaucaucagagagcccuucaucgccugcggccccaaggagugcaagcacuucgcccugacccacuacgccgcccagcccggcggcuacuacaacggcaccagagaggacagaaacaagcugagacaccugaucagcgugaagcugggcaagauccccaccguggagaacagcaucuuccacauggccgccuggagcggcagcgccugccacgacggcagagaguggaccuacaucggcguggacggccccgacagcaacgcccugcugaagaucaaguacggcgaggccuacaccgacaccuaccacagcuacgccaagaacauccugagaacccaggagagcgccugcaacugcaucggcggcgacugcuaccugaugaucaccgacggcagcgccagcggcaucagcgagugcagauuccugaagaucagagagggcagaaucaucaaggagaucuuccccaccggcagagugaagcacaccgaggagugcaccugcggcuucgccagcaacaagaccaucgagugcgccugcagagacaacagcuacaccgccaagagacccuucgugaagcugaacguggagaccgacaccgccgagaucagacugaugugcaccgagaccuaccuggacacccccagacccgacgacggcagcaucaccggccccugcgagagcaacggcaacaagggcagcggcggcaucaagggcggcuucgugcaccagagaauggccagcaagaucggcagaugguacagcagaaccaugagcaagaccaagagaaugggcaugggccuguacgugaaguacgacggcgaccccuggaccgacagcgaggcccuggcccugagcggcgugauggugagcauggaggagcccggcugguacagcuucggcuucgagaucaaggacaagaagugcgacgugcccugcaucggcaucgagauggugcacgacggcggcaagaccaccuggcacagcgccgccaccgccaucuacugccugaugggcagcggccagcugcugugggacaccgugaccggcguggacauggcccuguga

SEQ ID NO: 188649 - RNA, 1401 nt, Artificial Sequence; identical to SEQ ID NO: 188644
  derived and/or modified CDS sequence (opt4) from neuraminidase__InfluenzaB__AAN39779

SEQ ID NO: 188650 - RNA, 1401 nt, Artificial Sequence
  derived and/or modified CDS sequence (opt4) from neuraminidase__InfluenzaB__AAN39781
augcugcccagcaccauccagacccugacccuguuccugaccagcggcggcgugcugcugagccuguacgugagcgccagccugagcuaccugcuguacagcgacauccugcugaaguucagcagcaccgagaucaccgcccccaccaugccccugaacugcgccaacgccagcaacgugcaggccgugaaccacagcgccaccaagggcgugacccugccccugcccgagcccgaguggaccuaccccagacugagcugccccggcagcaccuuccagaaggcccugcugaucagcccccacagauucggcgagaccaagggcaacagcgccccccugaucaucagagagcccuucaucgccugcggccccaaggagugcaagcacuucgcccugacccacuacgccgcccagcccggcggcuacuacaacggcaccagagaggacagaaacaagcugagacaccugaucagcgugaagcugggcaagauccccaccguggagaacagcaucuuccacauggccgccuggagcggcagcgccugccacgacggcagagaguggaccuacaucggcguggacggccccgacagcaacgcccugcugaagaucaaguacggcgaggccuacaccgacaccuaccacagcuacgccaacaacauccugagaacccaggagagcgccugcaacugcaucggcggcgacugcuaccugaugaucaccgacggcagcgccagcggcgugagcgagugcagauuccugaagaucagagagggcagaaucaucaaggagaucuuccccaccggcagaguggagcacaccgaggagugcaccugcggcuucgccagcaacaagaccaucgagugcgccugcagagacaacagcuacaccgccaagagacccuucgugaagcugaacguggagaccgacaccgccgagaucagacugaugugcaccgagaccuaccuggacacccccagacccgacgacggcagcaucaccggccccugcgagagcaacggcgacaagggcagcggcggcaucaagggcggcuucgugcaccagagaauggccagcaagaucggcagaugguacagcagaaccaugagcaagaacaagagaaugggcaugggccuguacgugaaguacgacggcgaccccuggaucgacagcgacgcccugacccugagcggcgugauggugagcauggaggagcccggcugguacagcuucggcuucgagaucaaggacaagaagugcgacgugcccugcaucggcaucgagauggugcacgacggcggcaaggagaccuggcacagcgccgccaccgccaucuacugccugaugggcagcggccagcugcugugggacaccgugaccggcgugaacauggcccuguga

SEQ ID NO: 188651 - RNA, 1401 nt, Artificial Sequence
  derived and/or modified CDS sequence (opt4) from neuraminidase__InfluenzaB__AAN39783
augcugcccagcaccauccagacccugacccuguuccugaccagcggcggcgugcugcugagccuguacgugagcgccagccugagcuaccugcuguacagcgacauccugcugaaguucagccagaccgagaucaccgcccccaccaugccccuggacugcgccaacgccagcaacgugcaggccgugaacagaagcgccaccaagggcgugacccugcugcugcccgagcccgaguggaccuaccccagacugagcugccccggcagcaccuuccagaaggcccugcugaucagcccccacagauucggcgagaccaagggcaacagcgccccccugaucaucagagagcccuucaucgccugcggccccaaggagugcaagcacuucgcccugacccacuacgccgcccagcccggcggcuacuacaacggcaccagagaggacagaaacaagcugagacaccugaucagcgugaagcugggcaagauccccaccguggagaacagcaucuuccacauggccgccuggagcggcagcgccugccacgacggcagagaguggaccuacaucggcguggacggccccgacagcaacgcccugcugaagaucaaguacggcgaggccuacaccgacaccuaccacagcuacgccaagaacauccugagaacccaggagagcgccugcaacugcaucggcggcgacugcuaccugaugaucaccgacggcagcgccagcggcaucagcgagugcagauuccugaagaucagagagggcagaaucaucaaggagaucuuccccaccggcagagugaagcacaccgaggagugcaccugcggcuucgccagcaacaagaccaucgagugcgccugcagagacaacagcuacaccgccaagagacccuucgugaagcugaacguggagaccgacaccgccgagaucagacugaugugcaccgagaccuaccuggacacccccagacccaacgacggcagcaucaccggccccugcgagagcaacggcgacaagggcagcggcggcaucaagggcggcuucgugcaccagagaauggccagcaagaucggcagaugguacagcagaaccaugagcaagaccaagagaaugggcaugggccuguacgugaaguacgacggcgaccccuggaccgacagcgaggcccuggcccugagcggcgugauggugagcauggaggagcccggcugguacagcuucggcuucgagaucaaggacaagaagugcgacgugcccugcaucggcaucgagauggugcacgacggcggcaagaccaccuggcacagcgccgccaccgccaucuacugccugaugggcagcggccagcugcugugggacaccgugaccggcguggacauggcccuguga

SEQ ID NO: 188652 - RNA, 1401 nt, Artificial Sequence
  derived and/or modified CDS sequence (opt4) from neuraminidase__InfluenzaB__AAN39785
augcugcccagcaccauccagacccugacccuguuccugaccagcggcggcgugcugcugagccuguacgugagcgcccugcugagcuaccugcuguacagcgacauccugcugaaguucagccccaccaaggugaucgcccccaccaugagccuggacuacgccaacgccagcaacgugcaggccgugaaccacagcgccaccgaggagaugaccuuccugcugcccgagcccgaguggaccuaccccagacugagcugccagggcagcaccuuccagaaggcccugcugaucagcccccacagauucggcgaggccaagggcaacagcgccccccugaucaucagagagcccuucaucgccugcggccccaaggagugcaagcacuucgcccugacccacuacgccgcccagcccggcggcuacuacaacggcaccagagaggacagaaacaagcugagacaccugaucagcgugaaccugggcaagauccccaccguggagaacagcaucuuccacauggccgccuggagcggcagcgccugccacgacggcagagaguggaccuacaucggcguggacggccccgacagcaacgcccugaucaagaucaaguacggcgaggccuacaccgacaccuaccacagcuacgccaacaacauccugagaacccaggagagcgccugcaacugcaucggcggcgacugcuaccugaugaucaccgacggcagcgccagcggcaucagcagaugcagauuccugaagaucagagagggcagaaucaucaaggagaucuuccccaccggcagaguggagcacaccgaggagugcaccugcggcuucgccagcaacaagaccaucgagugcgccugcagagacaacagcuacaccgccaagagacccuucgugaagcugaacguggagaccgacaccgccgagaucagacugaugugcaccgagaccuaccuggacacccccagacccgacgacggcagcaucaccggccccugcgagagcaacggcgacaagggcagcggcggcaucaagggcggcuucgugcaccagagaaugaccagcagaaucggcagaugguacagcagaaccaugagcaagaccaagagaaugggcauggagcuguacgugaaguacgacggcgaccccuggaccgacagcgacgcccuggcccccagcggcgugauggugagcauggaggagcccggcugguacagcuucggcuucgagaucaaggacaagaagugcgacgugcccugcaucggcaucgagauggugcacgacggcggcaagaagaccuggcacagcgccgccaccgccaucuacugccugaugggcagcggccagcugcugugggacaccgugaccggcguggacauggcccuguga

SEQ ID NO: 188653 - RNA, 1401 nt, Artificial Sequence
  derived and/or modified CDS sequence (opt4) from neuraminidase__InfluenzaB__AAN39787
augcugcccagcaccauccagacccugacccuguuccugaccagcggcggcgugcugcugagccuguacgugagcgcccugcugagcuaccugcuguacagcgacauccugcugaaguucagccccaccaaggugaucgcccccaccaugagccuggacuacgccaacgccagcaacgugcaggccgugaaccacagcgccaccgaggagaugaccuuccugcugcccgagcccgaguggaccuaccccagacugagcugccagggcagcaccuuccagaaggcccugcugaucagcccccacagauucggcgaggccaagggcaacagcgccccccugaucaucagagagcccuucaucgccugcggccccaaggagugcaagcacuucgcccugacccacuacgccgcccagcccggcggcuacuacaacggcaccagagaggacagaaacaagcugagacaccugaucagcgugaaccugggcaagauccccaccguggagaacagcaucuuccacauggccgccuggagcggcagcgccugccacgacggcagagaguggaccuacaucggcguggacggccccgacagcaacgcccugaucaagaucaaguacggcgaggccuacaccgacaccuaccacagcuacgccaacaacauccugagaacccaggagagcgccugcaacugcaucggcggcgacugcuaccugaugaucaccgacggcagcgccagcggcaucagcagaugcagauuccugaagaucagagagggcagaaucaucaaggagaucuuccccaccggcagaguggagcacaccgaggagugcaccugcggcuucgccagcaacaagaccaucgagugcgccugcagagacaacagcuacaccgccaagagacccuucgugaagcugaacguggagaccgacaccgccgagaucagacugaugugcaccgagaccuaccuggacacccccagacccgacgacggcagcaucaccggccccugcgagagcaacggcgacaagggcaacggcggcaucaagggcggcuucgugcaccagagaauggccagcagaaucggcagaugguacagcagaaccaugagcaagaccaagagaaugggcauggagcuguacgugaaguacgacggcgaccccuggaccgacagcgacgcccuggcccccagcggcgugauggugagcauggaggagcccggcugguacagcuucggcuucgagaucaaggacaagaagugcgacgugcccugcaucggcaucgagauggugcacgacggcggcaagaagaccuggcacagcgccgccaccgccaucuacugccugaugggcagcggccagcugcugugggacaccgugaccggcguggacauggcccuguga

SEQ ID NO: 188654 - RNA, 1401 nt, Artificial Sequence
  derived and/or modified CDS sequence (opt4) from neuraminidase__InfluenzaB__AAN39795
augcugcccagcaccauccagacccugacccuguuccugaccagcggcggcgugcugcugagccuguacgugagcgccagccugagcuaccugcuguacagcgacauccugcugaaguucagccccaccgagaucaccgcccccaccaugccccuggacugcgccaacgccagcaacgugcaggccgugaacagaagcgccaccaagggcgugacccugcugcugcccgagcccgaguggaccuaccccagacugagcugccccggcagcaccuuccagaaggcccugcugaucagcccccacagauucggcgagaccagaggcaacagcgccccccugaucaucagagagcccuucaucgccugcggccccaaggagugcaagcacuucgcccugacccacuacgccgcccagcccggcggcuacuacaacggcaccagagaggacagaaacaagcugagacaccugaucagcgugaagcugggcaagauccccaccguggagaacagcaucuuccacauggccgccuggagcggcagcgccugccacgacggcagagaguggaccuacaucggcguggacggccccgacagcaacgcccugcugaagaucaaguacggcgaggccuacaccgacaccuaccacagcuacgccaacaacauccugagaacccaggagagcgccugcaacugcaucggcggcgacugcuaccugaugaucaccgacggcagcgccagcggcaccagcaagugcagauuccugaagaucagagagggcagaaucaucaaggagaucuuccccaccggcagaguggagcacaccgaggagugcaccugcggcuucgccagcaacaagaccaucgagugcgccugcagagacaacaacuacaccgccaagagacccuucgugaagcugaacguggagaccgacgccgccgagaucagacugaugugcaccgagaccuaccuggacacccccagacccgacgacggcagcaucaccggccccugcgagagcaacggcgacaagggcagaggcggcaucaagggcggcuucgugcaccagagaauggccagcaagaucggcagaugguacagcagaaccaugagcaagaccgagagaaugggcauggagcuguacgugaaguacgacggcgaccccuggaccgacagcgacgcccuggcccugagcggcgugauggugagcauggaggagcccggcugguacagcuucggcuucgagaucaaggacaagaagugcgacgugcccugcaucggcaucgagauggugcacgacggcggcaagaagaccuggcacagcgccgccaccgccaucuacugccugaugggcagcggccagcugcugugggacaccgugaccggcguggacauggcccuguga

SEQ ID NO: 188655 - RNA, 1401 nt, Artificial Sequence; identical to SEQ ID NO: 188639
  derived and/or modified CDS sequence (opt4) from neuraminidase__InfluenzaB__AAN39797

SEQ ID NO: 188656 - RNA, 1401 nt, Artificial Sequence
  derived and/or modified CDS sequence (opt4) from neuraminidase__InfluenzaB__AAN39799
augcugcccagcaccauccagacccugacccuguuccugaccagcggcggcgugcugcugagccuguacgugagcgcccugcugagcuaccugcuguacagcgacgugcugcugaaguucagccccaccaagaucaucgcccccaccaugagccuggacugcgccaacgccagcaacgugcaggccgugaaccacagcgccaccgaggagaugaccuuccugcugcccgagcccgaguggaccuaccccagacugagcugccagggcagcaccuuccagaaggcccugcugaucagcccccacagauucggcgaggccaagggcaacagcgccccccugaucaucagagagcccuucaucgccugcggccccaaggagugcaagcacuucgcccugacccacuacgccgcccagcccggcggcuacuacaacggcaccagagaggacagaaacaagcugagacaccugaucagcgugaaccugggcaagauccccaccguggagaacagcaucuuccacauggccgccuggagcggcagcgccugccacgacggcagagaguggaccuacaucggcguggacggccccgacagcaacgcccugaucaagaucgaguacggcgaggccuacaccgacaccuaccacagcuacgccuacaacauccugagaacccaggagagcgccugcaacugcaucggcggcgacugcuaccugaugaucaccgacggcagcgccagcggcaucagcaagugcagauuccugaagaucagagagggcagaaucaucaaggagaucuuccccaccggcagaguggagcacaccgaggagugcaccugcggcuucgccagcaacaagaccaucgagugcgccugcagagacaacagcuacaccgccaagagacccuucgugaagcugaacguggagaccgacaccgccgagaucagacugaugugcaccgagaccuaccuggacacccccagacccgacgacggcagcaucaccggccccugcgagagcaacggcgacaagggcagcggcggcaucaagggcggcuucgugcaccagagaauggccagcaagaucggcagaugguacagcagaaccaugagcaagaccaagagaaugggcauggagcuguacgugaaguacgacggcgaccccuggaccgacagcgacgcccuggcccccagcggcgugauggugagcauggaggagcccggcugguacagcuucggcuucgagaucaaggacaagaagugcgacgugcccugcaucggcaucgagauggugcacgacggcggcaagaagaccuggcacagcgccgccaccgccaucuacugccugaugggcagcggccagcugcugugggacaccgugaccggcguggacauggcccuguga

SEQ ID NO: 188657 - RNA, 1401 nt, Artificial Sequence
  derived and/or modified CDS sequence (opt4) from neuraminidase__InfluenzaB__AAN39801
augcugcccagcaccauccagacccugacccuguuccugaccagcggcggcgugcugcugagccuguacgugagcgccagccugagcuaccugcuguacagcgacauccugcugaaguucagccccaccgagaucaccgcccccaccaugccccuggacugcgccaacgccagcaacgcccaggccgugaacagaagcgccaccaagggcgugacccugcugcugcccgagcccgaguggaccuaccccagacugagcugccccggcagcaccuuccagaaggcccugcugaucagcccccacagauucggcgagaccaagggcaacagcgccccccugaucaucagagagcccuucaucgccugcggccccaaggagugcaagcacuucgcccugacccacuacgccgcccagcccggcggcuacuacaacggcaccagagaggacagaaacaagcugagacaccugaucagcgugaagcugggcaagauccccaccguggagaacagcaucuuccacauggccgccuggagcggcagcgccugccacgacggcaaggaguggaccuacaucggcguggacggccccgacagcaacgcccugcugaagaucaaguacggcgaggccuacaccgacaccuaccacagcuacgccaacaacauccugagaacccaggagagcgccugcaacugcaucggcggcaacugcuaccugaugaucaccgacggcagcgccagcggcaucagcgagugcagauuccugaagaucagagagggcagaaucaucaaggagaucuuccccaccggcagagugaagcacaccgaggagugcaccugcggcuucgccagcaacaagaccaucgagugcgccugcagagacaacagcuacaccgccaagagacccuucgugaagcugaacguggagaccgacaccgccgagaucagacugaugugcaccgagaccuaccuggacacccccagacccgacgacggcagcaucaccggccccugcgagagcaacggcgacaagggcagcggcggcaucaagggcggcuucgugcaccagagaauggccagcaagaucggcagaugguacagcagaaccaugagcaagaccaagagaaugggcaugggccuguacgugaaguacgacggcgaccccuggaccgacagcgacgcccuggcccugagcggcgugauggugagcauggaggagcccggcugguacagcuucggcuucgagaucaaggacaagaagugcgacgugcccugcaucggcaucgagauggugcacgacggcggcaaggagaccuggcacagcgccgccaccgccaucuacugccugaugggcagcggccagcugcugugggacaccgugaccggcguggacauggcccuguga

SEQ ID NO: 188658 - RNA, 1401 nt, Artificial Sequence
  derived and/or modified CDS sequence (opt4) from neuraminidase__InfluenzaB__AAN39803
augcugcccagcaccauccagacccugacccuguuccugaccagcggcggcgugcugcugagccuguacgugagcgccagccugagcuaccugcuguacagcgacauccugcugaaguucagccccaccgagaucaccgcccccaaggugccccuggacugcgccaacgccagcaacgugcaggccgugaacagaagcgccaccaagggcaugacccugcugcugagcgagcccgaguggaccuaccccagacugagcugccagggcagcaccuuccagaaggcccugcugaucagcccccacagauucggcgagaccagaggcaacagcgccccccugaucaucagagagcccuucaucgccugcggccccaaggagugcaagcacuucgcccugacccacuacgccgcccagcccggcggcuacuacaacggcaccagagaggacagaaacaagcugagacaccugaucagcgugaagcugggcaagauccccaccguggagaacagcaucuuccacauggccgccuggagcggcagcgccugccacgacggcagagaguggaccuacaucggccuggacggccccgacagcaacgcccugaucaagaucaaguacggcgaggccuacaccgacaccuaccacagcuacgccaacaacauccugagaacccaggagagcgccugcaacugcaucggcggcgacugcuaccugaugaucaccgacggcagcgccagcggcaucagcaagugcagauuccugaagaucagagagggcagaaucaucaaggagaucuuccccaccggcagaguggagcacaccgaggagugcaccugcggcuucgccagcaacaagaccaucgagugcgccugcagagacaacagcuacaccgccaagagacccuucgugaagcugaacguggagaccgacaccgccgagaucagacugaugugcaccgagaccuaccuggacacccccagacccgacgacggcagcaucaccggccccugcgagagcaacggcgacaagggcagaggcggcaucaagggcggcuucgugcaccagagaauggccagcaagaucggcagaugguacagcagaaccaugagcaagaccgagagaaugggcauggagcuguacgugaaguacgacggcgaccccuggaccgacagcgacgcccuggcccccagcggcgugauggugagcaugaaggagcccggcugguacagcuucggcuucgagaucaaggacaagaagugcgacgugcccugcaucggcaucgagauggugcacgacggcggcaaggagaccuggcacagcgccgccaccgccaucuacugccugaugggcagcggccagcugcugugggacaccgugaccggcguggacauggcccuguga

SEQ ID NO: 188659 - RNA, 1401 nt, Artificial Sequence
  derived and/or modified CDS sequence (opt4) from neuraminidase__InfluenzaB__ABA02232
augcugcccagcaccauccagacccugacccuguuccugaccagcggcggcgugcugcugagccuguacgugagcgccagccugagcuaccugcuguacagcgacauccugcugaaguucagccccaccgagaucaccgcccccaccaugccccuggacugcgccaacgccagcaacgugcaggccgugaacagaagcgccaccaagggcgugacccugcugcugcccgagcccgaguggaccuaccccagacugagcugccccggcagcaccuuccagaaggcccugcugaucagcccccacagauucggcgagaccaagggcaacagcgccccccugaucaucagagagcccuucaucgccugcggccccaaggagugcaagcacuucgcccugacccacuacgccgcccagcccggcggcuacuacaacggcaccagaggcgacagaaacaagcugagacaccugaucagcgugaagcugggcaagauccccaccguggagaacagcaucuuccacauggccgccuggagcggcagcgccugccacgacggcaaggaguggaccuacaucggcguggacggccccgagaacaacgcccugcugaagaucaaguacggcgaggccuacaccgacaccuaccacagcuacgccaacaacauccugagaacccaggagagcgccugcaacugcaucggcggcaacugcuaccugaugaucaccgacggcagcgccagcggcaucagcgagugcagauuccugaagaucagagagggcagaaucaucaaggagaucuuccccaccggcagagugaagcacaccgaggagugcaccugcggcuucgccagcaacaagaccaucgagugcgccugcagagacaacagcuacaccgccaagagacccuucgugaagcugaacguggagaccgacaccgccgagaucagacugaugugcaccgagaccuaccuggacacccccagacccgacgacggcagcaucaccggccccugcgagagcaacggcgacaagggcagcggcggcaucaagggcggcuucgugcaccagagaauggccagcaagaucggcagaugguacagcagaaccaugagcaagaccaagagaaugggcaugggccuguacgugaaguacgacggcgaccccuggaccgacagcgacgcccuggcccugagcggcgugauggugagcauggaggagcccggcugguacagcuucggcuucgagaucaaggacaagaagugcgacgugcccugcaucggcaucgagauggugcacgacggcggcaaggagaccuggcacagcgccgccaccgccaucuacugccugaugggcagcggccagcugcugugggacaccgugaccggcguggacauggcccuguga

SEQ ID NO: 188660 - RNA, 1401 nt, Artificial Sequence
  derived and/or modified CDS sequence (opt4) from neuraminidase__InfluenzaB__ABI84039
augcugcccagcaccauccagacccugacccuguuccugaccagcggcggcgugcugcugagccuguacgugagcgccagccugagcuaccugcuguacagcgacauccugcugaaguucagccccaccgagaucaccgcccccaccaugccccuggacugcgccaacgccagcaacgugcaggccgugaacagaagcgccaccaagggcgugacccugcugcugcccgagcccgaguggaccuaccccagacugagcugccccggcagcaccuuccagaaggcccugcugaucagcccccacagauucggcgagaccaagggcaacagcgccccccugaucaucagagagcccuucaucgccugcggccccaacgagugcaagcacuucgcccugacccacuacgccgcccagcccggcggcuacuacaacggcaccagaggcgacagaaacaagcugagacaccugaucagcgugaagcugggcaagauccccaccguggagaacagcaucuuccacauggccgccuggagcggcagcgccugccacgacggcaaggaguggaccuacaucggcguggacggccccgacaacaacgcccugcugaagaucaaguacggcgaggccuacaccgacaccuaccacagcuacgccaacaacauccugagaacccaggagagcgccugcaacugcaucggcggcaacugcuaccugaugaucaccgacggcagcgccagcggcgugagcgagugcagauuccugaagaucagagagggcagaaucaucaaggagaucuuccccaccggcagagugaaguacaccgaggagugcaccugcggcuucgccagcaacaagaccaucgagugcgccugcagagacaacagcuacaccgccaagagacccuucgugaagcugaacguggagaccgacaccgccgagaucagacugaugugcaccgacaccuaccuggacacccccagacccgacgacggcagcaucaccggccccugcgagagcaacggcgacaagggcagcggcggcaucaagggcggcuucgugcaccagagaauggccagcaagaucggcagaugguacagcagaaccaugagcaagaccgagagaaugggcaugggccuguacgugaaguacgacggcgaccccugggccgacagcgacgcccuggccuucagcggcgugauggugagcaugaaggagcccggcugguacagcuucggcuucgagaucaaggacaagaagugcgacgugcccugcaucggcaucgagauggugcacgacggcggcaaggagaccuggcacagcgccgccaccgccaucuacugccugaugggcagcggccagcugcugugggacaccgugaccggcguggacauggcccuguga

SEQ ID NO: 188661 - RNA, 1401 nt, Artificial Sequence
  derived and/or modified CDS sequence (opt4) from neuraminidase__InfluenzaB__ABI84051
augcugcccagcaccauccagacccugacccuguuccugaccagcggcggcgugcugcugagccuguacgugagcgccagccugagcuaccugcuguacagcgacauccugcugagauucagccagaccgagaucaccgcccccaucaugccccuggacugcgccaacgccagcaacgugcaggccgugaaccacagcgccaccaagggcgugacccugcugcugcccgagcccgaguggaccuaccccagacugagcugccccggcagcaccuuccagaaggcccugcugaucagcccccacagauucggcgagaccaagggcaacagcgccccccugaucaucagagagcccuucaucgccugcggccccaaggagugcaagcacuucgcccugacccacuacgccgcccagcccggcggcuacuacaacggcaccagagaggacagaaacaagcugagacaccugaucagcgugaagcugggcaagauccccaccguggagaacagcaucuuccacauggccgccuggagcggcagcgccugccacgacggcagagaguggaccuacaucggcguggacggccccgacagcaacgcccugcugaagaucaaguacggcgaggccuacaccgacaccuaccacagcuacgccaagaacauccugagaacccaggagagcgccugcaacugcaucggcggcgacugcuaccugaugaucaccgacggccccgccagcggcaucagcgagugcagauuccugaagaucagagagggcagaaucaucaaggagaucuuccccaccggcagagugaagcacaccgaggagugcaccugcggcuucgccagcaacaagaccaucgagugcgccugcagagacaacagcuacaccgccaagagacccuucgugaagcugaacguggagaccgacaccgccgagaucagacugaugugcaccgagaccuaccuggacacccccagacccaacgacggcagcaucaccggccccugcgagagcaacggcgacaagggcagcggcggcaucaagggcggcuucgugcaccagagaauggccagcaagaucggcagaugguacagcagaaccaugagcaagaccaagagaaugggcaugggccuguacgugaaguacgacggcgaccccuggaccgacagcgaggcccuggcccugagcggcgugauggugagcauggaggagcccggcugguacagcuucggcuucgagaucaaggacaagaagugcgacgugcccugcaucggcaucgagauggugcacgacggcggcaagaccaccuggcacagcgccgccaccgccaucuacugccugaugggcagcggccagcugcugugggacaccgugaccggcguggacauggcccuguga

SEQ ID NO: 188662 - RNA, 1401 nt, Artificial Sequence
  derived and/or modified CDS sequence (opt4) from neuraminidase__InfluenzaB__ABI84062
augcugcccagcaccauccagacccugacccuguuccugaccagcggcggcgugcugcugagccuguacgugagcgccagccugagcuaccugcuguacagcgacauccugcugaaguucagccccaccgagaucaucgcccccaucaugccccuggacugcgccaacgccagcaacgugcaggccgugaacagaagcaccaccaagggcgugacccugcugcugcccgagcccgaguggaccuaccccagacugagcugccccggcagcaccuuccagaaggcccugcugaucagcccccacagauucggcgagaccaagggcaacagcgccccccugaucaucagagagcccuucaucgccugcggccccaaggagugcaagcacuucgcccugacccacuacgccgcccagcccggcggcuacuacaacggcaccagaggcgacagaaacaagcugagacaccugaucagcgugaagcugggcaagauccccaccguggagaacagcaucuuccacauggccgccuggagcggcagcgccugccacgacggcaaggaguggaccuacaucggcguggacggccccgacaacaacgcccugcugaagaucaaguacggcgaggccuacaccgacaccuaccacagcuacgccaacaacauccugagaacccaggagagcgccugcaacugcaucggcggcaacugcuaccugaugaucaccgacggccccgccagcggcaucagcgagugcagauuccugaagaucagagagggcagaaucaucaaggagaucuuccccaccggcagagugaagcacaccgaggagugcaccugcggcuucgccagcaacaagaccaucgagugcgccugcagagacaacagcuacaccgccaagagacccuucgugaagcugaacguggagaccgacaccgccgagaucagacugaugugcaccgagaccuaccuggacacccccagacccgacgacggcagcaucaccggccccugcgagagcaacggcgacaagggcagcggcggcaucaagggcggcuucgugcaccagagaauggccagcaagaucggcagaugguacagcagaaccaugagcaagaccgagagaaugggcaugggccuguacgugaaguacgacggcgaccccugggccgacagcgacgcccuggcccugagcggcgugauggugagcauggaggagcccggcugguacagcuucggcuucgagaucaaggacaagaagugcgacgugcccugcaucggcaucgagauggugcacgacggcggcaaggagaccuggcacagcgccgccaccgccaucuacugccugaugggcagcggccagcugcugugggacaccgugaccggcguggacauggcccuguga

SEQ ID NO: 188663 - RNA, 1401 nt, Artificial Sequence
  derived and/or modified CDS sequence (opt4) from neuraminidase__InfluenzaB__ABL76280
augcugcccagcaccauccagacccugacccuguuccugaccagcggcggcgugcugcugagccuguacgugagcgccagccugagcuaccugcuguacagcgacauccugcugaaguucagccccaccgagaucaccgcccccaccaugccccugaacugcgccaacgccagcaacgugcaggccgugaacagaagcgccaccaagggcgugacccugcugcugcccgagcccgaguggaccuaccccagacugagcugccccggcagcaccuuccagaaggcccugcugaucagcccccacagauucggcgagaccaagggcaacagcgccccccugaucaucagagagcccuucaucgccugcggccccaaggagugcaagcacuucgcccugacccacuacgccgcccagcccggcggcuacuacaacggcaccagagaggacagaaacaagcugagacaccugaucagcgugaagcugggcaagauccccaccguggagaacagcaucuuccacauggccgccuggagcggcagcgccugccacgacggcagagaguggaccuacaucggcguggacggccccgacagcaacgcccugcugaagaucaaguacggcgaggccuacaccgacaccuaccacagcuacgccaacaacauccugagaacccaggagagcgccugcaacugcaucggcggcgacugcuaccugaugaucaccgacggcagcgccagcggcaucagcgagugcagauuccugaagaucagagagggcagaaucaucaaggagaucuuccccaccggcagaguggagcacaccgaggagugcaccugcggcuucgccagcaacaagaccaucgagugcgccugcagagacaacagcuacaccgccaagagacccuucgugaagcugaacguggagaccgacaccgccgagaucagacugaugugcaccgagaccuaccuggacacccccagacccgacgacggcagcaucaccggccccugcgagagcaacggcgacaagggcagcggcggcaucaagggcggcuucgugcaccagagaauggccagcaagaucggcagaugguacagcagaaccaugagcaagaccaagagaaugggcaugggccuguacgugaaguacgacggcgaccccuggaucgacagcgacgcccugacccugagcggcgugauggugagcauggaggagcccggcugguacagcuucggcuucgagaucaaggacaagaagugcgacgugcccugcaucggcaucgagauggugcacgacggcggcaagaagaccuggcacagcgccgccaccgccaucuacugccugaugggcagcggccagcugcugugggacaccgugaccggcguggacauggcccuguga

SEQ ID NO: 188664 - RNA, 1401 nt, Artificial Sequence
  derived and/or modified CDS sequence (opt4) from neuraminidase__InfluenzaB__ABL76302
augcugcccagcaccauccagacccugacccuguuccugaccagcggcggcgugcugcugagccuguacgugagcgccagccugagcuaccugcuguacagcgacauccugcugaaguucccccccaccgagaucaccgcccccaccaugccccuggacugcgccaacgccagcaacgugcaggccgugaacagaagcgccaccaagggcgugacccugcugcugcccgagcccgaguggaccuaccccagacugagcugccccggcagcaccuuccagaaggcccugcugaucagcccccacagauucggcgagaccaagggcaacagcgccccccugaucaucagagagcccuucaucgccugcggccccaaggagugcaagcacuucgcccugacccacuacgccgcccagcccggcggcuacuacaacggcaccagagaggacagaaacaagcugagacaccugaucagcgugaagcugggcaagauccccaccguggagaacagcaucuuccacauggccgccuggagcggcagcgccugccacgacggcagagaguggaccuacaucggcguggacggccccgacagcaacgcccugcugaagaucaaguacggcgaggccuacaccgacaccuaccacagcuacgccaacaacauccugagaacccaggagagcgccugcaacugcaucggcggcaacugcuaccugaugaucaccgacggcagcgccagcggcaucagcgagugcagauuccugaagaucagagagggcagaaucaucaaggagaucuuccccaccggcagagugaagcacaccgaggagugcaccugcggcuucgccagcaacaagaccaucgagugcgccugcagagacaacagcuacaccgccaagagacccuucgugaagcugaacguggagaccgacaccgccgagaucagacugaugugcaccgagaccuaccuggacacccccagacccgacgacggcagcaucaccggccccugcgagagcaacggcgacaagggcagcggcggcaucaagggcggcuucgugcaccagagaauggccagcaagaucggcagaugguacagcagaaccaugagcaagaccaagagaaugggcaugggccuguacgugaaguacgacggcgaccccuggaccgacagcgacccccuggcccugagcggcgugauggugagcauggaggagcccggcugguacagcuucggcuucgagaucaaggacaagaagugcgacgugcccugcaucggcaucgagauggugcacgacggcggcaaggagaccuggcacagcgccgccaccgccaucuacugccugaugggcagcggccagaugcugugggacaccgugaccggcguggacauggcccuguga

SEQ ID NO: 188665 - RNA, 1401 nt, Artificial Sequence
  derived and/or modified CDS sequence (opt4) from neuraminidase__InfluenzaB__ABL76313
augcugcccagcaccauccagacccugacccuguuccugaccagcggcggcgugcugcugagccuguacgugagcgccagccugagcuaccugcuguacagcgacauccugcugaaguucagccccaaggagaucaccgcccccaccaugccccugaacugcgccaacgccagcaacgugcaggccgugaacagaagcgccaccaagggcgugaccuucccccugcccgagcccgaguggaccuaccccagacugagcugccccggcagcaccuuccagaaggcccugcugaucagcccccacagauucggcgagaccaagggcaacagcgccccccugaucaucagagagcccuucaucgccugcggccccaaggagugcaagcacuucgcccugacccacuacgccgcccagcccggcggcuacuacaacggcaccagagaggacagaaacaagcugagacaccugaucagcgugaagcugggcaagauccccaccguggagaacagcaucuuccacauggccgccuggagcggcagcgccugccacgacggcagagaguggaccuacaucggcguggacggccccgacagcaacgcccugcugaagaucaaguacggcgaggccuacaccgacaccuaccacagcuacgccaacaacauccugagaacccaggagagcgccugcaacugcaucggcggcgacugcuaccugaugaucaccgacggcagcgccagcggcaucagcgagugcagauuccugaagaucagagagggcagaaucaucaaggagaucuuccccaccggcagaguggagcacaccgaggagugcaccugcggcuucgccagcaacaagaccaucgagugcgccugcagagacaacagcuacaccgccaagagacccuucgugaagcugaacguggagaccgacaccgccgagaucagacugaugugcaccgagaccuaccuggacacccccagacccgacgacggcagcaucaccggccccugcgagagcaacggcgacaagggcagcggcggcaucaagggcggcuucgugcaccagagaauggccagcaagaucggcagaugguacagcagaaccaugagcaagaccaagagaaugggcaugggccuguacgugaaguacgacggcgaccccuggaucgacagcgacgcccugacccugagcggcgugauggugagcguggaggagcccggcugguacagcuucggcuucgagaucaaggacaagaagugcgacgugcccugcaucggcaucgagauggugcacgacggcggcaagaccaccuggcacagcgccgccaccgccaucuacugccugaugggcagcggccagcugcugugggacaccgugaccggcguggacauggcccuguga

SEQ ID NO: 188666 - RNA, 1401 nt, Artificial Sequence
  derived and/or modified CDS sequence (opt4) from neuraminidase__InfluenzaB__ABL76335
augcugcccagcaccauccagacccugacccuguuccugaccagcggcggcgugcugcugagccuguacgugagcgccagccugagcuaccugcuguacagcgacauccugcugaaguucagccccaccgagaucaccgcccccaccaugccccugaacugcgccaacgccagcaacgugcaggccgugaacagaagcgccaccaagggcgugacccugccccugcccgagcccgaguggaccuaccccagacugagcugccccggcagcaccuuccagaaggcccugcugaucagcccccacagauucggcgagaccaagggcaacagcgccccccugaucaucagagagcccuucaucgccugcggccccaaggagugcaagcacuucgcccugacccacuacgccgcccagcccggcggcuacuacaacggcaccagagaggacagaaacaagcugagacaccugaucagcgugaagcugggcaagauccccaccguggagaacagcaucuuccacauggccgccuggagcggcagcgccugccacgacggcagagaguggaccuacaucggcguggacggccccgacagcaacgcccugcugaagaucaaguacggcgaggccuacaccgacaccuaccacagcuacgccaacaacauccugagaacccaggagagcgccugcaacugcaucggcggcgacugcuaccugaugaucaccgacggcagcgccagcggcaucagcgagugcagauuccugaagaucagagagggcagaaucaucaaggagaucuuccccaccggcagaguggagcacaccgaggagugcaccugcggcuucgccagcaacaagaccaucgagugcgccugcagagacaacagcuacaccgccaagagacccuucgugaagcugaacguggagaccgacaccgccgagaucagacugaugugcaccgagaccuaccuggacacccccagacccgacgacggcagcaucaccggccccugcgagagcaacggcgacaagggcagcggcggcaucaagggcggcuucgugcaccagagaauggccagcaagaucggcagaugguacagcagaaccaugagcaagaccaagagaaugggcaugggccuguacgugaaguacgacggcgaccccuggaucgacagcgacgcccugacccugagcggcgugauggugagcauggaggagcccggcugguacagcuucggcuucgagaucaaggacaagaagugcgacgugcccugcaucggcaucgagauggugcacgacggcggcaagaccaccuggcacagcgccgccaccgccaucuacugccugaugggcagcggccagcugcugugggacaccgugaccggcguggacauggcccuguga

SEQ ID NO: 188667 - RNA, 1401 nt, Artificial Sequence
  derived and/or modified CDS sequence (opt4) from neuraminidase__InfluenzaB__ABL76346
augcugcccagcaccauccagacccugacccuguuccugaccagcggcggcgugcugcugagccuguacgugagcgccagccugagcuaccugcuguacagcgacauccugcugaaguucagccccaaggagaucaccacccccaccaugccccugaacugcgccaacgccagcaacgugcaggccgugaacagaagcgccaccaagggcgugacccugcugcugcccgagcccgaguggaccuaccccagacugagcugccccggcagcaccuuccagaaggcccugcugaucagcccccacagauucggcgagaccaagggcaacagcgccccccugaucaucagagagcccuucaucgccugcggccccaaggagugcaagcacuucgcccugacccacuacgccgcccagcccggcggcuacuacaacggcaccagagaggacagaaacaagcugagacaccugaucagcgugaagcugggcaagauccccaccguggagaacagcaucuuccacauggccgccuggagcggcagcgccugccacgacggcagagaguggaccuacaucggcguggacggccccgacagcaacgcccugcugaagaucaaguacggcgaggccuacaccgacaccuaccacagcuacgccaacaacauccugagaacccaggagagcgccugcaacugcaucggcggcgacugcuaccugaugaucaccgacggcagcgccagcggcaucagcgagugcagauuccugaagaucagagagggcagaaucaucaaggagaucuuccccaccggcagaguggagcacaccgaggagugcaccugcggcuucgccagcaacaagaccaucgagugcgccugcagagacaacagcuacaccgccaagagacccuucgugaagcugaacguggagaccgacaccgccgagaucagacugaugugcaccgagaccuaccuggacacccccagacccgacgacggcagcaucaccggccccugcgagagcaacggcgacaagggcagcggcggcaucaagggcggcuucgugcaccagagaauggccagcaagaucggcagaugguacagcagaaccaugagcaagaccaagagaaugggcaugggccuguacgugaaguacgacggcgaccccuggaucgacagcgacgcccugacccugagcggcgugauggugagcauggaggagcccggcugguacagcuucggcuucgagaucaaggacaagaagugcgacgugcccugcaucggcaucgagauggugcacgacggcggcaagaccaccuggcacagcgccgccaccgccaucuacugccugaugggcagcggccagcugcugugggacaccgugaccggcguggacauggcccuguga

SEQ ID NO: 188668 - RNA, 1401 nt, Artificial Sequence; identical to SEQ ID NO: 188667
  derived and/or modified CDS sequence (opt4) from neuraminidase__InfluenzaB__ABL76357

SEQ ID NO: 188669 - RNA, 1401 nt, Artificial Sequence
  derived and/or modified CDS sequence (opt4) from neuraminidase__InfluenzaB__ABL76368
augcugcccagcaccauccagacccugacccuguuccugaccagcggcggcgugcugcugagccuguacgugagcgccagccugagcuaccugcuguacagcgacauccugcugaaguucagccccaccgagaucaccgcccccaccaugccccuggacugcgccaacgccagcaacgugcaggccgugaacagaagcgccaccaagggcgugacccugcugcugcccgagcccgaguggaccuaccccagacugagcugccccggcagcaccuuccagaaggcccugcugaucagcccccacagauucggcgagaccaagggcaacagcgccccccugaucaucagagagcccuucaucgccugcggccccaaggagugcaagcacuucgcccugacccacuacgccgcccagcccggcggcuacuacaacggcaccagagaggacagaaacaagcugagacaccugaucagcgugaagcugggcaagauccccaccguggagaacagcaucuuccacauggccgccuggagcggcagcgccugccacgacggcaaggaguggaccuacaucggcguggacggccccgacagcaacgcccugcugaagaucaaguacggcgaggccuacaccgacaccuaccacagcuacgccaacaacauccugagaacccaggagagcgccugcaacugcaucggcggcaacugcuaccugaugaucaccgacggcagcgccagcggcaucagcgagugcagauuccugaagaucagagagggcagaaucaucaaggagaucuuccccaccggcagagugaagcacaccgaggagugcaccugcggcuucgccagcaacaagaccaucgagugcgccugcagagacaacagcuacaccgccaagagacccuucgugaagcugaacguggagaccgacaccgccgagaucagacugaugugcaccgagaccuaccuggacacccccagacccgacgacggcagcaucaccggccccugcgagagcaacggcgacaagggcagcggcggcaucaagggcggcuucgugcaccagagaauggccagcaagaucggcagaugguacagcagaaccaugagcaagaccaagagaaugggcaugggccuguacgugaaguacgacggcgaccccuggaccgacagcggcgcccuggcccugagcggcgugauggugagcauggaggagcccggcugguacagcuucggcuucgagaucaaggacaagaagugcgacgugcccugcaucggcaucgagauggugcacgacggcggcaaggagaccuggcacagcgccgccaccgccaucuacugccugaugggcagcggccagcugcugugggacaccgugaccggcguggacauggcccuguga

SEQ ID NO: 188670 - RNA, 1404 nt, Artificial Sequence
  derived and/or modified CDS sequence (opt4) from neuraminidase__InfluenzaB__ABL76379
augcugcccagcaccauccagacccugacccuguuccugaccagcggcggcgugcugcugagccuguacgugagcgccagccugagcuaccugcuguacagcgacauccugcugaaguucagccccaccgagaucaccgcccccaccaugccccuggacugcgccaacgccagcaacgugcaggccgugaacagaagcgccaccaagggcgugaccuuccugcugcugcccgagcccgaguggaccuaccccagacugagcugccccggcagcaccuuccagaaggcccugcugaucagcccccacagauucggcgagaccaagggcaacagcgccccccugaucaucagagagcccuucaucgccugcggccccaaggagugcaagcacuucgcccugacccacuacgccgcccagcccggcggcuacuacaacggcaccagaggcgacagaaacaagcugagacaccugaucagcgugaagcugggcaagauccccaccguggagaacagcaucuuccacauggccgccuggagcggcagcgccugccacgacggcaaggaguggaccuacaucggcguggacggccccgacagcaacgcccugcugaagaucaaguacggcgaggccuacaccgacaccuaccacagcuacgccaacaacauccugagaacccaggagagcgccugcaacugcaucggcggcaacugcuaccugaugaucaccgacggcagcgccagcggcaucagcgagugcagauuccugaagaucagagagggcagaaucaucaaggagaucuuccccaccggcagagugaagcacaccgaggagugcaccugcggcuucgccagcaacaagaccaucgagugcgccugcagagacaacagcuacaccgccaagagacccuucgugaagcugaacguggagaccgacaccgccgagaucagacugaugugcaccgagaccuaccuggacacccccagacccgacgacggcagcaucaccggccccugcgagagcaacggcgacaagggcagcggcggcaucaagggcggcuucgugcaccagagaauggccagcaagaucggcagaugguacagcagaaccaugagcaagaccaagagaaugggcaugggccuguacgugaaguacgacggcgaccccuggaccgacagcgacgcccuggcccugagcggcgugauggugagcauggaggagcccggcugguacagcuucggcuucgagaucaaggacaagaagugcgacgugcccugcaucggcaucgagauggugcacgacggcggcaaggagaccuggcacagcgccgccaccgccaucuacugccugaugggcagcggccagcugcugugggacaccgugaccggcguggacauggcccuguga

SEQ ID NO: 188671 - RNA, 1401 nt, Artificial Sequence
  derived and/or modified CDS sequence (opt4) from neuraminidase__InfluenzaB__ABL76390
augcugcccagcaccauccagacccugacccuguuccugaccagcggcggcgugcugcugagccuguacgugagcgccagccugagcuaccugcuguacagcgacauccugcugaaguucagccccaccgagaucaccgcccccaccaugccccuggacugcgccaacgccagcaacgugcaggccgugaacagaagcagcaccaagggcgugaccuuccugcugcccgagcccgaguggaccuaccccagacugagcugccccggcagcaccuuccagaaggcccugcugaucagcccccacagauucggcgagaccaagggcaacagcgccccccugaucaucagagagcccuucaucgccugcggccccaaggagugcaagcacuucgcccugacccacuacgccgcccagcccggcggcuacuacaacggcaccagagaggacagaaacaagcugagacaccugaucagcgugaagcugggcaagauccccaccguggagaacagcaucuuccacauggccgccuggagcggcagcgccugccacgacggcaaggaguggaccuacaucggcguggacggccccgacagcaacgcccugcugaagaucaaguacggcgaggccuacaccgacaccuaccacagcuacgccaacaacauccugagaacccaggagagcgccugcaacugcaucggcggcaacugcuaccugaugaucaccgacggcagcgccagcggcaucagcgagugcagauuccugaagaucagagagggcagaaucaucaaggagaucuuccccaccggcagagugaagcacaccgaggagugcaccugcggcuucgccagcaacaagaccaucgagugcgccugcagagacaacagcuacaccgccaagagacccuucgugaagcugaacguggagaccgacaccgccgagaucagacugaugugcaccgagaccuaccuggacacccccagacccgacgacggcagcaucaccggcagcugcgagagcgacggcgacaagggcagcggcggcaucaagggcggcuucgugcaccagagaauggccagcaagaucggcagaugguacagcagaaccaugagcaagaccaagagaaugggcaugggccuguacgugagauacgacggcgaccccuggaccgacagcagcgcccuggcccugagcggcgugauggugagcauggaggagcccggcugguacagcuucggcuucgagaucaaggacaagaagugcgacgugcccugcaucggcaucgagauggugcacgacggcggcaaggagaccuggcacagcgccgccaccgccaucuacugccugaugggcagcggccagcugcugugggacaccgugaccggcguggacauggcccuguga

SEQ ID NO: 188672 - RNA, 1401 nt, Artificial Sequence
  derived and/or modified CDS sequence (opt4) from neuraminidase__InfluenzaB__ABL76412
augcugcccagcaccauccagacccugacccuguuccugaccagcggcggcgugcugcugagccuguacgugagcgccagccugagcuaccugcuguacagcgacauccugcugaaguucagccccaccgagaucaccgcccccaccaugccccuggacugcgccaacgccagcaacgugcaggccgugaacagaagcgccaccaagggcgugacccugcugauccccgagcccgaguggaccuaccccagacugagcugccccggcagcaccuuccagaaggcccugcugaucagcccccacagauucggcgagaccaagggcaacagcgccccccugaucaucagagagcccuucaucgccugcggccccaaggagugcaagcacuucgcccugacccacuacaccgcccagcccggcggcuacuacaacggcaccagaggcgacagaaacaagcugagacaccugaucagcgugaagcugggcaagauccccaccguggagaacagcaucuuccacauggccgccuggagcggcagcgccugccacgacggcaaggaguggaccuacaucggcguggacggccccgacagcaacgcccugcugaagaucaaguacggcgaggccuacaccgacaccuaccacagcuacgccaacaacauccugagaacccaggagagcgccugcaacugcaucggcggcaacugcuaccugaugaucaccgacggcagcgccagcggcaucagcgagugcagauuccugaagaucagagagggcagaaucaucaaggagaucuuccccaccggcagagugaagcacaccgaggagugcaccugcggcuucgccagcaacaagaccaucgagugcgccugcagagacaacagcuacaccgccaagagacccuucgugaagcugaacguggagaccgacaccgccgagaucagacugaugugcaccgagaccuaccuggacacccccagacccgacgacggcagcaucaccggccccugcgagagcaacggcgacaagggcagcggcggcaucaagggcggcuucgugcaccagagaauggccagcaagaucggcagaugguacagcagaaccaugagcaagaccaagagaaugggcaugggccuguacgugaaguacgacggcgaccccuggaccgacagcgacgcccuggcccugagcggcgugauggugagcauggaggagcccggcugguacagcuucggcuucgagaucaaggacaagaagugcgacgugcccugcaucggcaucgagauggugcacgacggcggcaaggagaccuggcacagcgccgccaccgccaucuacugccugaugggcagcggccagcugcugugggacaccgugaccggcguggacauggcccuguga

SEQ ID NO: 188673 - RNA, 1401 nt, Artificial Sequence
  derived and/or modified CDS sequence (opt4) from neuraminidase__InfluenzaB__ABL76423
augcugcccagcaccauccagacccugacccuguuccugaccagcggcggcgugcugcugagccuguacgugagcgccagccugagcuaccugcuguacagcgacauccugcugaaguucagccccaccgagaucaccgcccccaccaugccccuggacugcgccaacgccagcaacgugcaggccgugaaccacagcgccaccaagggcgugacccugcugcugcccgagcccgaguggaccuaccccagacugagcugccccggcagcaccuuccagaaggcccugcugaucagcccccacagauucggcgagaccaagggcaacagcgccccccugaucaucagagagcccuucaucgccugcggccccaaggagugcaagcacuucgcccugacccacuacgccgcccagcccggcggcuacuacaacggcaccagaggcgacagaaacaagcugagacaccugaucagcgugaagcugggcaagauccccaccguggagaacagcaucuuccacauggccgccuggagcggcagcgccugccacgacggcaaggaguggaccuacaucggcguggacggccccgacagcaacgcccugcugaagaucaaguacggcgaggccuacaccgacaccuaccacagcuacgccaacaacauccugagaacccaggagagcgccugcaacugcaucggcggcaacugcuaccugaugaucaccgacggcagcgccagcggcaucagcgagugcagauuccugaagaucagagagggcagaaucaucaaggagaucuuccccaccggcagagugaagcacaccgaggagugcaccugcggcuucgccagcaacaagaccaucgagugcgccugcagagacaacagcuacaccgccaagagacccuucgugaagcugaacguggagaccgacaccgccgagaucagacugaugugcaccgagaccuaccuggacacccccagacccgacgacggcagcaucaccggccccugcgagagcaacggcgacaagggcagcggcggcaucaagggcggcuucgugcaccagagaauggccagcaagaucggcagaugguacagcagaaccaugagcaagaccaagagaaugggcaugggccuguacgugaaguacgacggcgaccccuggaccgacagcgacgcccuggccuucagcggcgugauggugagcauggaggagcccggcugguacagcuucggcuucgagaucaaggacaagaagugcgacgugcccugcaucggcaucgagauggugcacgacggcggcaaggagaccuggcacagcgccgccaccgccaucuacugccugaugggcagcggccagcugcugugggacaccgugaccggcguggacauggcccuguga

SEQ ID NO: 188674 - RNA, 1401 nt, Artificial Sequence
  derived and/or modified CDS sequence (opt4) from neuraminidase__InfluenzaB__ABL76434
augcugcccagcaccauccagacccugacccuguuccugaccagcggcggcgugcugcugagccuguacgugagcgccagccugagcuaccugcuguacagcgacauccugcugaaguucagccccaccgagaucaccgcccccaccaugccccuggacugcgccaacgccagcaacgugcaggccgugaacagaagcgccaccaagggcgugacccugcugcugcccgagcccgaguggaccuaccccagacugagcugccccggcagcaccuuccagaaggcccugcugaucagcccccacagauucggcgagaccaagggcaacagcgccccccugaucaucagagagcccuucaucgccugcggccccaaggagugcaagcacuucgcccugacccacuacgccgcccagcccggcggcuacuacaacggcaccagaggcgacagaaacaagcugagacaccugaucagcgugaagcugggcaagauccccaccguggagaacagcaucuuccacauggccgccuggagcggcagcgccugccacgacggcaaggaguggaccuacaucggcguggacggccccgacaacaacgcccugcugaagaucaaguacggcgaggccuacaccgacaccuaccacagcuacgccaacaacauccugagaacccaggagagcgccugcaacugcaucggcggcaacugcuaccugaugaucaccgacggcagcgccagcggcaucagcgagugcagauuccugaagaucagagagggcagaaucaucaaggagaucuuccccaccggcagagugaagcacaccgaggagugcaccugcggcuucgccagcaacaagaccaucgagugcgccugcagagacaacagcuacaccgccaagagacccuucgugaagcugaacguggagaccgacaccgccgagaucagacugaugugcaccgagaccuaccuggacacccccagacccgacgacggcagcaucaccggccccugcgagagcaacggcgacaagggcagcggcggcaucaagggcggcuucgugcaccagagaauggccagcaagaucggcagaugguacagcagaaccaugagcaagaccaagagaaugggcaugggccuguacgugaaguacgacggcgaccccugggccgacagcgacgcccuggcccugagcggcgugauggugagcauggaggagcccggcugguacagcuucggcuucgagaucagagacaagaagugcgacgugcccugcaucggcaucgagauggugcacgacggcggcaaggagaccuggcacagcgccgccaccgccaucuacugccugaugggcagcggccagcugcugugggacaccgugaccggcguggacauggcccuguga

SEQ ID NO: 188675 - RNA, 1401 nt, Artificial Sequence
  derived and/or modified CDS sequence (opt4) from neuraminidase__InfluenzaB__ABL76456
augcugcccagcaccauccagacccugacccuguuccugaccagcggcggcgugcugcugagccuguacgugagcgccagccugagcuaccugcuguacagcgacauccugcugaaguucagccccaccgagaucaccgcccccaccaugccccuggacugcgccaacgccagcaacgugcaggccgugaacagaagcgccaccaagggcgugaagcugcugcugcccgagcccgaguggaccuaccccagacugagcugccccggcagcaccuuccagaaggcccugcugaucagcccccacagauucggcgagaccaagggcaacagcgccccccugaucaucagagagcccuucaucgccugcggccccaaggagugcaagcacuucgcccugacccacuacgccgcccagcccggcggcuacuacaacggcaccagaggcgacagaaacaagcugagacaccugaucagcgugaagcugggcaagauccccaccguggagaacagcaucuuccacauggccgccuggagcggcagcgccugccacgacggcaaggaguggaccuacaucggcguggacggccccgacaacaacgcccugcugaagaucaaguacggcgaggccuacaccgacaccuaccacagcuacgccaacaacauccugagaacccaggagagcgccugcaacugcaucggcggcaacugcuaccugaugaucaccgacggcagcgccagcggcgugagcgagugcagauuccugaagaucagagagggcagaaucaucaaggagaucuuccccaccggcagagugaagcacaccgaggagugcaccugcggcuucgccagcaacaagaccaucgagugcgccugcagagacaacagcuacaccgccaagagacccuucgugaagcugaacguggagaccgacaccgccgagaucagacugaugugcaccgagaccuaccuggacacccccagacccgacgacggcagcaucaccggccccugcgagagcaacggcgacaagggcagcggcggcaucaagggcggcuucgugcaccagagaauggccagcaagaucggcagaugguacagcagaaccaugagcaagaccaagagaaugggcaugggccuguacgugaaguacgacggcgaccccugggccgacagcgacgcccuggcccugagcggcgugauggugagcauggaggagcccggcugguacagcuucggcuucgagaucaaggacaagaagugcgacgugcccugcaucggcaucgagauggugcacgacggcggcaaggagaccuggcacagcgccgccaccgccaucuacugccugaugggcagcggccagcugcugugggacaccgugaccggcguggacauggcccuguga

SEQ ID NO: 188676 - RNA, 1401 nt, Artificial Sequence
  derived and/or modified CDS sequence (opt4) from neuraminidase__InfluenzaB__ABL76467
augcugcccagcaccauccagacccugacccuguuccugaccagcggcggcgugcugcugagccuguacgugagcgccagccugagcuaccugcuguacagcgacauccugcugaaguucagccccaccgagaucaccgcccccaccaugccccuggacugcgccaacgccagcaacgugcaggccgugaacagaagcgccaccaagggcgugacccugcugcugcccgagcccgaguggaccuaccccagacugagcugccccggcagcaccuuccagaaggcccugcugaucagcccccacagauucggcgagaccaagggcaacagcgccccccugaucaucagagagcccuucaucgccugcggccccaaggagugcaagcacuucgcccugacccacuacgccgcccagcccggcggcuacuacaacggcaccagaggcgacagaaacaagcugagacaccugaucagcgugaagcugggcaagauccccaccguggagaacagcaucuuccacauggccgccuggagcggcagcgccugccacgacggcaaggaguggaccuacaucggcguggacggccccgacaacaacgcccugcugaagaucaaguacggcgaggccuacaccgacaccuaccacagcuacgccaacaacauccugagaacccaggagagcgccugcaacugcaucggcggcaacugcuaccugaugaucaccgacggcagcgccagcggcaucagcgagugcagauuccugaagaucagagagggcagaaucaucaaggagaucuuccccaccggcagagugaagcacaccgaggagugcaccugcggcuucgccagcaacaagaccaucgagugcgccugcagagacaacagcuacaccgccaagagacccuucgugaagcugaacguggagaccgacaccgccgagaucagacugaugugcaccgagaccuaccuggacacccccagacccgacgacggcagcaucaccggccccugcgagagcaacggcgacaagggcagcggcggcaucaagggcggcuucgugcaccagagaauggccagcaagaucggcagaugguacagcagaaccaugagcaagaccaagagaaugggcaugggccuguacgugaaguacgacggcgaccccugggccgacagcgacgcccuggcccugagcggcgugauggugagcauggaggagcccggcugguacagcuucggcuucgagaucaaggacaagaagugcgacgugcccugcaucggcaucgagauggugcacgacggcggcaaggagaccuggcacagcgccgccaccgccaucuacugccugaugggcagcggccagcugcugugggacaccgugaccggcguggacauggcccuguga

SEQ ID NO: 188677 - RNA, 1401 nt, Artificial Sequence
  derived and/or modified CDS sequence (opt4) from neuraminidase__InfluenzaB__ABL76478
augcugcccagcaccauccagacccugacccuguuccugaccagcggcggcgugcugcugagccuguacgugagcgccagccugagcuaccugcuguacagcgacauccugcugaaguucagccccaccgagaucaccgcccccaccaugccccuggacugcgccaacgccagcaacgugcaggccgugaacagaagcgccaccaagggcgugaagcugcugcugcccgagcccgaguggaccuaccccagacugagcugccccggcagcaccuuccagaaggcccugcugaucagcccccacagauucggcgagaccaagggcaacagcgccccccugaucaucagagagcccuucaucgccugcggccccaaggagugcaagcacuucgcccugacccacuacgccgcccagcccggcggcuacuacaacggcaccagaggcgacagaaacaagcugagacaccugaucagcgugaagcugggcaagauccccaccguggagaacagcaucuuccacauggccgccuggagcggcagcgccugccacgacggcaaggaguggaccuacaucggcguggacggccccgacaacaacgcccugcugaagaucaaguacggcgaggccuacaccgacaccuaccacagcuacgccaacaacauccugagaacccaggagagcgccugcaacugcaucggcggcaacugcuaccugaugaucaccgacggcagcgccagcggcgugagcgagugcagauuccugaagaucagagagggcagaaucaucaaggagaucuuccccaccggcagagugaagcacaccgaggagugcaccugcggcuucgccagcaacaagaccaucgagugcgccugcagagacaacagcuacaccgccaagagacccuucgugaagcugaacguggagaccgacaccgccgagaucagacugaugugcaccaagaccuaccuggacacccccagacccgacgacggcagcaucaccggccccugcgagagcaacggcgacaagggcagcggcggcaucaagggcggcuucgugcaccagagaauggccagcaagaucggcagaugguacagcagaaccaugagcaagaccaagagaaugggcaugggccuguacgugaaguacgacggcgaccccugggccgacagcgacgcccuggcccugagcggcgugauggugagcauggaggagcccggcugguacagcuucggcuucgagaucaaggacaagaagugcgacgugcccugcaucggcaucgagauggugcacgacggcggcaaggagaccuggcacagcgccgccaccgccaucuacugccugaugggcagcggccagcugcugugggacaccgugaccggcguggacauggcccuguga

SEQ ID NO: 188678 - RNA, 1401 nt, Artificial Sequence
  derived and/or modified CDS sequence (opt4) from neuraminidase__InfluenzaB__ABL76522
augcugcccagcaccauccagacccugacccuguuccugaccagcggcggcgugcugcugagccuguacgugagcgccagccugagcuaccugcuguacagcgacauccugcugaaguucagccccaccgagaucaccgcccccaccaugccccuggacugcgccaacgccagcaacgugcaggccgugaacagaagcgccaccaagggcgugacccugcugcugcccgagcccgaguggaccuaccccagacugagcugccccggcagcaccuuccagaaggcccugcugaucagcccccacagauucggcgagaccaagggcaacagcgccccccugaucaucagagagcccuucaucgccugcggccccaacgagugcaagcacuucgcccugacccacuacgccgcccagcccggcggcuacuacaacggcaccagaggcgacagaaacaagcugagacaccugaucagcgugaagcugggcaagauccccaccguggagaacagcaucuuccacauggccgccuggagcggcagcgccugccacgacggcaaggaguggaccuacaucggcguggacggccccgacaacaacgcccugcugaagaucaaguacggcgaggccuacaccgacaccuaccacagcuacgccaacaacauccugagaacccaggagagcgccugcaacugcaucggcggcaacugcuaccugaugaucaccgacggcagcgccagcggcgugagcgagugcagauuccugaagaucagagagggcagaaucaucaaggagaucuuccccaccggcagagugaagcacaccgaggagugcaccugcggcuucgccagcaacaagaccaucgagugcgccugcagagacaacagcuacaccgccaagagacccuucgugaagcugaacguggagaccgacaccgccgagaucagacugaugugcaccgagaccuaccuggacacccccagacccgacgacggcagcaucaccggccccugcgagagcaacggcgacaagggcagcggcggcaucaagggcggcuucgugcaccagagaauggccagcaagaucggcagaugguacagcagaaccaugagcaagaccgagagaaugggcaugggccuguacgugaaguacgacggcgaccccugggccgacagcgacgcccuggcccugagcggcgugauggugagcauggaggagcccggcugguacagcuucggcuucgagaucaaggacaagaagugcgacgugcccugcaucggcaucgagauggugcacgacggcggcaaggagaccuggcacagcgccgccaccgccaucuacugccugaugggcagcggccagcugcugugggacaccgugaccggcguggacauggcccuguga

SEQ ID NO: 188679 - RNA, 1401 nt, Artificial Sequence
  derived and/or modified CDS sequence (opt4) from neuraminidase__InfluenzaB__ABL76533
augcugcccagcaccauccagacccugacccuguuccugaccagcggcggcgugcugcugagccuguacgugagcgccagccugagcuaccugcuguacagcgacauccugcugaaguucagccccaccgagaucaccgcccccaccaugccccuggacugcgccaacgccagcaacgugcaggccgugaacagaagcgccaccaagggcgugacccugcugcugcccgagcccgaguggaccuaccccagacugagcugccccggcagcaccuuccagaaggcccugcugaucagcccccacagauucggcgagaccaagggcaacagcgccccccugaucaucagagagcccuucaucgccugcggccccaacgagugcaagcacuucgcccugacccacuacgccgcccagcccggcggcuacuacaacggcaagagaggcgacagaaacaagcugagacaccugaucagcgugaagcugggcaagauccccaccguggagaacagcaucuuccacauggccgccuggagcggcagcgccugccacgacggcaaggaguggaccuacaucggcguggacggccccgacaacaacgcccugcugaagaucaaguacggcgaggccuacaccgacaccuaccacagcuacgccaacaacauccugagaacccaggagagcgccugcaacugcaucggcggcaacugcuaccugaugaucaccgacggcagcgccagcggcgugagcgagugcagauuccugaagaucagagagggcagaaucaucaaggagaucuuccccaccggcagagugaagcacaccgaggagugcaccugcggcuucgccagcaacaagaccaucgagugcgccugcagagacaacagcuacaccgccaagagacccuucgugaagcugaacguggagaccgacaccgccgagaucagacugaugugcaccgagaccuaccuggacacccccagacccgacgacggcagcaucaccggccccugcgagagcaacggcgacaagggcagcggcggcaucaagggcggcuucgugcaccagagaauggccagcaagaucggcagaugguacagcagaaccaugagcaagaccgagagaaugggcaugggccuguacgugaaguacgacggcgaccccugggccgacagcgacgcccuggcccugagcggcgugauggugagcauggaggagcccggcugguacagcuucggcuucgagaucaaggacaagaagugcgacgugcccugcaucggcaucgagauggugcacgacggcggcaaggagaccuggcacagcgccgccaccgccaucuacugccugaugggcagcggccagcugcugugggacaccgugaccggcguggacauggcccuguga

SEQ ID NO: 188680 - RNA, 1401 nt, Artificial Sequence
  derived and/or modified CDS sequence (opt4) from neuraminidase__InfluenzaB__ABL76544
augcugcccagcaccauccagacccugacccuguuccugaccagcggcggcgugcugcugagccuguacgugagcgccagccugagcuaccugcuguacagcgacauccugcugaaguucagccccaccgagaucaccgcccccaccaugccccuggacugcgccaacgccagcaacgugcaggccgugaacagaagcgccaccaagggcgugacccugcugcugcccgagcccgaguggaccuaccccagacugagcugccccggcagcaccuuccagaaggcccugcugaucagcccccacagauucggcgagaccaagggcaacagcgccccccugaucaucagagagcccuucaucgccugcggccccaacgagugcaagcacuucgcccugacccacuacgccgcccagcccggcggcuacuacaacggcaccagaggcgagagaaacaagcugagacaccugaucagcgugaagcugggcaagauccccaccguggagaacagcaucuuccacauggccgccuggagcggcagcgccugccacgacggcaaggaguggaccuacaucggcguggacggccccgacaacaacgcccugcugaagaucaaguacggcgaggccuacaccgacaccuaccacagcuacgccaacaacauccugagaacccaggagagcgccugcaacugcaucggcggcaacugcuaccugaugaucaccgacggcagcgccagcggcgugagcgagugcagauuccugaagaucagagagggcagaaucaucaaggagaucuuccccaccggcagagugaagcacaccgaggagugcaccugcggcuucgccagcaacaagaccaucgagugcgccugcagagacaacagcuacaccgccaagagacccuucgugaagcugaacguggagaccgacaccgccgagaucagacugaugugcaccgagaccuaccuggacacccccagacccgacgacggcagcaucaccggccccugcgagagcaacggcgacaagggcagcggcggcaucaagggcggcuucgugcaccagagaauggccagcaagaucggcagaugguacagcagaaccaugagcaagaccgagagaaugggcaugggccuguacgugaaguacgacggcgaccccugggccgacagcgacgcccuggcccugagcggcgugauggugagcauggaggagcccggcugguacagcuucggcuucgagaucaaggacaagaagugcgacgugcccugcaucggcaucgagauggugcacgacggcggcaaggagaccuggcacagcgccgccaccgccaucuacugccugaugggcagcggccagcugcugugggacaccgugaccggcguggacauggcccuguga

SEQ ID NO: 188681 - RNA, 1401 nt, Artificial Sequence; identical to SEQ ID NO: 188679
  derived and/or modified CDS sequence (opt4) from neuraminidase__InfluenzaB__ABL76566

SEQ ID NO: 188682 - RNA, 1401 nt, Artificial Sequence
  derived and/or modified CDS sequence (opt4) from neuraminidase__InfluenzaB__ABL76588
augcugcccagcaccauccagacccugacccuguuccugaccagcggcggcgugcugcugagccuguacgugagcgccagccugagcuaccugcuguacagcgacauccugcugaaguucagccccaccgagaucaccgcccccaccaugccccuggacuacgccaacgccagcaacgugcaggccgugaacagaagcgccaccaagggcgugacccugcugcugcccgagcccgaguggaccuaccccagacugagcugccccggcagcaccuuccagaaggcccugcugaucagcccccacagauucggcgagaccaagggcaacagcgccccccugaucaucagagagcccuucaucgccugcggccccaacgagugcaagcacuucgcccugacccacuacgccgcccagcccggcggcuacuacaacggcaccagaggcgacagaaacaagcugagacaccugaucagcgugaagcugggcaagauccccaccguggagaacagcaucuuccacauggccgccuggagcggcagcgccugccacgacggcaaggaguggaccuacaucggcguggacggccccgacaacaacgcccugcugaagaucaaguacggcgaggccuacaccgacaccuaccacagcuacgccaacaacauccugagaacccaggagagcgccugcaacugcaucggcggcaacugcuaccugaugaucaccgacggcagcgccagcggcgugagcgagugcagauuccugaagaucagagagggcagaaucaucaaggagaucuuccccaccggcagagugaagcacaccgaggagugcaccugcggcuucgccagcaacaagaccaucgagugcgccugcagagacaacagcuacaccgccaagagacccuucgugaagcugaacguggagaccgacaccgccgagaucagacugaugugcaccgagaccuaccuggacacccccagacccgacgacggcagcaucaccggccccugcgagagcaacggcgacaagggcagcggcggcaucaagggcggcuucgugcaccagagaauggccagcaagaucggcagaugguacagcagaaccaugagcaagaccgagagaaugggcaugggccuguacgugaaguacgacggcgaccccugggccgacagcgacgcccuggcccugagcggcgugauggugagcauggaggagcccggcugguacagcuucggcuucgagaucaaggacaagaagugcgacgugcccugcaucggcaucgagauggugcacgacggcggcaaggagaccuggcacagcgccgccaccgccaucuacugccugaugggcagcggccagcugcugugggacaccgugaccggcguggacauggcccuguga

SEQ ID NO: 188683 - RNA, 1401 nt, Artificial Sequence; identical to SEQ ID NO: 188678
  derived and/or modified CDS sequence (opt4) from neuraminidase__InfluenzaB__ABL76599

SEQ ID NO: 188684 - RNA, 1401 nt, Artificial Sequence; identical to SEQ ID NO: 188678
  derived and/or modified CDS sequence (opt4) from neuraminidase__InfluenzaB__ABL76610

SEQ ID NO: 188685 - RNA, 1401 nt, Artificial Sequence
  derived and/or modified CDS sequence (opt4) from neuraminidase__InfluenzaB__ABL76621
augcugcccagcaccauccagacccugacccuguuccugaccagcggcggcgugcugcugagccuguacgugagcgccagccugagcuaccugcuguacagcgacauccugcugaaguucagccccaccgagaucaccgcccccaccaugccccuggacugcgccaacgccagcaacgugcaggccgugaacagaagcgccaccaagggcgugacccugcugcugcccgagcccgaguggaccuaccccagacugagcugccccggcagcaccuuccagaaggcccugcugaucagcccccacagauucggcgagaccaagggcaacagcgccccccugaucaucagagagcccuucaucgccugcggccccaaggagugcaagcacuucgcccugacccacuacgccgcccagcccggcggcuacuacaacggcaccagaggcgacagaaacaagcugagacaccugaucagcgugaagcugggcaagauccccaccguggagaacagcaucuuccacauggccgccuggagcggcagcgccugccacgacggcaaggaguggaccuacaucggcguggacggccccgacaacaacgcccugcugaagaucaaguacggcgaggccuacaccgacaccuaccacagcuacgccaacaacauccugagaacccaggagagcgccugcaacugcaucggcggcaacugcuaccugaugaucaccgacggcagcgccagcggcgugagcgagugcagauuccugaagaucagagagggcagaaucaucaaggagaucuuccccaccggcagagugaagcacaccgaggagugcaccugcggcuucgccagcaacaagaccaucgagugcgccugcagagacaacagcuacaccgccaagagacccuucgugaagcugaacguggagaccgacaccgccgagaucagacugaugugcaccgagaccuaccuggacacccccagacccgacgacggcagcaucaccggccccugcgagagcaacggcgagaagggcagcggcggcaucaagggcggcuucgugcaccagagaauggccagcaagaucggcagaugguacagcagaaccaugagcaagaccaagagaaugggcaugggccuguacgugaaguacgacggcgaccccugggccgacagcgacgcccuggcccugagcggcgugauggugagcauggaggagcccggcugguacagcuucggcuucgagaucaaggacaagaagugcgacauccccugcaucggcaucgagauggugcacgacggcggcaaggagaccuggcacagcgccgccaccgccaucuacugccugaugggcagcggccagcugcugugggacaccgugaccggcguggacauggcccuguga

SEQ ID NO: 188686 - RNA, 1401 nt, Artificial Sequence
  derived and/or modified CDS sequence (opt4) from neuraminidase__InfluenzaB__ABL76632
augcugcccagcaccauccagacccugacccuguuccugaccagcggcggcgugcugcugagccuguacgugagcgccagccugagcuaccugcuguacagcgacauccugcugaaguucagccagaccgagaucaccgcccccaucaugccccuggacugcgccaacgccagcaacgugcaggccgugaacagaagcgccaccaagggcgugacccugcugcugcccgagcccgaguggaccuaccccagacugagcugccccggcagcaccuuccagaaggcccugcugaucagcccccacagauucggcgagaccaagggcaacagcgccccccugaucaucagagagcccuucaucgccugcggccccaccgagugcaagcacuucgcccugacccacuacgccgcccagcccggcggcuacuacaacggcaccagagaggacagaaacaagaugagacaccugaucagcgugaagcugggcaagauccccaccguggagaacagcaucuuccacauggccgccuggagcggcagcgccugccacgacggcaaggaguggaccuacaucggcguggacggccccgacagcaacgcccugcugaagaucaaguacggcgaggccuacaccgacaccuaccacagcuacgccaagaacauccugagaacccaggagagcgccugcaacugcaucggcggcgacugcuaccugaugaucaccgacggccccgccagcggcaucagcgagugcagauuccugaagaucagagagggcagaaucaucaaggagaucuuccccaccggcagagugaagcacaccgaggagugcaccugcggcuucgccagcaacaagaccaucgagugcgccugcagagacaacagcuacaccgccaagagacccuucgugaagcugaacguggagaccgacaccgccgagaucagacugaugugcaccgagaccuaccuggacacccccagacccaacgacggcagcaucaccggccccugcgagagcgacggcgacaagggcagcggcggcaucaagggcggcuucgugcaccagagaauggccagcaagaucggcagaugguacagcagaaccaugagcaagaccaagagaaugggcaugggccuguacgugaaguacgacggcgaccccuggaccgacagcgaggcccuggcccugagcggcgugauggugagcauggaggagcccggcugguacagcuucggcuucgagaucaaggacaagaagugcgacgugcccugcaucggcaucgagauggugcacgacggcggcaagaccaccuggcacagcgccgccaccgccguguacugccugaugggcagcggccagcugcugugggacaccgugaccggcguggacauggcccuguga

SEQ ID NO: 188687 - RNA, 1401 nt, Artificial Sequence
  derived and/or modified CDS sequence (opt4) from neuraminidase__InfluenzaB__ABL76643
augcugcccagcaccauccagacccugacccuguuccugaccagcggcggcgugcugcugagccuguacgugagcgccagccugagcuaccugcuguacagcgacauccugcugaaguucagccagaccgagaucaccgcccccaucaugccccuggacugcgccaacgccagcaacgugcaggccgugaacagaagcgccaccaagggcgugacccugcugcugcccgagcccgaguggaccuaccccagacugagcugccccggcagcaccuuccagaaggcccugcugaucagcccccacagauucggcgagaccaagggcaacagcgccccccugaucaucagagagcccuucaucgccugcggccccaccgagugcaagcacuucgcccugacccacuacgccgcccagcccggcggcuacuacaacggcaccagagaggacagaaacaagcugagacaccugaucagcgugaagcugggcaagauccccaccguggagaacagcaucuuccacauggccgccuggagcggcagcgccugccacgacggcaaggaguggaccuacaucggcguggacggccccgacagcaacgcccugcugaagaucaaguacggcgaggccuacaccgacaccuaccacagcuacgccaagaacauccugagaacccaggagagcgccugcaacugcaucggcggcgacugcuaccugaugaucaccgacggccccgccagcggcaucagcgagugcagauuccugaagaucagagagggcagaaucaucaaggagaucuuccccaccggcagagugaagcacaccgaggagugcaccugcggcuucgccagcaacaagaccaucgagugcgccugcagagacaacagcuacaccgccaagagacccuucgugaagcugaacguggagaccgacaccgccgagaucagacugaugugcaccgagaccuaccuggacacccccagacccaacgacggcagcaucaccggccccugcgagagcgacggcgacaagggcagcggcggcaucaagggcggcuucgugcaccagagaauggccagcaagaucggcagaugguacagcagaaccaugagcaagaccaagagaaugggcaugggccuguacgugaaguacgacggcgaccccuggaccgacagcgaggcccuggcccugagcggcgugauggugagcauggaggagcccggcugguacagcuucggcuucgagaucaaggacaagaagugcgacgugcccugcaucggcaucgagauggugcacgacggcggcaagaccaccuggcacagcgccgccaccgccaucuacugccugaugggcagcggccagcugcugugggacaccgugaccggcguggacauggcccuguga

SEQ ID NO: 188688 - RNA, 1401 nt, Artificial Sequence
  derived and/or modified CDS sequence (opt4) from neuraminidase__InfluenzaB__ABL76654
augcugcccagcaccauccagacccugacccuguuccugaccagcggcggcgugcugcugagccuguacgugagcgccagccugagcuaccugcuguacagcgacauccugcugaaguucagccagaccgagaucaccgcccccaucaugccccuggacugcgccaacgccagcaacgugcaggccgugaacagaagcaccaccaagggcgugacccugcugcugcccgagcccgaguggaccuaccccagacugagcugccccggcagcaccuuccagaaggcccugcugaucagcccccacagauucggcgagaccaagggcaacagcgccccccugaucaucagagagcccuucaucgccugcggccccaccgagugcaagcacuucgcccugacccacuacgccgcccagcccggcggcuacuacaacggcaccagagaggacagaaacaagcugagacaccugaucagcgugaagcugggcaagauccccaccguggagaacagcaucuuccacauggccgccuggagcggcagcgccugccacgacggcaaggaguggaccuacaucggcguggacggccccgacagcaacgcccugcugaagaucaaguacggcgaggccuacaccgacaccuaccacagcuacgccaagaacauccugagaacccaggagagcgccugcaacugcaucggcggcgacugcuaccugaugaucaccgacggccccgccagcggcaucagcgagugcagauuccugaagaucagagagggcagaaucaucaaggagaucuuccccaccggcagagugaagcacaccgaggagugcaccugcggcuucgccagcaacaagaccaucgagugcgccugcagagacaacagcuacaccgccaagagacccuucgugaagcugaacguggagaccgacaccgccgagaucagacugaugugcaccgagaccuaccuggacacccccagacccaacgacggcagcaucaccggccccugcgagagcgacggcgacaagggcagcggcggcaucaagggcggcuucgugcaccagagaauggccagcaagaucggcagaugguacagcagaaccaugagcaagaccaagagaaugggcaugggccuguacgugaaguacgacggcgaccccuggaccgacagcgaggcccuggcccugagcggcgugauggugagcauggaggagcccggcugguacagcuucggcuucgagaucaaggacaagaagugcgacgugcccugcaucggcaucgagauggugcacgacggcggcaagaccaccuggcacagcgccgccaccgccaucuacugccugaugggcagcggccagcugcugugggacaccgugaccggcguggacauggcccuguga

SEQ ID NO: 188689 - RNA, 1401 nt, Artificial Sequence
  derived and/or modified CDS sequence (opt4) from neuraminidase__InfluenzaB__ABL76665
augcugcccagcaccauccagacccugacccuguuccugaccagcggcggcgugcugcugagccuguacgugagcgccagccugagcuaccugcuguacagcgacauccugcugaaguucagccagaccgagaucaccgcccccaucaugccccuggacugcgccaacgccagcaacgugcaggccgugaacagaagcgccaccaagggcgugacccugcugcugcccgagcccgaguggaccuaccccagacugagcugccccggcagcaccuuccagaaggcccugcugaucagcccccacagauucggcgagaccaagggcaacagcgccccccugaucaucagagagcccuucaucgccugcggccccaccgagugcaagcacuucgcccugacccacuacgccgcccagcccggcggcuacuacaacggcaccagagaggacagaaacaagcugagacaccugaucagcgugaagcugggcaagauccccaccguggagaacagcaucuuccacauggccgccuggagcggcagcgccugccacgacggcaaggaguggaccuacaucggcguggacggccccgacagcaacgcccugcugaagaucaaguacggcgaggccuacaccgacaccuaccacagcuacgccaagaacauccugagaacccaggagagcgccugcaacugcaucggcggcgacugcuaccugaugaucaccgacggccccgccagcggcaucagcgagugcagauuccugaagaucagagagggcagaaucaucaaggagaucuuccccaccggcagagugaagcacaccgaggagugcaccugcggcuucgccagcaacaagaccaucgagugcgccugcagagacaacagcuacaccgccaagagacccuucgugaagcugaacguggagaccgacaccgccgagaucagacugaugugcaccgagaccuaccuggacacccccagacccaacgacggcagcaucaccggccccugcgaguucgacggcgacaagggcagcggcggcaucaagggcggcuucgugcaccagagaauggccagcaagaucggcagaugguacagcagaaccaugagcaagaccaagagaaugggcaugggccuguacgugaaguacgacggcgaccccuggaccgacagcgaggcccuggcccugagcggcgugauggugagcauggaggagcccggcugguacagcuucggcuucgagaucaaggacaagaagugcgacgugcccugcaucggcaucgagauggugcacgacggcggcaagaccaccuggcacagcgccgccaccgccaucuacugccugaugggcagcggccagcugcugugggacaccgugaccggcguggacauggcccuguga

SEQ ID NO: 188690 - RNA, 1401 nt, Artificial Sequence
  derived and/or modified CDS sequence (opt4) from neuraminidase__InfluenzaB__ABL76676
augcugcccagcaccauccagacccugacccuguuccugaccagcggcggcgugcugcugagccuguacgugagcgccagccugagcuaccugcuguacagcgacauccugcugaaguucagccagaccggcaucaccgcccccaucaugccccuggacugcgccaacgccagcaacgugcaggccgugaacagaagcgccaccaagggcgugacccugcugcugcccgagcccgaguggaccuaccccagacugagcugccccggcagcaccuuccagaaggcccugcugaucagcccccacagauucggcgagaccaagggcaacagcgccccccugaucaucagagagcccuucaucgccugcggccccaaggagugcaagcacuucgcccugacccacuacgccgcccagcccggcggcuacuacaacggcaccagagaggacagaaacaagcugagacaccugaucagcgugaagcugggcaagauccccaccguggagaacagcaucuuccacauggccgccuggagcggcagcgccugccacgacggcagagaguggaccuacaucggcguggacggccccgacagcaacgcccugcugaagaucaaguacggcgaggccuacaccgacaccuaccacagcuacgccaagaacauccugagaacccaggagagcgccugcaacugcaucggcggcgacugcuaccugaugaucaccgacggccccgccagcggcaucagcgagugcagauuccugaagaucagagagggcagaaucaucaaggagaucuuccccaccggcagagugaagcacaccgaggagugcaccugcggcuucgccagcaacaagaccaucgagugcgccugcagagacaacagcuacaccgccaagagacccuucgugaagcugaacguggagaccgacaccgccgagaucagacugaugugcaccgagaccuaccuggacacccccagacccaacgacggcagcaucaccggccccugcgagagcaacggcgacaagggcagcggcggcaucaagggcggcuucgugcaccagagaauggccagcaagaucggcagaugguacagcagaaccaugagcaagaccaagagaaugggcaugggccuguacgugaaguacgacggcgaccccuggaccgacagcgaggcccuggcccugagcggcgugauggugagcauggaggagcccggcugguacagcuucggcuucgagaucaaggacaagaagugcgacgugcccugcaucggcaucgagauggugcacgacggcggcaagaccaccuggcacagcgccgccaccgccaucuacugccugaugggcagcggccagcugcugugggacaccgugaccggcguggacauggcccuguga

SEQ ID NO: 188691 - RNA, 1401 nt, Artificial Sequence
  derived and/or modified CDS sequence (opt4) from neuraminidase__InfluenzaB__ABL76687
augcugcccagcaccauccagacccugacccuguuccugaccagcggcggcgugcugcugagccuguacgugagcgccagccugagcuaccugcuguacagcgacauccugcugaaguucagccagaccgagaucaccgcccccaucaugccccuggacugcgccaacgccagcaacgugcaggccgugaacagaagcgccaccaagggcgugacccugcugcugcccgagcccgaguggaccuaccccagacugagcugccccggcagcaccuuccagaaggcccugcugaucagcccccacagauucggcgagaccaagggcaacagcgccccccugaucaucagagagcccuucaucgccugcggccccaccgagugcaagcacuucgcccugacccacuacgccgcccagcccggcggcuacuacaacggcaccagagaggacagaaacaagcugagacaccugaucagcgugaagcugggcaagauccccaccguggagaacagcaucuuccacauggccgccuggagcggcagcgccugccacgacggcaaggaguggaccuacaucggcguggacggccccgacagcaacgcccugcugaagaucaaguacggcgaggccuacaccgacaccuaccacagcuacgccaagaacauccugagaacccaggagagcgccugcaacugcaucggcggcgacugcuaccugaugaucaccgacggccccgccagcggcaucagcgagugcagauuccugaagaucagagagggcagaaucaucaaggagaucuuccccaccggcagagugaagcacaccgaggagugcaccugcggcuucgccagcaacaagaccaucgagugcgccugcagagacaacagcuacaccgccaagagacccuucgugaagcugaacguggagaccgacaccgccgagaucagacugaugugcaccgagaccuaccuggacacccccagacccaacgacggcagcaucaccggccccugcgaguucgacggcgacaagggcagcggcggcaucaagggcggcuucgugcaccagagaauggccagcaagaucggcagaugguacagcagaaccaugagcaagaccaagagaaugggcaugggccuguacgugaaguacgacggcgaccccuggaccgacagcgaggcccuggcccugagcggcgugauggugcccauggaggagcccggcugguacagcuucggcuucgagaucaaggacaagaagugcgacgugcccugcaucggcaucgagauggugcacgacggcggcaagaccaccuggcacagcgccgccaccgccaucuacugccugaugggcagcggccagcugcugugggacaccgugaccggcguggacauggcccuguga

SEQ ID NO: 188692 - RNA, 1401 nt, Artificial Sequence
  derived and/or modified CDS sequence (opt4) from neuraminidase__InfluenzaB__ABL76698
augcugcccagcaccauccagacccugacccuguuccugaccagcggcggcgugcugcugagccuguacgugagcgccagccugagcuaccugcuguacagcgacauccugcugaaguucagccccaccgagaucaccgcccccaccaugccccuggacugcgccaacgccagcaacgugcaggccgugaacagaagcgccaccaagggcaugacccugcugcugcccgagcccgaguggaccuaccccagacugagcugccccggcagcaccuuccagaaggcccugcugaucagcccccacagauucggcgagaccagaggcaacagcgccccccugaccaucagagagcccuucaucgccugcggccccaaggagugcaagcacuucgcccugacccacuacgccgcccagcccggcggcuacuacaacggcaccagagaggacagaaacaagcugagacaccugaucagcgugaagcugggcaagauccccaccguggagaacagcaucuuccacauggccgccuggagcggcagcgccugccacgacggcagagaguggaccuacaucggcguggacggccccgacagcaacgcccugaucaagaucaaguacggcgaggccuacaccgacaccuaccacagcuacgccaacaacauccugagaacccaggagagcgccugcaacugcaucggcggcgacugcuaccugaugaucaccgacggcagcgccagcggcaucagcaagugcagauuccugaagaucagagagggcagaaucaucaaggagaucuuccccaccggcagaguggagcacaccgaggagugcaccugcggcuucgccagcaacaagaccaucgagugcgccugcagagacaacagcuacaccgccaagagacccuucgugaagcugaacguggagaccgacaccgccgagaucagacugaugugcaccgagaccuaccuggacacccccagacccgacgacggcagcaucaccggccccugcgagagcaacggcgacaagggcagaggcggcaucaagggcggcuucgugcaccagagaauggccagcaagaucggcagaugguacagcagaaccaugagcaagaccgagagaaugggcauggagcuguacgugaaguacgacggcgaccccuggaccgacagcgaggcccuggcccccagcggcgugauggugagcauggaggagcccggcugguacagcuucggcuucgagaucaaggacaagaagugcgacgugcccugcaucggcaucgagauggugcacgacggcggcaagaagaccuggcacagcgccgccaccgccaucuacugccugaugggcagcggccagcugcugugggacaccgugaccggcguggacauggcccuguga

SEQ ID NO: 188693 - RNA, 1401 nt, Artificial Sequence
  derived and/or modified CDS sequence (opt4) from neuraminidase__InfluenzaB__ABL76720
augcugcccagcaccauccagacccugacccuguuccugaccagcggcggcgugcugcugagccuguacgugagcgccagccugagcuaccugcuguacagcgacauccugcugaaguucagccccaccgagaucaccgcccccaccaugccccuggacugcgccaacgccagcaacgugcaggccgugaacagaagcgccaccaagggcgugacccugcugcugcccgagcccgaguggaccuaccccagacugagcugccccggcagcaccuuccagaaggcccugcugaucagcccccacagauucggcgagaccaagggcaacagcgccccccugaucaucagagagcccuucaucgccugcggccccaacgagugcaagcacuucgcccugacccacuacgccgcccagcccggcggcuacuacaacggcaccagaggcgacagaaacaagcugagacaccugaucagcgugaagcugggcaagauccccaccguggagaacagcaucuuccacauggccgccuggagcggcagcgccugccacgacggcaaggaguggaccuacaucggcguggacggccccgacaacaacgcccugcugaagaucaaguacggcgaggccuacaccgacaccuaccacagcuacgccaacaagauccugagaacccaggagagcgccugcaacugcaucggcggcaacugcuaccugaugaucaccgacggcagcgccagcggcgugagcgagugcagauuccugaagaucagagagggcagaaucaucaaggagaucuuccccaccggcagagugaagcacaccgaggagugcaccugcggcuucgccagcaacaagaccaucgagugcgccugcagagacaacagcuacaccgccaagagacccuucgugaagcugaacguggagaccgacaccgccgagaucagacugaugugcaccgacaccuaccuggacacccccagacccgacgacggcagcaucaccggccccugcgagagcaacggcgacaagggcagcggcggcaucaagggcggcuucgugcaccagagaauggccagcaagaucggcagaugguacagcagaaccaugagcaagaccgagagaaugggcaugggccuguacgugaaguacgacggcgaccccugggccgacagcgacgcccuggccuucagcggcgugauggugagcaugaaggagcccggcugguacagcuucggcuucgagaucaaggacaagaagugcgacgugcccugcaucggcaucgagauggugcacgacggcggcaaggagaccuggagaagcgccgccaccgccaucuacugccugaugggcagcggccagcugcugugggacaccgugaccggcguggacauggcccuguga

SEQ ID NO: 188694 - RNA, 1401 nt, Artificial Sequence
  derived and/or modified CDS sequence (opt4) from neuraminidase__InfluenzaB__ABL76731
augcugcccagcaccauccagacccugacccuguuccugaccagcggcggcgugcugcugagccuguacgugagcgccagccugagcuaccugcuguacagcgacauccugcugaaguucagccccaccgagaucaccgcccccaccaugccccuggacugcgccaacgccagcaacgugcacgccgugaacagaagcgccaccaagggcgugacccugcugcugcccgagcccgaguggaccuaccccagacugagcugccccggcagcaccuuccagaaggcccugcugaucagcccccacagauucggcgagaccaagggcaacagcgccccccugaucaucagagagcccuucaucgccugcggccccaacgagugcaagcacuucgccaucacccacuacgccgcccagcccggcggcuacuacaacggcaccagaggcgacagaaacaagcugagacaccugaucagcgugaagcugggcaagauccccaccguggagaacagcaucuuccacauggccgccuggagcggcagcgccugccacgacggcaaggaguggaccuacaucggcguggacggccccgacaacaacgcccugcugaagaucaaguacggcgaggccuacaccgacaccuaccacagcuacgccaacaacauccugagaacccaggagagcgccugcaacugcaucggcggcaacugcuaccugaugaucaccgacggcagcgccagcggcgugagcgagugcagauuccugaagaucagagagggcagaaucaucaaggagaucuuccccaccggcagagugaagcacaccgaggagugcaccugcggcuucgccagcaacaagaccaucgagugcgccugcagagacaacagcuacaccgccaagagacccuucgugaagcugaacguggagaccgacaccgccgagaucagacugaugugcaccgacaccuaccuggacacccccagacccgacgacggcagcaucaccggccccugcgagagcaacggcgacaagggcagcggcggcaucaagggcggcuucgugcaccagagaauggccagcaagaucggcagaugguacagcagaaccaugagcaagaccgagagaaugggcaugggccuguacgugaaguacgacggcgaccccugggccgacagcgacgcccuggccuucagcggcgugauggugagcaugaaggagcccggcugguacagcuucggcuucgagaucaaggacaagaagugcgacgugcccugcaucggcaucgagauggugcacgacggcggcaaggagaccuggcacagcgccgccaccgccaucuacugccugaugggcagcggccagcugcugugggacaccgugaccggcguggacauggcccuguga

SEQ ID NO: 188695 - RNA, 1401 nt, Artificial Sequence
  derived and/or modified CDS sequence (opt4) from neuraminidase__InfluenzaB__ABL76742
augcugcccagcaccauccagacccugacccuguuccugaccagcggcggcgugcugcugagccuguacgugagcgccagccugagcuaccugcuguacagcgacauccugcugaaguucagccccaccgagaucaccgcccccaccaugccccuggacugcgccaacgccagcaacgugcaggccgugaacagaagcgccaccaagggcgugacccugcugcugcccgagcccgaguggaccuaccccagacugagcugccccggcagcaccuuccagaaggcccugcugaucagcccccacagauucggcgagaccaagggcaacagcgccccccugaucaucagagagcccuucaucgccugcggccccaacgagugcaagcacuucgcccugacccacuacgccgcccagcccggcggcuacuacaacggcaccagaggcgacagaaacaagcugagacaccugaucagcgugaagcugggcaagauccccaccguggagaacagcaucuuccacauggccgccuggagcggcagcgccugccacgacggcaaggaguggaccuacaucggcguggacggccccgacaacaacgcccugcugaagaucaaguacggcgaggccuacaccgacaccuaccacagcuacgccaacaagauccugagaacccaggagagcgccugcaacugcaucggcggcaacugcuaccugaugaucaccgacggcagcgccagcggcgugagcgagugcagauuccugaagaucagagagggcagaaucaucaaggagaucuuccccaccggcagagugaagcacaccgaggagugcaccugcggcuucgccagcaacaagaccaucgagugcgccugcagagacaacagcuacaccgccaagagacccuucgugaagcugaacguggagaccgacaccgccgagaucagacugaugugcaccgacaccuaccuggacacccccagacccgacgacggcagcaucaccggccccugcgagagcaacggcgacaagggcagcggcggcaucaagggcggcuucgugcaccagagaauggccagcaagaucggcagaugguacagcagaaccaugagcaagaccgagagaaugggcaugggccuguacgugaaguacgacggcgaccccugggccgacagcgacgcccuggccuucagcggcgugauggugagcaugaaggagcccggcugguacagcuucggcuucgagaucaaggacaagaagugcgacgugcccugcaucggcaucgagauggugcacgacggcggcaaggagaccuggcacagcgccgccaccgccaucuacugccugaugggcagcggccagcugcugugggacaccgugaccggcguggacauggcccuguga

SEQ ID NO: 188696 - RNA, 1401 nt, Artificial Sequence
  derived and/or modified CDS sequence (opt4) from neuraminidase__InfluenzaB__ABL76753
augcugcccagcaccauccagacccugacccuguuccugaccagcggcggcgugcugcugagccuguacgugagcgccagccugagcuaccugcuguacagcgacauccugcugaaguucagccagaccgagaucaccgcccccaucaugccccuggacugcgccaacgccagcaacgugcaggccgugaacagaagcgccaccaagggcgugacccugcugcugcccgagcccgaguggaccuaccccagacugagcugccccggcagcaccuuccagaaggcccugcugaucagcccccacagauucggcgagaccaccggcaacagcgccccccugaucaucagagagcccuucaucgccugcggccccaaggagugcaagcacuucgcccugacccacuacgccgcccagcccggcggcuacuacaacggcaccagagaggacagaaacaagcugagacaccugaucagcgugaagcugggcaagauccccaccguggagaacagcaucuuccacauggccgccuggagcggcagcgccugccacgacggcagagaguggaccuacaucggcguggacggccccgacaacaacgcccugcugaagaucaaguacggcgaggccuacaccgacaccuaccacagcuacgccaagaacauccugagaacccaggagagcgccugcaacugcaucggcggcgacugcuaccugaugaucaccgacggccccgccagcggcaucagcgagugcagauuccugaagaucagagagggcagaaucaucaaggagaucuuccccaccggcagagugaagcacaccgaggagugcaccugcggcuucgccagcaacaagaccaucgagugcgccugcagagacaacagcuacaccgccaagagacccuucgugaagcugaacguggagaccgacaccgccgagaucagacugaugugcaccgagaccuaccuggacacccccagacccaacgacggcagcaucaccggccccugcgagagcaacggcgacaagggcagcggcggcaucaagggcggcuucgugcaccagagaauggccagcaagaucggcagaugguacagcagaaccaugagcaagaccaagagaaugggcaugggccuguacgugaaguacgacggcgaccccuggaccgacagcgaggcccuggcccugagcggcgugauggugagcauggaggagcccggcugguacagcuucggcuucgagaucaaggacaagaagugcgacgugcccugcaucggcaucgagauggugcacgacggcggcaagaccaccuggcacagcgccgccaccgccaucuacugccugaugggcagcggccagcugcugugggacaccgugaccggcguggacauggcccuguga

SEQ ID NO: 188697 - RNA, 1401 nt, Artificial Sequence; identical to SEQ ID NO: 188666
  derived and/or modified CDS sequence (opt4) from neuraminidase__InfluenzaB__ABL76764

SEQ ID NO: 188698 - RNA, 1401 nt, Artificial Sequence; identical to SEQ ID NO: 188666
  derived and/or modified CDS sequence (opt4) from neuraminidase__InfluenzaB__ABL76775

SEQ ID NO: 188699 - RNA, 1401 nt, Artificial Sequence
  derived and/or modified CDS sequence (opt4) from neuraminidase__InfluenzaB__ABL76797
augcugcccagcaccauccagacccugacccuguuccugaccagcggcggcgugcugcugagccuguacgugagcgccagccugagcuaccugcuguacagcgacauccugcugaaguucagccccaccgagaucaccgcccccaccaugccccuggacugcgccaacgccagcaacgugcaggccgugaacagaagcgccaccaagggcgugacccugcugcugcccgagcccgaguggaccuaccccagacugagcugccccggcagcaccuuccagaaggcccugcugaucagcccccacagauucggcgagaccaagggcaacagcgccccccugaucaucagagagcccuucaucgccugcggccccaaggagugcaagcacuucgcccugacccacuacgccgcccagcccggcggcuacuacaacggcaccagagaggacagaaacaagcugagacaccugaucagcgugaagcugggcaagauccccaccguggagaacagcaucuuccacauggccgccuggagcggcagcgccugccacgacggcaaggaguggaccuacaucggcguggacggccccgacagcaacgcccugcugaagaucaaguacggcgaggccuacaccgacaccuaccacagcuacgccaacaacauccugagaacccaggagagcgccugcaacugcaucggcggcaacugcuaccugaugaucaccgacggcagcgccagcggcaucagcgagugcagauuccugaagaucagagagggcagaaucaucaaggagaucuuccccaccggcagaguggagcacaccgaggagugcaccugcggcuucgccagcaacaagaccaucgagugcgccugcagagacaacagcuacaccgccaagagacccuucgugaagcugaacguggagaccgacaccgccgagaucagacugaugugcaccgagaccuaccuggacacccccagacccgacgacggcagcaucaccggccccugcgagagcaacggcgacaagggcagcggcggcaucaagggcggcuucgugcaccagagaauggccagcaagaucggcagaugguacagcagaaccaugagcaagaccaagagaaugggcaugggccuguacgugaaguacgacggcgaccccuggaccgacagcgacgcccuggcccugagcggcgugauggugagcauggaggagcccggcugguacagcuucggcuucgagaucaaggacaagaagugcgacgugcccugcaucggcaucgagauggugcacgacggcggcaaggagaccuggcacagcgccgccaccgccaucuacugccugaugggcagcggccagcugcugugggacaccgugaccggcgugaacauggcccuguga

SEQ ID NO: 188700 - RNA, 1401 nt, Artificial Sequence
  derived and/or modified CDS sequence (opt4) from neuraminidase__InfluenzaB__ABL76819
augcugcccagcaccauccagacccugacccuguuccugaccagcggcggcgugcugcugagccuguacgugagcgccagccugagcuaccugcuguacagcgacauccugcugaaguucagccccaccgagaucaccgcccccaccaugccccuggacugcgccaacgccagcaacgugcaggccgugaacagaagcgccaccaagggcgugacccugcugcugcccgagcccgaguggaccuaccccagacugagcugccccggcagcaccuuccagaaggcccugcugaucagcccccacagauucggcgagaccaagggcaacagcgccccccugaucaucagagagcccuucaucgccugcggccccaaggagugcaagcacuucgcccugacccacuacgccgcccagcccggcggcuacuacaacggcaccagagaggacagaaacaagcugagacaccugaucagcgugaagcugggcaagauccccaccguggagaacagcaucuuccacauggccgccuggagcggcagcgccugccacgacggcaaggaguggaccuacaucggcguggacggccccgacagcaacgcccugcugaagaucaaguacggcgaggccuacaccgacaccuaccacagcuacgccaacaacauccugagaacccaggagagcgccugcaacugcaucggcggcaacugcuaccugaugaucaccgacggcagcgccagcggcaucagcgagugcagauuccugaagaucagagagggcagaaucaucaaggagaucuuccccaccggcagagugaagcacaccgaggagugcaccugcggcuucgccagcaacaagaccaucgagugcgccugcagagacaacagcuacaccgccaagagacccuucgugaagcugaacguggagaccgacaccgccgagaucagacugaugugcaccgagaccuaccuggacacccccagacccgacgacggcagcaucaccggccccugcgagagcaacggcgacaagggcagcggcggcaucaagggcggcuucgugcaccagagaauggccagcaagaucggcagaugguacagcagaaccaugagcaagaccaagagaaugggcaugggccuguacgugaaguacgacggcgaccccuggaccgacagcgacgcccuggcccugagcggcgugauggugagcauggaggagcccggcugguacagcuucggcuucgagaucaaggacaagaagugcgacgugcccugcaucggcaucgagauggugcacgacggcggcaaggagaccuggcacagcgccgccaccgccaucuacugccugaugggcagcggccagcugcugugggacaccgugaccggcguggacauggcccuguga

SEQ ID NO: 188701 - RNA, 1401 nt, Artificial Sequence
  derived and/or modified CDS sequence (opt4) from neuraminidase__InfluenzaB__ABL76830
augcugcccagcaccauccagacccugacccuguuccugaccagcggcggcgugcugcugagccuguacgugagcgccagccugagcuaccugcuguacagcgacauccugcugaaguucagccccaccaagaucaccgcccccaccaugccccuggacugcgccaacgccagcaacgugcaggccgugaacagaagcgccaccaagggcgugacccugcugcugcccgagcccgaguggaccuaccccagacugagcugccccggcagcaccuuccagaaggcccugcugaucagcccccacagauucggcgagaccaagggcaacagcgccccccugaucaucagagagcccuucaucgccugcggccccaaggagugcaagcacuucgcccugacccacuacgccgcccagcccggcggcuacuacaacggcaccagaggcgacagaaacaagcugagacaccugaucagcgugaagcugggcaagauccccaccguggagaacagcaucuuccacauggccgccuggagcggcagcgccugccacgacggcaaggaguggaccuacaucggcguggacggccccgacaacaacgcccugcugaagaucaaguacggcgaggccuacaccgacaccuaccacagcuacgccaacaacauccugagaacccaggagagcgccugcaacugcaucggcggcaacugcuaccugaugaucaccgacggcagcgccagcggcgugagcgagugcagauuccugaagaucagagagggcagaaucaucaaggagaucuuccccaccggcagagugaagcacaccgaggagugcaccugcggcuucgccagcaacaagaccaucgagugcgccugcagagacaacagcuacaccgccaagagacccuucgugaagcugaacguggagaccgacaccgccgagaucagacugaugugcaccaagaccuaccuggacacccccagacccgacgacggcagcaucaccggccccugcgagagcaacggcgacaagggcagcggcggcaucaagggcggcuucgugcaccagagaauggccagcaagaucggcagaugguacagcagaaccaugagcaagaccaagagaaugggcaugggccuguacgugaaguacgacggcgaccccugggccgacagcgacgcccuggcccugagcggcgugauggugagcauggaggagcccggcugguacagcuucggcuucgagaucaaggacaagaagugcgacgugcccugcaucggcaucgagauggugcacgacggcggcaaggagaccuggcacagcgccgccaccgccaucuacugccugaugggcagcggccagcugcugugggacaccgugaccggcguggacauggcccuguga

SEQ ID NO: 188702 - RNA, 1401 nt, Artificial Sequence
  derived and/or modified CDS sequence (opt4) from neuraminidase__InfluenzaB__ABL76852
augcugcccagcaccauccagacccugacccuguuccugaccagcggcggcgugcugcugagccuguacgugagcgccagccugagcuaccugcuguacagcgacauccugcugaaguucagccccaccgagaucaccgcccccaccaugccccuggacugcgccaacgccagcaacgugcaggccgugaacagaagcgccaccaagggcgugacccugcugcugcccgagcccgaguggaccuaccccagacugagcugccccggcagcaccuuccagaaggcccugcugaucagcccccacagauucggcgagaccaagggcaacagcgccccccugaucaucagagagcccuucaucgccugcggccccaaggagugcaagcacuucgcccugacccacuacgccgcccagcccggcggcuacuacaacggcaccagagaggacagaaacaagcugagacaccugaucagcgugaagcugggcaagauccccaccguggagaacagcaucuuccacauggccgccuggagcggcagcgccugccacgacggcaaggaguggaccuacaucggcguggacggccccgacagcaacgcccugcugaagaucaaguacggcgaggccuacaccgacaccuaccacagcuacgccaacaacauccugagaacccaggagagcgccugcaacugcaucggcggcaacugcuaccugaugaucaccgacggcagcgccagcggcaucagcgagugcagauuccugaagaucagagagggcagaaucaucaaggagaucuuccccaccggcagagugaagcacaccgaggagugcaccugcggcuucgccagcaacaagaccaucgagugcgccugcagagacaacagcuacaccgccaagagacccuucgugaagcugaacguggagaccgacaccgccgagaucagacugaugugcaccgagaccuaccuggacacccccagacccgacgacggcagcaucaccggccccugcgagagcaacggcgacaagggcagcggcggcaucaagggcggcuucgugcaccagagaauggagagcaagaucggcagaugguacagcagaaccaugagcaagaccaagagaaugggcaugggccuguacgugaaguacgacggcgaccccuggaccgacagcgacgcccuggcccugagcggcgugauggugagcaucgaggagcccggcugguacagcuucggcuucgagaucaaggacaagaagugcgacgugcccugcaucggcaucgagauggugcacgacggcggcaaggagaccuggcacagcgccgccaccgccaucuacugccugaugggcagcggccagcugcugugggacaccgugaccggcguggacauggcccuguga

SEQ ID NO: 188703 - RNA, 1401 nt, Artificial Sequence
  derived and/or modified CDS sequence (opt4) from neuraminidase__InfluenzaB__ABL76863
augcugcccagcaccauccagacccugacccuguuccugaccagcggcggcgugcugcugagccuguacgugagcgccagccugagcuaccugcuguacagcgacauccugcugaaguucagccccaccgagaucaccgcccccaccaugccccuggacugcgccaacgccagcaacgugcaggccgugaacagaagcgccaccaagggcgugacccugcugcugcccgagcccgaguggaccuaccccagacugagcugccccggcagcaccuuccagaaggcccugcugaucagcccccacagauucggcgagaccaagggcaacagcgccccccugaucaucagagagcccuucaucgccugcggccccaaggagugcaagcacuucgcccugacccacuacgccgcccagcccggcggcuacuacaacggcaccagagaggacagaaacaagcugagacaccugaucagcgugaagcugggcaagauccccaccguggagaacagcaucuuccacauggccgccuggagcggcagcgccugccacgacggcaaggaguggaccuacaucggcguggacggccccgacagcaacgcccugcugaagaucaaguacggcgaggccuacaccgacaccuaccacagcuacgccaacaacauccugagaacccaggagagcgccugcaacugcaucggcggcaacugcuaccugaugaucaccgacggcagcgccagcggcaucagcgagugcagauuccugaagaucagagagggcagaaucaucaaggagaucuuccccaccggcagagugaagcacaccgaggagugcaccugcggcuucgccagcaacaagaccaucgagugcgccugcagagacaacagcuacaccgccaagagacccuucgugaagcugaacguggagaccgacaccgccgagaucagacugaugugcaccgagaccuaccuggacacccccagacccgacgacggcagcaucaccggccccugcgagagcaacggcgacaagggcagcggcggcaucaagggcggcuucgugcaccagagaauggccagcaagaucggcagaugguacagcagaaccaugagcaagaccaagagaaugggcaugggccuguacgugaaguacgacggcgaccccuggaccgacagcgacgcccuggcccugagcggcgugauggugagcauggaggagcccggcugguacagcuucggcuucgagaucaaggacaagaagugcgacgugcccugcaucggcaucgagauggugcacgacggcggcaaggagaccuggcacagcgccgccaccgccaucuacugccugaugggcagcggccagcugcugugggacaccgugaccggcguggacauggccauguga

SEQ ID NO: 188704 - RNA, 1401 nt, Artificial Sequence
  derived and/or modified CDS sequence (opt4) from neuraminidase__InfluenzaB__ABL76874
augcugcccagcaccauccagacccugacccuguuccugaccagcggcggcgugcugcugagccuguacgugagcgccagccugagcuaccugcuguacagcgacauccugcugaaguucagccccaccgagaucaccgcccccaccaugccccuggacugcgccaacgccagcaacgugcaggccgugaacagcagcgccaccaagggcgugacccugcugcugcccgagcccgaguggaccuaccccagacugagcugccccggcagcaccuuccagaaggcccugcugaucagcccccacagauucggcgagaccaagggcaacagcgccccccugaucaucagagagcccuucaucgccugcggccccaaggagugcaagcacuucgcccugacccacuacgccgcccagcccggcggcuacuacaacggcaccagaggcgacagaaacaagcugagacaccugaucagcgugaagcugggcaagauccccaccguggagaacagcaucuuccacauggccgccuggagcggcagcgccugccacgacggcaaggaguggaccuacaucggcguggacggccccgacagcaacgcccugcugaagaucaaguacggcgaggccuacaccgacaccuaccacagcuacgccaacaacauccugagaacccaggagagcgccugcaacugcaucggcggcaacugcuaccugaugaucaccgacggcagcgccagcggcaucagcgagugcagauuccugaagaucagagagggcagaaucaucaaggagaucuuccccaccggcagagugaagcacaccgaggagugcaccugcggcuucgccagcaacaagaccaucgagugcgccugcagagacaacagcuacaccgccaagagacccuucgugaagcugaacguggagaccgacaccgccgagaucaagcugaugugcaccgagaccuaccuggacacccccagacccgacgacggcagcaucaccggccccugcgagagcaacggcgacaagggcagcggcggcaucaagggcggcuucgugcaccagagaauggccagcaagaucggcagaugguacagcagaaccaugagcaagaccaagagaaugggcaugggccuguacgugaaguacgacggcgaccccuggaccgacagcgacgcccuggcccugagcggcgugauggugagcauggaggagcccggcugguacagcuucggcuucgagaucaaggacaagaagugcgacgugcccugcaucggcaucgagauggugcacgacggcggcaaggagaccuggcacagcgccgccaccgccaucuacugccugaugggcagcggccagcugcugugggacaccgugaccggcguggacauggcccuguga

SEQ ID NO: 188705 - RNA, 1401 nt, Artificial Sequence
  derived and/or modified CDS sequence (opt4) from neuraminidase__InfluenzaB__ABL76885
augcugcccagcaccauccagacccugacccuguuccugaccagcggcggcgugcugcugagccuguacgugagcgccagccugagcuaccugcuguacagcgacauccugcugaaguucagccagaccgagaucaccgcccccaccaugccccuggacuacgccaacgccagcaacgugcaggccgugaacagaagcgccaccaagggcgugacccugcugcugcccgagcccgaguggaccuaccccagacugagcugccccggcagcaccuuccagaaggcccugcugaucagcccccacagauucggcgagaccaagggcaacagcgccccccugaucaucagagagcccuucaucgccugcggccccaaggagugcaagcacuucgcccugacccacuacgccgcccagcccggcggcuacuacaacggcaccagagaggacagaaacaagcugagacaccugaucagcgugaagcugggcaagauccccaccguggagaacagcaucuuccacauggccgccuggagcggcagcgccugccacgacggcagagaguggaccuacaucggcguggacggccccgacagcaacgcccugcugaagaucaaguacggcgaggccuacaccgacaccuaccacagcuacgccaagaacauccugagaacccaggagagcgccugcaacugcaucggcggcgacugcuaccugaugaucaccgacggcagcgccagcggcaucagcgagugcagauuccugaagaucagagagggcagaaucaucaaggagaucuuccccaccggcagagugaagcacaccgaggagugcaccugcggcuucgccagcaacaagaccaucgagugcgccugcagagacaacagcuacaccgccaagagacccuucgugaagcugaacguggagaccgacaccgccgagaucagacugaugugcaccgagaccuaccuggacacccccagacccgacgacggcagcaucaccggccccugcgagagcaacggcgacaagggcagcggcggcaucaagggcggcuucgugcaccagagaauggccagcaagaucggcagaugguacagcagaaccaugagcaagaccaagagaaugggcaugggccuguacgugaaguacgacggcgaccccuggaccgacagcgaggcccuggcccugagcggcgugauggugagcauggaggagcccggcugguacagcuucggcuucgagaucaaggacaagaagugcgacgugcccugcaucggcaucgagauggugcacgacggcggcaagaccaccuggcacagcgccgccaccgccaucuacugccugaugggcagcggccagcugcugugggacaccgugaccggcguggacauggcccuguga

SEQ ID NO: 188706 - RNA, 1401 nt, Artificial Sequence
  derived and/or modified CDS sequence (opt4) from neuraminidase__InfluenzaB__ABL76896
augcugcccagcaccauccagacccugacccuguuccugaccagcggcggcgugcugcugagccuguacgugagcgccagccugagcuaccugcuguacagcgacauccugcugaaguucagccagaccgagaucaccgcccccaccaugccccuggacugcgccaacgccagcaacgugcaggccgugaacagaagcgccaccaagggcgugacccugcugcugcccgagcccgaguggauguaccccagacugagcugccccggcagcaccuuccagaaggcccugcugaucagcccccacagauucggcgagaccaagggcaacagcgccccccugaucaucagagagcccuucaucgccugcggccccaaggagugcaagcacuucgcccugacccacuacgccgcccagcccggcggcuacuacaacggcaccagagaggacagaaacaagcugagacaccugaucagcgugaagcugggcaagauccccaccguggagaacagcaucuuccacauggccgccuggagcggcagcgccugccacgacggcagagaguggaccuacaucggcguggacggccccgacagcaacgcccugcugaagaucaaguacggcgaggccuacaccgacaccuaccacagcuacgccaagaacauccugagaacccaggagagcgccugcaacugcaucggcggcgacugcuaccugaugaucaccgacggcagcgccagcggcaucagcgagugcagauuccugaagaucagagagggcagaaucaucaaggagaucuuccccaccggcagagugaagcacaccgaggagugcaccugcggcuucgccagcaacaagaccaucgagugcgccugcagagacaacagcuacaccgccaagagacccuucgugaagcugaacguggagaccgacaccgccgagaucagacugaugugcaccgagaccuaccuggacacccccagacccgacgacggcagcaucaccggccccugcgagagcaacggcgacaagggcagcggcggcaucaagggcggcuucgugcaccagagaauggccagcaagaucggcagaugguacagcagaaccaugagcaagaccaagagaaugggcaugggccuguacgugaaguacgacggcgaccccuggaccgacagcgaggcccuggcccugagcggcgugauggugagcauggaggagcccggcugguacagcuucggcuucgagaucaaggacaagaagugcgacgugcccugcaucggcaucgagauggugcacgacggcggcaagaccaccuggcacagcgccgccaccgccaucuacugccugaugggcagcggccagcugcugugggacgccgugaccggcguggacauggcccuguga

SEQ ID NO: 188707 - RNA, 1401 nt, Artificial Sequence
  derived and/or modified CDS sequence (opt4) from neuraminidase__InfluenzaB__ABL76918
augcugcccagcaccauccagacccugacccuguuccugaccagcggcggcgugcugcugagccuguacgugagcgccagccugagcuaccugcuguacagcgacauccugcugaaguucagccccaccgagaucaccgcccccaccaugccccuggacugcgccaacgccagcaacgugcaggccgugaacagaagcgccaccaagggcgugacccugcugcugcccgagcccgaguggaccuaccccagacugagcugccccggcagcaccuuccagaaggcccugcugaucagcccccacagauucggcgagaccaagggcaacagcgccccccugaucaucagagagcccuucaucgccugcggccccaacgagugcaagcacuucgcccugacccacuacgccgcccagcccggcggcuacuacaacggcaccagaggcgacagaaacaagcugagacaccugaucagcgugaagcugggcaagauccccaccguggagaacagcaucuuccacauggccgccuggagcggcagcgccugccacgacggcaaggaguggaccuacaucggcguggacggccccgacaacaacgcccugcugaagaucaaguacggcgaggccuacaccgacaccuaccacagcuacgccaacaacauccugagaacccaggagagcgccugcaacugcaucggcggcaacugcuaccugaugaucaccgacggcagcgccagcggcgugagcgagugcagauuccugaagaucagagagggcagaaucaucaaggagaucuuccccaccggcagagugaagcacaccgaggagugcaccugcggcuucgccagcaacaagaccaucgagugcgccugcagagacaacagcuacaccgccaagagacccuucgugaagcugaacguggagaccgacaccgccgagaucagacugaugugcaccgagaccuaccuggacacccccagacccgacgacggcagcaucaccggccccugcgagagcaacggcgacaagggcagcggcggcaucaagggcggcuucgugcaccagagaauggccagcaagaucggcagaugguacagcagaaccaugagcaagaccgagagaaugggcaugggccuguacgugaaguacgacggcgaccccugggccgacagcgacgcccuggcccugaucggcgugauggugagcauggaggagcccggcugguacagcuucggcuucgagaucaaggacaagaagugcgacgugcccugcaucggcaucgagauggugcacgacggcggcaaggagaccuggcacagcgccgccaccgccaucuacugccugaugggcagcggccagcugcugugggacaccgugaccggcgugaacauggcccuguga

SEQ ID NO: 188708 - RNA, 1401 nt, Artificial Sequence
  derived and/or modified CDS sequence (opt4) from neuraminidase__InfluenzaB__ABL76962
augcugcccagcaccauccagacccugacccuguuccugaccagcggcggcgugcugcugagccuguacgugagcgcccugcugagcuaccugcuguacagcgacauccugcugaaguucagccccaccaagaucaucgcccccaccaugagccuggacugcgccaacgccagcaacgugcaggccgugaaccacagcgccaccgaggagaugaccuuccugcugcccgagcccgaguggaccuaccccagacugagcugccagggcagcaccuuccagaaggcccugcugaucagcccccacagauucggcgaggccaagggcaacagcgccccccugaucaucagagagcccuucaucgccugcggccccaaggagugcaagcacuucgcccugacccacuacgccgcccagcccggcggcuacuacaacggcaccagagaggacagaaacaagcugagacaccugaucagcgugaaccugggcaagauccccaccguggagaacagcaucuuccacauggccgccuggagcggcagcgccugccacgacggcagagaguggaccuacaucggcguggacggccccgacagcaacgcccugaucaagaucaaguacggcgaggccuacaccgacaccuaccacagcuacgccaacaacauccugagaacccaggagagcgccugcaacugcaucggcggcgacugcuaccugaugaucaccgacggcagcgccagcggcaucagcaagugcagauuccugaagaucagagagggcagaaucaucaaggagaucuuccccaccggcagaguggagcacaccgaggagugcaccugcggcuucgccagcaacaagaccaucgagugcgccugcagagacaacagcuacaccgccaagagacccuucgugaagcugaacguggagaccgacaccgccgagaucagacugaugugcaccgagaccuaccuggacacccccagacccgacgacggcagcaucaccggccccugcgagagcaacggcgacaagggcagcggcggcaucaagggcggcuucgugcaccagagaauggccagcaagaucggcagaugguacagcagaaccaugagcaagaccaagagaaugggcauggagcuguacgugaaguacgacggcgaccccuggaccgacagcgacgcccuggcccccagcggcgugauggugagcauggaggagcccggcugguacagcuucggcuucgagaucaaggacaagaagugcgacgugcccugcaucggcaucgagauggugcacgacggcggcaagaagaccuggcacagcgccgccaccgccaucuacugccugaugggcagcggccagcugcugugggacaccgugaccggcguggacauggcccuguga

SEQ ID NO: 188709 - RNA, 1401 nt, Artificial Sequence; identical to SEQ ID NO: 188639
  derived and/or modified CDS sequence (opt4) from neuraminidase__InfluenzaB__ABL76973

SEQ ID NO: 188710 - RNA, 1401 nt, Artificial Sequence
  derived and/or modified CDS sequence (opt4) from neuraminidase__InfluenzaB__ABL76984
augcugcccagcaccauccagacccugacccuguuccugaccagcggcggcgugcugcugagccuguacgugagcgccagccugagcuaccugcuguacagcgacauccugcugaaguucagccagaccgagaucaccgcccccaccaugccccuggacugcgccaacgccagcaacgugcaggccgugaaccugagcgccaccaagggcgugacccugcugcugcccgagcccgaguggaccuaccccagacugagcugccccggcagcaccuuccagaaggcccugcugaucagcccccacagauucggcgagaccaagggcaacagcgccccccugaucaucagagagcccuucaucgccugcggccccaaggagugcaagcacuucgcccugacccacuacgccgcccagcccggcggcuacuacaacggcaccagagaggacagaaacaagcugagacaccugaucagcgugaagcugggcaagauccccaccguggagaacagcaucuuccacauggccgccuggagcggcagcgccugccacgacggcagagaguggaccuacaucggcguggacggccccgacagcaacgcccugcugaagaucaaguacggcgaggccuacaccgacaccuaccacagcuacgccaacaacauccugagaacccaggagagcgccugcaacugcaucggcggcaacugcuaccugaugaucaccgacggcagcgccagcggcaucagcgagugcagauuccugaagaucagagagggcagaaucaucaaggagaucuuccccaccggcagaguggagcacaccgaggagugcaccugcggcuucgccagcaacaagaccaucgagugcgccugcagagacaacagcuacaccgccaagagacccuucgugaagcugaacguggagaccgacaccgccgagaucagacugaugugcaccgagaccuaccuggacacccccagacccgacgacggcagcaucaccggccccugcgagagcaacggcgacaagggcagcggcggcaucaagggcggcuucgugcaccagagaauggccagcaagaucggcagaugguacagcagaaccaugagcaagaccaagagaaugggcaugggccuguacgugaaguacgacggcgaccccuggaccgacagcgacgcccuggcccugagcggcgugauggugagcauggaggagcccggcugguacagcuucggcuucgagaucaaggacaagaagugcgacgugcccugcaucggcaucgagauggugcacgacggcggcaagagaaccuggcacagcgccgccaccgccaucuacugccugaugggcagcggccagcugcugugggacaccgugaccggcguggacauggcccuguga

SEQ ID NO: 188711 - RNA, 1401 nt, Artificial Sequence; identical to SEQ ID NO: 188666
  derived and/or modified CDS sequence (opt4) from neuraminidase__InfluenzaB__ABL77006

SEQ ID NO: 188712 - RNA, 1401 nt, Artificial Sequence; identical to SEQ ID NO: 188710
  derived and/or modified CDS sequence (opt4) from neuraminidase__InfluenzaB__ABL77017

SEQ ID NO: 188713 - RNA, 1401 nt, Artificial Sequence
  derived and/or modified CDS sequence (opt4) from neuraminidase__InfluenzaB__ABL77028
augcugcccagcaccauccagacccugacccuguuccugaccagcggcggcgugcugcugagccuguacgugagcgccagccugagcuaccugcuguacagcgacauccugcugaaguucagccccaccgagaucaccgcccccaccaugccccuggacugcgccaacgccagcaacgugcaggccgugaacagaagcgccaccaagggcgugacccugcugcugcccgagcccgaguggaccuaccccagacugagcugccccggcagcaccuuccagaaggcccugcugaucagcccccacagauucggcgagaccaagggcaacagcgccccccugaucaucagagagcccuucaucgccugcggccccaaggagugcaagcacuucgcccugacccacuacgccgcccagcccggcggcuacuacaacggcaccagagaggacagaaacaagcugagacaccugaucagcgugaagcugggcaagauccccaccguggagaacagcaucuuccacauggccgccuggagcggcagcgccugccacgacggcaaggaguggaccuacaucggcguggacggccccgacagcaacgcccugcugaagaucaaguacggcgaggccuacaccgacaccuaccacagcuacgccaacaacauccugagaacccaggagagcgccugcaacugcaucggcggcaacugcuaccugaugaucaccgacggcagcgccagcggcaucagcgagugcagauuccugaagaucagagagggcagaaucaucaaggagaucuuccccaccggcagaguggagcacaccgaggagugcaccugcggcuucgccagcaacaagaccaucgagugcgccugcagagacaacagcuacaccgccaagagacccuucgugaagcugaacguggagaccgacaccgccgagaucagacugaugugcaccgagaccuaccuggacacccccagacccgacgacggcagcaucaccggccccugcgagagcaacggcgacaagggcagcggcggcaucaagggcggcuucgugcaccagagaauggccagcaagaucggcagaugguacagcagaaccaugagcaagaccaagagaaugggcaugggccuguacgugaaguacgacggcgaccccuggaccgacagcgacgcccuggcccugagcggcgugauggugagcauggaggagcccggcugguacagcuucggcuucgagaucaaggacaagaagugcgacgugcccugcaucggcaucgagauggugcacgacggcggcaaggagaccuggcacagcgccgccaccgccaucuacugccugaugggcagcggccagcugcugugggacaccgugaccggcguggacauggcccuguga

SEQ ID NO: 188714 - RNA, 1401 nt, Artificial Sequence
  derived and/or modified CDS sequence (opt4) from neuraminidase__InfluenzaB__ABL77039
augcugcccagcaccauccagacccugacccuguuccugaccagcggcggcgugcugcugagccuguacgugagcgccagccugagcuaccugcuguacagcgacauccugcugaaguucagccccaccgagaccaccgcccccaccaugccccuggacugcgccaacgccagcaacgugcaggccgugaacugcagcgccaccaagggcgugacccugcugcugcccgagcccgaguggaccuaccccagacugagcugccccggcagcaccuuccagaaggcccugcugaucagcccccacagauucggcgagaccaagggcaacagcgccccccugaucaucagagagcccuucaucgccugcggccccaaggagugcaagcacuucgcccugacccacuacgccgcccagcccggcggcuacuacaacggcaccagagaggacagaaacaagcugagacaccugaucagcgugaagcugggcaagauccccaccguggagaacagcaucuuccacauggccgccuggagcggcagcgccugccacgacggcaaggaguggaccuacaucggcguggacggccccgacagcaacgcccugcugaagaucaaguacggcgaggccuacaccgacaccuaccacagcuacgccaacaacauccugagaacccaggagagcgccugcaacugcaucggcggcaacugcuaccugaugaucaccgacggcagcgccagcggcaucagcgagugcagauuccugaagaucagagagggcagaaucaucaaggagaucuuccccaccggcagaguggagcacaccgaggagugcaccugcggcuucgccagcaacaagaccaucgagugcgccugcagagacaacagcuacaccgccaagagacccuucgugaagcugaacguggagaccgacaccgccgagaucagacugaugugcaccgagaccuaccuggacacccccagacccgacgacggcagcaucaccggccccugcgagagcaacggcgacaagggcagcggcggcaucaagggcggcuucgugcaccagagaauggccagcaagaucggcagaugguacagcagaaccaugagcaagaccaagagaaugggcaugggccuguacgugaaguacgacggcgaccccuggaccgacagcgacgcccuggcccugagcggcgugauggugagcauggaggagcccggcugguacagcuucggcuucgagaucaaggacaagaagugcgacgugcccugcaucggcaucgagauggugcacgacggcggcaaggagaccuggcacagcgccgccaccgccaucuacugccugaugggcagcggccagcugcugugggacaccgugaccggcguggacauggcccuguga

SEQ ID NO: 188715 - RNA, 1401 nt, Artificial Sequence
  derived and/or modified CDS sequence (opt4) from neuraminidase__InfluenzaB__ABL77050
augcugcccagcaccauccagacccugacccuguuccugaccagcggcggcgugcugcugagccuguacgugagcgccagccugagcuaccugcuguacagcgacauccugcugaaguucagccccaccgagaucaccgcccccgccaugccccuggacugcgccaacgccagcaacgugcaggccgugaacagaagcgccaccaagggcgugacccugcugcugcccgagcccgaguggaccuaccccagacugagcugccccggcagcaccuuccagaaggcccugcugaucagcccccacagauucggcgagaccaagggcaacagcgccccccugaucaucagagagcccuucaucgccugcggccccaaggagugcaagcacuucgcccugacccacuacgccgcccagcccggcggcuacuacaacggcaccagagaggacagaaacaagcugagacaccugaucagcgugaagcugggcaagauccccaccguggagaacagcaucuuccacauggccgccuggagcggcagcgccugccacgacggcaaggaguggaccuacaucggcguggacggccccgacagcaacgcccugcugaagaucaaguacggcgaggccuacaccgacaccuaccacagcuacgccaacaacauccugagaacccaggagagcgccugcaacugcaucggcggcaacugcuaccugaugaucaccgacggcagcgccagcggcaucagcgagugcagauuccugaagaucagagagggcagaaucaucaaggagaucuuccccaccggcagagugaagcacaccgaggagugcaccugcggcuucgccagcaacaagaccaucgagugcgccugcagagacaacagcuacaccgccaagagacccuucgugaagcugaacguggagaccgacaccgccgagaucagacugaugugcaccgagaccuaccuggacacccccagacccgacgacggcagcaucaccggccccugcgagagcaacggcgacaagggcagcggcggcaucaagggcggcuucgugcaccagagaauggccagcaagaucggcagaugguacagcagaaccaugagcaagaccaagagaaugggcaugggccuguacgugaaguacgacggcgaccccuggaccgacagcgacgcccuggcccugagcggcgugauggugagcauggaggagcccggcugguacagcuucggcuucgagaucaaggacaagaagugcgacgugcccugcaucggcaucgagauggugcacgacggcggcaaggagaccuggcacagcgccgccaccgccaucuacugccugaugggcagcggccagcugcugugggacaccgugaccggcguggacauggcccuguga

SEQ ID NO: 188716 - RNA, 1401 nt, Artificial Sequence
  derived and/or modified CDS sequence (opt4) from neuraminidase__InfluenzaB__ABL77072
augcugcccagcaccauccagacccugacccuguuccugaccagcggcggcgugcugcugagccuguacgugagcgcccugcugagcuaccugcuguacagcgacauccugcugaaguucagccccaccaagaucaucgcccccaccaccagccuggacagcgccaacgccagcaacuuccaggccgugaaccacagcgccaccaaggagaugaccuuccugcugcccgagcccgaguggaccuaccccagacugagcugccagggcagcaccuuccagaaggcccugcugaucagcccccacagauucggcgaggccaagggcaacagcgccccccugaucaucagagagcccuucaucgccugcggccccaaggagugcaagcacuucgcccugacccacuacgccgcccagcccggcggcuacuacaacggcaccagagaggacagaaacaagcugagacaccugaucagcgugaaccugggcaagauccccaccguggagaacagcaucuuccacauggccgccuggagcggcagcgccugccacgacggcagagaguggaccuacaucggcguggacggccccgacagcaacgcccugaucaagaucaaguacggcgaggccuacaccgacaccuaccacagcuacgccaacaacauccugagaacccaggagagcgccugcaacugcaucggcggcgacugcuaccugaugaucaccgacggcagcgccagcggcaucagcaagugcagauuccugaagaucagagagggcagaaucaucaaggagaucuuccccaccggcagaguggagcacaccgaggagugcaccugcggcuucgccagcaacaagaccaucgagugcgccugcagagacaacagcuacaccgccaagagacccuucgugaagcugaacguggagaccgacaccgccgagaucagacugaugugcaccgagaccuaccuggacacccccagacccgacgacggcagcaucaccggccccugcgagagcaacggcgacaagggcagcggcggcaucaagggcggcuucgugcaccagagaauggccagcaagaucggcagaugguacagcagaaccaugagcaagaccaagagaaugggcauggagcuguacgugaaguacgacggcgaccccuggaccgacagcgacgcccuggcccccagcggcgugauggugagcaucaaggagagcggcugguacagcuucggcuucgagaucaaggacaagaagugcgacgugcccugcaucggcaucgagauggugcacgacggcggcaagaccaccuggcacagcgccgccaccgccaucuacugccugaugggcagcggccagcugcugugggacaccgugaccggcguggacauggcccuguga

SEQ ID NO: 188717 - RNA, 1401 nt, Artificial Sequence; identical to SEQ ID NO: 188644
  derived and/or modified CDS sequence (opt4) from neuraminidase__InfluenzaB__ABL77083

SEQ ID NO: 188718 - RNA, 1401 nt, Artificial Sequence; identical to SEQ ID NO: 188644
  derived and/or modified CDS sequence (opt4) from neuraminidase__InfluenzaB__ABL77094

SEQ ID NO: 188719 - RNA, 1401 nt, Artificial Sequence
  derived and/or modified CDS sequence (opt4) from neuraminidase__InfluenzaB__ABL77105
augcugcccagcaccauccagacccugacccuguuccugaccagcggcggcgugcugcugagccuguacgugagcgccagccugagcuaccugcuguacagcgacauccugcugaaguucagcagcaccgagaucaccgcccccaccaugccccuggacugcgccaacgccagcaacgugcaggccgugaacagaagcgccaccgagggcgugacccugcugcugcccgagcccgaguggaccuaccccagacugagcugccccggcagcaccuuccagaaggcccugcugaucagcccccacagauucggcgagaccaagggcaacagcgccccccugaucaucagagagcccuucaucgccugcggccccaaggagugcaagcacuucgcccugacccacuacgccgcccagcccggcggcuacuacaacggcaccagagaggacagaaacaagcugagacaccugaucagcgugaagcugggcaagauccccaccguggagaacagcaucuuccacauggccgccuggagcggcagcgccugccacgacggcaaggaguggaccuacaucggcguggacggccccgacagcaacgcccugcugaagaucaaguacggcgaggccuacaccgacaccuaccacagcuacgccaacaacauccugagaacccaggagagcgccugcaacugcaucggcggcaacugcuaccugaugaucaccgacggcagcgccagcggcaucagcgagugcagauuccugaagaucagagagggcagaaucaucaaggagaucuuccccaccggcagaguggagcacaccgaggagugcaccugcggcuucgccagcaacaagaccaucgagugcgccugcagagacaacagcuacaccgccaagagacccuucgugaagcugaacguggagaccgacaccgccgagaucagacugaugugcaccgagaccuaccuggacacccccagacccgacgacggcagcaucaccggccccugcgagagcaacggcgacaagggcagcggcggcaucaagggcggcuucgugcaccagagaauggccagcaagaucggcagaugguacagcagaaccaugagcaagaccaagagaaugggcaugggccuguacgugaaguacgacggcgaccccuggaccgacagcgacgcccuggcccugagcggcgugauggugagcauggaggagcccggcugguacagcuucggcuucgagaucaaggacaagaagugcgacgugcccugcaucggcaucgagauggugcacgacggcggcaaggagaccuggcacagcgccgccaccgccaucuacugccugaugggcagcggccagcugcugugggacaccgugaccggcguggacauggcccuguga

SEQ ID NO: 188720 - RNA, 1401 nt, Artificial Sequence; identical to SEQ ID NO: 188644
  derived and/or modified CDS sequence (opt4) from neuraminidase__InfluenzaB__ABL77127

SEQ ID NO: 188721 - RNA, 1401 nt, Artificial Sequence
  derived and/or modified CDS sequence (opt4) from neuraminidase__InfluenzaB__ABL77138
augcugcccagcaccauccagacccugacccuguuccugaccagcggcggcgugcugcugagccuguacgugagcgcccugcugagcuaccugcuguacagcgacauccugcugaaguucagccccaccaagaucaucgcccccaccaccagccuggacagcgccaacgccagcaacuuccaggccgugaaccacagcgccaccaaggagaugaccuuccugcugcccgagcccgaguggaccuaccccagacugagcugccagggcagcaccuuccagaaggcccugcugaucagcccccacagauucggcgaggccaagggcaacagcgccccccugaucaucagagagcccuucaucgccugcggccccaaggagugcaagcacuucgcccugacccacuacgccgcccagcccggcggcuacuacaacggcaccagagaggacagaaacaagcugagacaccugaucagcgugaaccugggcaagauccccaccguggagaacagcaucuuccacauggccgccuggagcggcagcgccugccacgacggcagagaguggaccuacaucggcguggacggccccgacagcaacgcccugaucaagaucaaguacggcgaggccuacaccgacaccuaccacagcuacgccaacaacauccugagaacccaggagagcgccugcaacugcaucggcggcgacugcuaccugaugaucaccgacggcagcgccagcggcaucagcaagugcagauuccugaagaucagagagggcagaaucaucaaggagaucuuccccaccggcagaguggagcacaccgaggagugcaccugcggcuucgccagcaacaagaccaucgagugcgccugcagagacaacagcuacaccgccaagagacccuucgugaagcugaacguggagaccgacaccgccgagaucagacugaugugcaccgagaccuaccuggacacccccagacccgacgacggcagcaucaccggccccugcgagagcaacggcgacaagggcagcggcggcaucaagggcggcuucgugcaccagagaauggccagcaagaucggcagaugguacagcagaaccaugagcaagaccaagagaaugggcauggagcuguacgugaaguacgacggcgaccccuggaccgacagcgacgcccuggcccccagcggcgugauggugagcaucgaggagcccggcugguacagcuucggcuucgagaucaaggacaagaagugcgacgugcccugcaucggcaucgagauggugcacgacggcggcaagaccaccugguacagcgccgccaccgccaucuacugccugaugggcagcggccagcugcugugggacaccgugaccggcguggacauggcccuguga

SEQ ID NO: 188722 - RNA, 1401 nt, Artificial Sequence; identical to SEQ ID NO: 188644
  derived and/or modified CDS sequence (opt4) from neuraminidase__InfluenzaB__ABL77149

SEQ ID NO: 188723 - RNA, 1401 nt, Artificial Sequence
  derived and/or modified CDS sequence (opt4) from neuraminidase__InfluenzaB__ABL77160
augcugcccagcaccauccagacccugacccuguuccugaccagcggcggcgugcugcugagccuguacgugagcgccagccugagcuaccugcuguacagcgacauccugcugaaguucagccagaccaagaucaccgcccccaccaugccccuggacugcgccaacgccagcaacgugcaggccgugaacagaagcgccaccaagggcgugacccugcugcugcccgagcccgaguggaccuaccccagacugagcugccccggcagcaccuuccagaaggcccugcugaucagcccccacagauucggcgagaccaagggcaacagcgccccccugaucaucagagagcccuucaucgccugcggccccaaggagugcaagcacuucgcccugacccacuacgccgcccagcccggcggcuacuacaacggcaccagagaggacagaaacaagcugagacaccugaucagcgugaagcugggcaagauccccaccguggagaacagcaucuuccacauggccgccuggagcggcagcgccugccacgacggcagagaguggaccuacaucggcguggacggccccgacagcaacgcccugcugaagaucaaguacggcgaggccuacaccgacaccuaccacagcuacgccaagaacauccugagaacccaggagagcgccugcaacugcaucggcggcgacugcuaccugaugaucaccgacggcagcgccagcggcaucagcgagugcagauuccugaagaucagagagggcagaaucaucaaggagaucuuccccaccggcagagugaagcacaccgaggagugcaccugcggcuucgccagcaacaagaccaucgagugcgccugcagagacaacagcuacaccgccaagagacccuucgugaagcugaacguggagaccgacaccgccgagaucagacugaugugcaccgagaccuaccuggacacccccagacccaacgacggcagcaucaccggccccugcgagagcgacggcgacagaggcagcggcggcaucaagggcggcuucgugcaccagagaauggagagcaagaucggcagaugguacagcagaaccaugagcaagaccaagagaaugggcaugggccuguacgugaaguacgacggcgaccccuggaccgacagcgaggcccuggcccugagcggcgugauggugagcauggaggagcccggcugguacagcuucggcuucgagaucaaggacaagaagugcgacgugcccugcaucggcaucgagauggugcacgacggcggcaagaccaccuggcacagcgccgccaccaccaucuacugccugaugggcagcggccagcugcugugggacaccgugaccggcguggacauggcccuguga

SEQ ID NO: 188724 - RNA, 1401 nt, Artificial Sequence; identical to SEQ ID NO: 188676
  derived and/or modified CDS sequence (opt4) from neuraminidase__InfluenzaB__ABL77171

SEQ ID NO: 188725 - RNA, 1401 nt, Artificial Sequence
  derived and/or modified CDS sequence (opt4) from neuraminidase__InfluenzaB__ABL77182
augcugcccagcaccauccagacccugacccuguuccugaccagcggcggcgugcugcugagccuguacgugagcgcccugcugagcuaccugcuguacagcgacauccugcugaaguucagccccaccaagaucaucgcccccaccaccagccuggacagcgccaacgccagcaacuuccaggccgugaaccacagcgccaccaaggagaugaccuuccugcugcccgagcccgaguggaccuaccccagacugagcugccagggcagcaccuuccagaaggcccugcugaucagcccccacagauucggcgaggccaagggcaacagcgccccccugaucaucagagagcccuucaucgccugcggccccaaggagugcaagcacuucgcccugacccacuacgccgcccagcccggcggcuacuacaacggcaccagagaggacagaaacaagcugagacaccugaucagcgugaaccugggcaagauccccaccguggagaacagcaucuuccacauggccgccuggagcggcagcgccugccacgacggcagagaguggaccuacaucggcguggacggccccgacagcaacgcccugaucaagaucaaguacggcgaggccuacaccgacaccuaccacagcuacgccaacaacauccugagaacccaggagagcgccugcaacugcaucggcggcgacugcuaccugaugaucaccgacggcagcgccagcggcaucagcaagugcagauuccugaagaucagagagggcagaaucgugaaggagaucuuccccaccggcagaguggagcacaccgaggagugcaccugcggcuucgccagcaacaagaccaucgagugcgccugcagagacaacagcuacaccgccaagagacccuucgugaagcugaacguggagaccgacaccgccgagaucagacugaugugcaccgagaccuaccuggacacccccagacccgacgacggcagcaucaccggccccugcgagagcaacggcgacaagggcagcggcggcaucaagggcggcuucgugcaccagagaauggccagcaagaucggcagaugguacagcagaaccaugagcaagaccaagagaaugggcauggagcuguacgugaaguacgacggcgaccccuggaccgacagcgacgcccuggcccccagcggcgugauggugagcaucgaggagcccggcugguacagcuucggcuucgagaucaaggacaagaagugcgacgugcccugcaucggcaucgagauggugcacgacggcggcaagaccaccuggcacagcgccgccaccgccaucuacugccugaugggcagcggccagcugcugugggacaccaucaccggcguggacauggcccuguga

SEQ ID NO: 188726 - RNA, 1401 nt, Artificial Sequence; identical to SEQ ID NO: 188651
  derived and/or modified CDS sequence (opt4) from neuraminidase__InfluenzaB__ABL77193

SEQ ID NO: 188727 - RNA, 1401 nt, Artificial Sequence
  derived and/or modified CDS sequence (opt4) from neuraminidase__InfluenzaB__ABL77204
augcugcccagcaccauccagacccugacccuguuccugaccagcggcggcgugcugcugagccuguacgugagcgccagccugagcuaccugcuguacagcgacauccugcugaaguucagccccaccgagaucaccgcccccaccaugccccuggacugcgccaacgccagcaacgugcaggccgugaacagaagcgccaccaagggcgugacccugcugauccccgagcccgaguggaccuaccccagacugagcugccccggcagcaccuuccagaaggcccugcugaucagcccccacagauucggcgagaccaagggcaacagcgccccccugaucaucagagagcccuucaucgccugcggccccaaggagugcaagcacuucgcccugacccacuacgccgcccagcccggcggcuacuacaacggcaccagaggcgacagaaacaagcugagacaccugaucagcgugaagcugggcaagauccccaccguggagaacagcaucuuccacauggccgccuggagcggcagcgccugccacgacggcaaggaguggaccuacaucggcguggacggccccgacaacagcgcccugcugaagaucaaguacggcgaggccuacaccgacaccuaccacagcuacgccaacaacauccugagaacccaggagagcgccugcaacugcaucggcggcaacugcuaccugaugaucaccgacggcagcgccagcggcgugagcgagugcagauuccugaagaucagagagggcagaaucaucaaggagaucuuccccaccggcagagugaagcacaccgaggagugcaccugcggcuucgccagcaacaagaccaucgagugcgccugcagagacaacagcuacaccgccaagagacccuucgugaagcugaacguggagaccgacaccgccgagaucagacugaugugcaccgagaccuaccuggacacccccagacccgacgacggcagcaucaccggccccugcgagagcaacggcgacaagggcagcggcggcaucaagggcggcuucgugcaccagagaauggccagcaagaucggcagaugguacagcagaaccaugagcaagaccaagagaaugggcaugggccuguacgugaaguacgacggcgaccccugggccgacagcgacgcccuggcccugagcggcgugauggugagcauggaggagcccggcugguacagcuucggcuucgagaucaaggacaagaagugcgacgugcccugcaucggcaucgagauggugcacgacggcggcaaggagaccuggcacagcgccgccaccgccaucuacugccugaugggcagcggccagcugcugugggacaccgugaccggcguggacauggcccuguga

SEQ ID NO: 188728 - RNA, 1401 nt, Artificial Sequence
  derived and/or modified CDS sequence (opt4) from neuraminidase__InfluenzaB__ABL77215
augcugcccagcaccauccagacccugacccuguuccugaccagcggcggcgugcugcugagccuguacgugagcgccagccugagcuaccugcuguacagcgacauccugcugaaguuccccagcaccgagaucaccgcccccaccaugccccuggacugcgccaacgccagcaacgugcaggccgugaacagaagcgccaccaagggcgugacccugcugcugcccgagcccgaguggaccuaccccagacugagcugccccggcagcaccuuccagaaggcccugcugaucagcccccacagauucggcgagaccaagggcaacagcgccccccugaucaucagagagcccuucaucgccugcggccccaaggagugcaagcacuucgcccugacccacuacgccgcccagcccggcggcuacuacaacggcaccagaggcgacagaaacaagcugagacaccugaucagcgugaagcugggcaagauccccaccguggagaacagcaucuuccacauggccgccuggagcggcagcgccugccacgacggcaaggaguggaccuacaucggcguggacggccccgacaacaacgcccugcugaagaucaaguacggcgaggccuacaccgacaccuaccacagcuacgccaacaacauccugagaacccaggagagcgccugcaacugcaucggcggcaacugcuaccugaugaucaccgacggcagcgccagcggcgugagcgagugcagauuccugaagaucagagagggcagaaucaucaaggagaucuuccccaccggcagaaucaagcacaccgaggagugcaccugcggcuucgccagcaacaagaccaucgagugcgccugcagagacaacagcuacaccgccaagagacccuucgugaagcugaacguggagaccgacaccgccgagaucagacugaugugcaccgagaccuaccuggacacccccagacccgacgacggcagcaucaccggccccugcgagagcaacggcgacaagggcagcggcggcaucaagggcggcuucgugcaccagagaauggccagcaagaucggcagaugguacagcagaaccaugagcaagaccaagagaaugggcaugggccuguacgugaaguacgacggcgaccccugggccgacagcgacgcccuggccuucagcggcgugauggugagcauggaggagcccggcugguacagcuucggcuucgagaucaaggacaagaagugcgacgugcccugcaucggcaucgagauggugcacgacggcggcaaggagaccuggcacagcgccgccaccgccaucuacugccugaugggcagcggccagcugcugugggacaccgugaccggcgugaacauggcccuguga

SEQ ID NO: 188729 - RNA, 1401 nt, Artificial Sequence; identical to SEQ ID NO: 188687
  derived and/or modified CDS sequence (opt4) from neuraminidase__InfluenzaB__ABL77226

SEQ ID NO: 188730 - RNA, 1401 nt, Artificial Sequence
  derived and/or modified CDS sequence (opt4) from neuraminidase__InfluenzaB__ABL77237
augcugcccagcaccauccagacccugacccuguuccugaccagcggcggcgugcugcugagccuguacgugagcgccagccugagcuaccugcuguacagcgacauccugcugaaguucagccccaccgagaucaccgcccccaccaugccccuggacugcgccaacgccagcaacgugcaggccgugaacagaagcgccaccaagggcgugacccugcugcugcccgagcccgaguggaccuaccccagacugagcugccccggcagcaccuuccagaaggcccugcugaucagcccccacagauucggcgagaccaagggcaacagcgccccccugaucaucagagagcccuucaucgccugcggccccaacgagugcaagcacuucgcccugacccacuacgccgcccagcccggcggcuacuacaacggcaccagaggcgacagaaacaagcugagacaccugaucagcgugaagcugggcaagauccccaccguggagaacagcaucuuccacauggccgccuggagcggcagcgccugccacgacggcaaggaguggaccuacaucggcguggacggccccgacaacaacgcccugcugaagaucaaguacggcgaggccuacaccgacaccuaccacagcuacgccaacaacauccugagaacccaggagagcgccugcaacugcaucggcggcaacugcuaccugaugaucaccgacggcagcgccagcggcgugagcgagugcagauuccugaagaucagagagggcagaaucaucaaggagaucuuccccaccggcagagugaagcacaccgaggagugcaccugcggcuucgccagcaacaagaccaucgagugcgccugcagagacaacagcuacaccgccaagagacccuucgugaagcugaacguggagaccgacaccgccgagaucagacugaugugcaccgacaccuaccuggacacccccagacccgacgacggcagcaucaccggccccugcgagagcaacggcgacaagggcagcggcggcaucaagggcggcuucgugcaccagagaauggccagcaagaucggcagaugguacagcagaaccaugagcaagaccgagagaaugggcaugggccuguacgugaaguacgacggcgaccccugggccgacagcgacgcccuggccuucagcggcgugauggugagcaugaaggagcccggcugguacagcuucggcuucgagaucaaggacaagaagugcgacgugcccugcaucggcaucgagauggugcacgacggcggcaaggagaccuggcacagcgccgccaccgccaucuacugccugaugggcagcggccagcugcugugggacaccgugaccggcguggacauggcccuguga

SEQ ID NO: 188731 - RNA, 1401 nt, Artificial Sequence
  derived and/or modified CDS sequence (opt4) from neuraminidase__InfluenzaB__ABL77248
augcugcccagcaccauccagacccugacccuguuccugaccagcggcggcgugcugcugagccuguacgugagcgcccugcugagcuaccugcuguacagcgacauccugcugaaguucagccccaccaagaucaucgcccccaccaugagccuggacugcgccaacgccagcaacgugcaggccgccaaccacagcgccaccaaggagaugaccuuccugcugcccgagcccgaguggaccuaccccagacugagcugccagggcagcaccuuccagaaggcccugcugaucagcccccacagauucggcgaggccaagggcaacagcgccccccugaucaucagagagcccuucaucgccugcggccccaaggagugcaagcacuucgcccugacccacuacgccgcccagcccggcggcuacuacaacggcaccagagaggacagaaacaagcugagacaccugaucagcgugaaccugggcaagauccccaccguggagaacagcaucuuccacauggccgccuggagcggcagcgccugccacgacggcagagaguggaccuacaucggcguggacggccccgacagcaacgcccugaucaagaucaaguacggcgaggccuacaccgacaccuaccacagcuacgccaacaacauccugagaacccaggagagcgccugcaacugcaucggcggcgacugcuaccugaugaucaccgacggcagcgccagcggcaucagcaagugcagauuccugaagaucagagagggcagaaucaucaaggagaucuuccccaccggcagaguggagcacaccgaggagugcaccugcggcuucgccagcaacaagaccaucgagugcgccugcagagacaacagcuacaccgccaagagacccuucgugaagcugaacguggagaccgacaccgccgagaucagacugaugugcaccgagaccuaccuggacacccccagacccgacgacggcagcaucaccggccccugcgagagcaacggcgagaagggcagaggcggcaucaagggcggcuucgugcaccagagaauggccagcaagaucggcagaugguacagcagaaccaugagcaagaccgagagaaugggcauggagcuguacgugaaguacgacggcgaccccuggaccgacagcgacgcccuggcccccagcggcgugauggugagcaugaaggagcccggcugguacagcuucggcuucgagaucaaggacaagaagugcgacgugcccugcaucggcaucgagauggugcacgacggcggcaagaagaccuggcacagcgccgccaccgccaucuacugccugaugggcagcggccagcugcugugggacaccgugaccggcguggacauggcccuguga

SEQ ID NO: 188732 - RNA, 1401 nt, Artificial Sequence
  derived and/or modified CDS sequence (opt4) from neuraminidase__InfluenzaB__ABL77259
augcugcccagcaccauccagacccugacccuguuccugaccagcggcggcgugcugcugagccuguacgugagcgccagccugagcuaccugcuguacagcgacauccugcugaaguucagccccaccgagaucaccgcccccaaggugccccuggacugcgccaacgccagcaacgugcaggccgugaacagaagcgccaccaagggcaugacccugcugcugagcgagcccgaguggaccuaccccagacugagcugccagggcagcaccuuccagaaggcccugcugaucagcccccacagauucggcgagaccagaggcaacagcgccccccugaucaucagagagcccuucaucgccugcggccccaaggagugcaagcacuucgcccugacccacuacgccgcccagcccggcggcuacuacaacggcaccagagaggacagaaacaagcugagacaccugaucagcgugaagcugggcaagauccccaccguggagaacagcaucuuccacauggccgccuggagcggcagcgccugccacgacggcagagaguggaccuacaucggcguggacggccccgacagcaacgcccugaucaagaucaaguacggcgaggccuacaccgacaccuaccacagcuacgccaacaacauccugagaacccaggagagcgccugcaacugcaucggcggcgacugcuaccugaugaucaccgacggcagcgccagcggcaucagcaagugcagauuccugaagaucagagagggcagaaucaucaaggagaucuuccccaccggcagaguggagcacaccgaggagugcaccugcggcuucgccagcaacaagaccaucgagugcgccugcagagacaacagcuacaccgccaagagacccuucgugaagcugaacguggagaccgacaccgccgagaucagacugaugugcaccgagaccuaccuggacacccccagacccgacgacggcagcaucaccggccccugcgagagcaacggcgacaagggcagaggcggcaucaagggcggcuucgugcaccagagaauggccagcaagaucggcagaugguacagcagaaccaugagcaagaccgagagaaugggcauggagcuguacgugaaguacgacggcgaccccuggaccgacagcgacgcccuggcccccagcggcgugauggugagcaugaaggagcccggcugguacagcuucggcuucgagaucaaggacaagaagugcgacgugcccugcaucggcaucgagauggugcacgacggcggcaagaagaccuggcacagcgccgccaccgccaucuacugccugaugggcagcggccagcugcugugggacaccgugaccggcguggacauggcccuguga

SEQ ID NO: 188733 - RNA, 1401 nt, Artificial Sequence
  derived and/or modified CDS sequence (opt4) from neuraminidase__InfluenzaB__ABL77270
augcugcccagcaccauccagacccugacccuguuccugaccagcggcggcgugcugcugagccuguacgugagcgccagccugagcuaccugcuguacagcgacauccugcugaaguucagccccaccgagaucaccgcccccaccaugccccuggacugcgccaacgccagcaacgugcaggccgugaacagaagcgccaccaagggcaugacccugcugcugcccgagcccgaguggaccuaccccagacugagcugccccggcagcaccuuccagaaggcccugcugaucagcccccacagauucggcgagaccagaggcaacagcgccccccugaucaucagagagcccuucaucgccugcggccccaaggagugcaagcacuucgcccugacccacuacgccgcccagcccggcggcuacuacaacggcaccagagaggacagaaacaagcugagacaccugaucagcgugaagcugggcaagauccccaccguggagaacagcaucuuccacauggccgccuggagcggcagcgccugccacgacggcagagaguggaccuacaucggcguggacggccccgacagcaacgcccugaucaagaucaaguacggcgaggccuacaccgacaccuaccacagcuacgccaacaacauccugagaacccaggagagcgccugcaacugcaucggcggcgacugcuaccugaugaucaccgacggcagcgccagcggcaucagcaagugcagauuccugaagaucagagagggcagaaucaucaaggagaucuuccccaccggcagaguggagcacaccgaggagugcaccugcggcuucgccagcaacaagaccaucgagugcgccugcagagacaacagcuacaccgccaagagacccuucgugaagcugaacguggagaccgacaccgccgagaucagacugaugugcaccgagaccuaccuggacacccccagacccgacgacggcagcaucaccggccccugcgagagcaacggcgacaagggcagaggcggcaucaagggcggcuucgugcaccagagaauggccagcaagaucggcagaugguacagcagaaccaugagcaagaccgagagaaugggcauggagcuguacgugaaguacgacggcgaccccuggaccgacagcgaggcccuggcccccagcggcgugauggugagcauggaggagcccggcugguacagcuucggcuucgagaucaaggacaagaagugcgacgugcccugcaucggcaucgagauggugcacgacggcggcaagaagaccuggcacagcgccgccaccgccaucuacugccugaugggcagcggccagcugcugugggacaccgugaccggcguggacauggcccuguga

SEQ ID NO: 188734 - RNA, 1401 nt, Artificial Sequence
  derived and/or modified CDS sequence (opt4) from neuraminidase__InfluenzaB__ABL77281
augcugcccagcaccauccagacccugacccuguuccugaccagcggcggcgugcugcugagccuguacgugagcgugagccugagcuaccugcuguacagcgacauccugcugagauucagccccaccgagaucaccgcccccaccaugccccuggacugcgccaacgccagcaacgugcaggccgugaacagaagcgccaccaagggcaugacccugagacugcccgagcccgaguggaccuaccccagacugagcugccccggcagcaccuuccagaaggcccugcugaucagcccccacagauucggcgagaccagaggcaacagcgccccccugaucaucagagagcccuucaucgccugcggccccaaggagugcaagcacuucgcccugacccacuacgccgcccagcccggcggcuacuacaacggcaccagagaggacagaaacaagcugagacaccugaucagcgugaagcugggcaagauccccaccguggagaacagcaucuuccacauggccgccuggagcggcagcgccugccacgacggcagagaguggaccuacaucggcguggacggccccgacagcaacgcccugaucaagaucaaguacggcgaggccuacaccgacaccuaccacagcuacgccaacaacauccugagaacccaggagagcgccugcaacugcaucggcggcgacugcuaccugaugaucaccgacggcagcgccagcgagaucagcaagugcagauuccugaagaucagagagggcagaaucaucaaggagaucuuccccaccggcagaguggagcacaccgaggagugcaccugcggcuucgccagcaacaagaccaucgagugcgccugcagagacaacagcuacaccgccaagagacccuucgugaagcugaacguggagaccgacaccgccgagaucagacugaugugcaccgagaccuaccuggacacccccagacccgacgacggcagcaucaccggccccugcgagagcaacggcgacaagggcagaggcggcaucaagggcggcuucgugcaccagagaauggccagcaagaucggcagaugguacagcagaaccaugagcaagaccgagagaaugggcauggagcuguacgugaaguacgacggcgaccccuggaccgacagcgaggcccuggcccccagcggcgugauggugagcauggaggagcccggcugguacagcuucggcuucgagaucaaggacaagaagugcgacgugcccugcaucggcaucgagauggugcacgacggcggcaagaagaccuggcacagcgccgccaccgccaucuacugccugaugggcagcggccagcugcugugggacaccgugaccggcguggacauggcccuguga

SEQ ID NO: 188735 - RNA, 1401 nt, Artificial Sequence
  derived and/or modified CDS sequence (opt4) from neuraminidase__InfluenzaB__ABL77292
augcugcccagcaccauccagacccugacccuguuccugaccagcggcggcgugcugcugagccuguacgugagcgccagccugagcuaccugcuguacagcggcgugcugcugaaguucagccccaccgagaucaccgcccccaccaugccccuggacugcgccaacgccagcaacgugcaggccgugaacagaagcgccaccaagggcgugacccugcugcugcccgagcccgaguggaccuaccccagacugagcugccccggcagcaccuuccagaaggcccugcugaucagcccccacagauucggcgagaccagaggcaacagcgccccccugaucaucagagagcccuucaucgccugcggccccaaggagugcaagcacuucgcccugacccacuacgccgcccagcccggcggcuacuacaacggcaccagagaggacagaaacaagaugagacaccugaucagcgugaagcugggcaagauccccaccguggagaacagcaucuuccacauggccgccuggagcggcagcgccugccacgacggcagagaguggaccuacaucggcguggacggccccgacagcaacgcccugaucaagaucaaguacggcgaggccuacaccgacaccuaccacagcuacgccaacaacauccugagaacccaggagagcgccugcaacugcaucggcggcgacugcuaccugaugaucaccgacggcagcgccagcggcaucagcaagugcagauuccugaagaucagagagggcagaaucaucaaggagaucuuccccaccggcagaguggagcacaccgaggagugcaccugcggcuucgccagcaacaagaccaucgagugcgccugcagagacaacagcuacaccgccaagagacccuucgugaagcugaacguggagaccgacaccgccgagaucagacugaugugcaccgagaccuaccuggacacccccagacccgacgacggcagcaucaccggccccugcgagagcaacggcgacaagggccugggcggcaucaagggcggcuucgugcaccagagaauggccagcaagaucggcagaugguacagcagaaccaugagcaagaccgagagaaugggcauggagcuguacgugaaguacgacggcgaccccuggaccgacagcgacgcccuggcccugagcggcgugauggugagcauggaggagcccggcugguacagcuucggcuucgagaucaaggacaagaagugcgacgugcccugcaucggcaucgagauggugcacgacggcggcaagaagaccuggcacagcgccgccaccgccaucuacugccugaugggcagcggccagcugcugugggacaccgugaccggcguggacauggcccuguga

SEQ ID NO: 188736 - RNA, 1398 nt, Artificial Sequence
  derived and/or modified CDS sequence (opt4) from neuraminidase__InfluenzaB__ABL77303
augcugcccagcaccauccagacccugacccuguuccugaccagcggcggcgugcugcugagccuguacgugagcgcccugcugagcuaccugcuguacagcgacauccugcugaaguucagccccaagaucaucgcccccaccaucagccuggacugcgccaacgccagcaacgugcaggccgugaaccacagcgccaccaaggagaugaccuuccugcugcccgagcccgaguggaccuaccccagacugagcugccagggcagcaucuuccagaaggcccugcugaucagcccccacagauucggcgaggccaagggcaacagcgccccccugaucaucagagagcccuucaucgccugcggccccaaggagugcaagcacuucgcccugacccacuacgccgcccagcccggcggcuacuacaacggcaccagagaggacagaaacaagcugagacaccugaucagcgugaaccugggcaagauccccaccguggagaacagcaucuuccacauggccgccuggagcggcagcgccugccacgacggcagagaguggaccuacaucggcguggacggccccgacagcaacgcccugaucaagaucaaguacggcgaggccuacaccgacaccuaccacagcuacgccaacaacauccugagaacccaggagagcgccugcaacugcaucggcggcgacugcuaccugaugaucaccgacggcagcgccagcggcaucagcaagugcagauuccugaagaucagagagggcagaaucaucaaggagaucuuccccaccggcagaguggagcacaccgaggagugcaccugcggcuucgccagcaacaagaccaucgagugcgccugcagagacaacagcuacaccgccaagagacccuucgugaagcugaacguggagaccgacaccgccgagaucagacugaugugcaccgagaccuaccuggacacccccagacccgacgacggcagcaucaccggccccugcgagagcaacggcgacaagggcagaggcggcgugaagggcggcuucgugcaccagagaaucgccagcaagaucggcagaugguacagcagaaccaugagcaagaccgagagaaugggcauggagcuguacgugaaguacgacggcgaccccuggaccgacagcgacgcccuggcccccagcggcgugauggugagcauggaggagcccggcugguacagcuucggcuucgagaucaaggacaagaagugcgacgugcccugcaucggcaucgagauggugcacgacggcggcaagaagaccuggcacagcgccgccaccgccaucuacugccugaugggcagcggccagcugcugugggacaccgugaccggcguggacauggcccuguga

SEQ ID NO: 188737 - RNA, 1398 nt, Artificial Sequence
  derived and/or modified CDS sequence (opt4) from neuraminidase__InfluenzaB__ABL77314
augcugcccagcaccauccagacccugacccuguuccugaccagcggcggcgugcugcugagccuguacgugagcgcccugcugagcuaccugcuguacagcgacgugcugcugaaguucagccccaagaucaucgcccccaccaugagccuggacugcgccaacgccagcaacgugcaggccgugaaccacagcgccaccgaggagaugaccuuccugcugcccgagcccgaguggaccuaccccagacugagcugccagggcagcaccuuccagaaggcccugcugaucagcccccacagauucggcgaggccaagggcaacagcgccccccugaucaucagagagcccuucaucgccugcggccccaaggagugcaagcacuucgcccugacccacuacgccgcccagcccggcggcuacuacaacggcaccagagaggacagaaacaagcugagacaccugaucagcgugaaccugggcaagauccccaccguggagaacagcaucuuccacauggccgccuggagcggcagcgccugccacgacggcagagaguggaccuacaucggcguggacggccccgacagcaacgcccugaucaagaucaaguacggcgaggccuacaccgacaccuaccacagcuacgccaacaacauccugagaacccaggagagcgccugcaacugcaucggcggcgacugcuaccugaugaucaccgacggcagcgccagcggcaucagcaagugcagauuccugaagaucagagagggcagaaucaucaaggagaucuuccccaccggcagaguggagcacaccgaggagugcaccugcggcuucgccagcaacaagaccaucgagugcgccugcagagacaacagcuacaccgccaagagacccuucgugaagcugaacguggagaccgacaccgccgagaucagacugaugugcaccgagaccuaccuggacacccccagacccgacgacggcagcaucaccggccccugcgagagcaacggcgacaagggccacggcggcaucaagggcggcuucgugcaccagagaauggccagcaagaucggcagaugguacagcagaaccaugagcaagaccaagagaaugggcauggagcuguacgugaaguacgacggcgaccccuggaccgacagcgacgcccuggcccccagcggcgugauggugagcauggaggagcccggcugguacagcuucggcuucgagaucagagacaagaagugcgacgugcccugcaucggcaucgagauggugcacgacggcggcaagaagaccuggcacagcgccgccaccgccaucuacugccugaugggcagcggccagcugcugugggacaccgugaccggcguggacauggcccuguga

SEQ ID NO: 188738 - RNA, 1401 nt, Artificial Sequence
  derived and/or modified CDS sequence (opt4) from neuraminidase__InfluenzaB__ABL77325
augcugcccagcaccauccagacccugacccuguuccugaccagcggcggcgugcugcugagccuguacgugagcgcccugcugagcuacagccuguacagcgacauccugcugaaguucagccccaccaagaccaucgcccccaccaugagccuggacugcgccaacgccagcaacgugcaggccgugaaccacagcgccaccaagggcaugacccugcugcugcccgagcccgaguggaccuaccccagacugagcugccagggcagcaccuuccagaaggcccugcugaucagcccccacagauucggcgagaccaagggcaacagcgccccccugaucaucagagagcccuucaucgccugcggccccaaggagugcaagcacuucgcccugacccacuacgccgcccagcccggcggcuacuacaacggcaccagagaggacagaaacaagcugagacaccugaucagcgugagccugggcaagauccccaccguggagaacagcaucuuccacauggccgccuggagcggcagcgccugccacgacggcagagaguggaccuacaucggcguggacggccccgacagcaacgcccugaucaagaucaaguacggcgaggccuacaccgacaccuaccacagcuacgccaacaacauccugagaacccaggagagcgccugcaacugcaucggcggcgacugcuaccugaugaucaccgacggcagcgccagcggcaucagcaagugcagauuccugaagaucagagagggcagaaucaucaaggagaucuuccccaccggcagaguggaccacaccgaggagugcaccugcggcuucgccagcaacaagaccaucgagugcgccugcagagacaacagcuacaccgccaagagacccuucgugaagcugaacguggagaccgacaccgccgagaucagacugaugugcaccgagaccuaccuggacacccccagacccgacgacggcagcaucaccggccccugcgagagcaacggcgacaagggcagaggcggcaucaagggcggcuucgugcaccagagaauggccagcaagaucggcagaugguacagcagaaccaugagcaagaccgagagacugggcauggagcuguacgugaaguacgacggcgaccccuggaccgacagcgacgcccuggcccccagcggcgugauggugagcgccgaggagcccggcugguacagcuucggcuucgagaucaaggacaagaagugcgacgugcccugcaucggcaucgagauggugcacgacggcggcaagaagaccuggcacagcgccgccaccgccaucuacugccugaugggcagcggccagcugcugugggacaccgugaccggcguggacauggcccuguga

SEQ ID NO: 188739 - RNA, 1401 nt, Artificial Sequence
  derived and/or modified CDS sequence (opt4) from neuraminidase__InfluenzaB__ABL77336
augcugcccagcaccauccagacccugacccuguuccugaccagcggcggcgugcugcugagccuguacgugagcgccagccugagcuaccugcuguacagcgacauccugcugaaguucagccccaccgagaucaccgccccccccaugccccuggacugcgccaacgccagcaacgugcaggccgugaacagaagcgccaccaagggcgugacccugcugcugcccgagcccgaguggaccuaccccagacugagcugccccggcagcaccuuccagaaggcccugcugaucagcccccacagauucggcgagaccagaggcaacagcgccccccugaucaucagagagcccuucaucgccugcggccccaaggagugcaagcacuucgccaucacccacuacgccgcccagcccggcggcuacuacaacggcaccagagaggacagaaacaagcugagacaccugaucagcgugaagcugggcaagauccccaccguggagaacagcaucuuccacauggccgccuggagcggcagcgccugccacgacggcagagaguggaccuacaucggcguggacggccccgacagcaacgcccugcugaagaucaaguacggcgaggccuacaccgacaccuaccacagcuacgccaacaacauccugagaacccaggagagcgccugcaacugcaucggcggcgacugcuaccugaugaucaccgacggcagcgccagcggcaucagcaagugcagauuccugaagaucagagagggcagaaucaucaaggagaucuuccccaccggcagaguggagcacaccgaggagugcaccugcggcuucgccagcaacaagaccaucgagugcgccugcagagacaacagcuacaccgccaagagacccuucgugaagcugaacguggagaccgacaccgccgagaucagacugaugugcaccgagaccuaccuggacacccccagacccgacgacggcagcaucaccggccccugcgagagcaacggcgacaagggcagaggcggcaucaagggcggcuucgugcaccagagaauggccagcaagaucggcagaugguacagcagaaccaugagcaagaccgacagaaugggcauggagcuguacgugaaguacgacggcgaccccuggaccgacagcgacgcccuggcccugagcggcgugauggugagcauggaggagcccggcugguacagcuucggcuucgagaucaaggacaagaagugcgacgugcccugcaucggcaucgagauggugcacgacggcggcaagaagaccuggcacagcgccgccaccaccaucuacugccugaugggcagcggccagcugcugugggacaccgugaccggcguggacauggcccuguga

SEQ ID NO: 188740 - RNA, 1401 nt, Artificial Sequence
  derived and/or modified CDS sequence (opt4) from neuraminidase__InfluenzaB__ABL77347
augcugcccagcaccauccagacccugacccuguuccugaccagcggcggcgugcugcugagccuguacgugagcgccagccugagcuaccugcuguacagcgacauccugcugaaguucagccccaccaagaucaccgcccccaccaugccccuggacugcgccaacgccagcaacgugcaggccgugaaccacagcgccaccaagggcgugacccugcugcugcccgagcccgaguggaccuaccccagacugagcugccccggcagcaccuuccagaaggcccugcugaucagcccccacagauucggcgagaccagaggcaacagcgccccccugaucaucagagagcccuucaucgccugcggccccaaggagugcaagcacuucgcccugacccacuacgccgcccagcccggcggcuacuacaacggcaccagagaggacagaaacaagcugagacaccugaucagcgugaagcugggcaagauccccaccguggagaacagcaucuuccacauggccgccuggagcggcagcgccugccacgacggcagagaguggaccuacaucggcguggacggccccgacagcaacgcccugcugaagaucaaguacggcgaggccuacaccgacaccuaccacagcuacgccaacaacauccugagaacccaggagagcgccugcaacugcaucggcggcgacugcuaccugaugaucaccgacggcagcgccagcggcaucagcgagugcagauuccugaagaucagagagggcagaaucaucaaggagaucuuccccaccggcagaguggagcacaccgaggagugcaccugcggcuucgccagcaacaagaccaucgagugcgccugcagagacaacagcuacaccgccaagagacccuucgugaagcugaacguggagaccgacaccgccgagaucagacugaugugcaccgagaccuaccuggacacccccagacccgacgacggcagcaucaccggccccugcgagagcaacggcgacaagggcagcggcggcaucaagggcggcuucgugcaccagagaauggccagcaagaucggcagaugguacagcagaaccaugagcaagaccaagagaaugggcaugggccuguacgugaaguacgacggcgaccccuggaccgacagcgacgcccuggcccugagcggcgugauggugagcauggaggagcccggcugguacagcuucggcuucgagaucaaggacaagaagugcgacgugcccugcaucggcaucgagauggugcacgacggcggcaagaagaccuggcacagcgccgccaccgccaucuacugccugaugggcagcggccagcugcugugggacaccgugaccggcguggacauggcccuguga

SEQ ID NO: 188741 - RNA, 1398 nt, Artificial Sequence
  derived and/or modified CDS sequence (opt4) from neuraminidase__InfluenzaB__ABL77380
augcugcccagcaccauccagacccugacccuguuccugaccagcggcggcgugcugcugagccuguacgugagcgcccugcugagcuaccugcuguacagcgacauccugcugaaguucagccccaagaucaucgcccccaccaccagccuggacugcgccaacgccagcaacgugcaggccgugaaccacagcgccaccaaggagaugaaguuccugccccccgagcccgaguggaccuaccccagacugagcugccagggcagcaccuuccagaaggcccugcugaucagcccccacagauucggcgaggccaagggcaacagcgccccccugaucaucagagagcccuucaucgccugcggccccaaggagugcaagcacuucgcccugacccacuacgccgcccagcccggcggcuacuacaacggcaccagagaggacagaaacaagcugagacaccugaucagcgugaaccugggcaagauccccaccguggagaacagcaucuuccacauggccgccuggagcggcagcgccugccacgacggcagagaguggaccuacaucggcguggacggccccgacagcaacgcccugaucaagaucaaguacggcgaggccuacaccgacaccuaccacagcuacgccaacaacauccugagaacccaggagagcgccugcaacugcaucggcggcgacugcuaccugaugaucaccgacggcagcgccagcggcaucagcaagugcagauuccugaagaucagagagggcagaaucaucaaggagaucuuccccaccggcagaguggagcacaccgaggagugcaccugcggcuucgccagcaacaagaccaucgagugcgccugcagagacaacagcuacaccgccaagagacccuucgugaagcugaacguggagaccgacaccgccgagaucagacugaugugcaccgagaccuaccuggacacccccagacccgacgacggcagcaucaccggccccugcgagagcaacggcgacaagggcagcggcggcgugaagggcggcuucgugcaccagagaauggccagcaagaucggcagaugguacagcagaaccaugagcaagaccaagagaaugggcauggagcuguacgugaaguacgacggcgaccccuggaccgacagcgacgcccuggcccccagcggcgugauggugagcauggaggagcccggcugguacagcuucggcuucgagaucaaggacaagaagugcgacgugcccugcaucggcaucgagauggugcacgacggcggcaagagaaccuggcacagcgccgccaccgccaucuacugccugaugggcagcggccagcugcugugggacaccgugaccggcgugaacauggcccuguga

SEQ ID NO: 188742 - RNA, 1401 nt, Artificial Sequence
  derived and/or modified CDS sequence (opt4) from neuraminidase__InfluenzaB__ABL77391
augcugcccagcaccauccagacccugacccuguuccugaccagcggcggcgugcugcugagccuguacgugagcgccagccugagcuaccugcuguacagcgacauccugcugaaguucagccccaccgagaucaccgcccccaccaugccccuggacugcgccaacgccagcaacgugcaggccgugaacagaagcgccaccaagggcgugacccugcugcugcccgagcccgaguggaccuaccccagacugagcugccccggcagcaccuuccagaaggcccugcugaucagcccccacagauucggcgagaccaagggcaacagcgccccccugaucaucagagagcccuucaucgccugcggccccaaggagugcaagcacuucgcccugacccacuacgccgcccagcccggcggcuacuacaacggcaccagaggcgacagaaacaagcugagacaccugaucagcgugaagcugggcaagauccccaccguggagaacagcaucuuccacauggccgccuggagcggcagcgccugccacgacggcaaggaguggaccuacaucggcguggacggccccgacaacaacgcccugcugaagaucaaguacggcgaggccuacaccgacaccuaccacagcuacgccaacaacauccugagaacccaggagagcgccugcaacugcaucggcggcaacugcuaccugaugaucaccgacggcagcgccagcggcgugagcgagugcagauuccugaagaucagagagggcagaaucaucaaggagaucuuccccaccggcagagugaagcacaccgaggagugcaccugcggcuucgccagcaacaagaccaucgagugcgccugcagagacaacagcuacaccgccaagagacccuucgugaagcugaacguggagaccgacaccgccgagaucagacugaugugcaccgagaccuaccuggacacccccagacccgacgacggcagcaucaccggccccugcgagagcaacggcgacaagggcagcggcggcaucaagggcggcuucgugcaccagagaauggccagcaagaucggcagaugguacagcagaaccaugagcaagaccaagagaaugggcaugggccuguacgugaaguacgacggcgaccccugggccgacagcgacgcccuggcccugagcggcgugauggugagcauggaggagcccggcugguacagcuucggcuucgagaucaaggacaagaagugcgacgugcccugcaucggcaucgagauggugcacgacggcggcaaggagaccuggcacagcgccgccaccgccaucuacugccugaugggcagcggccagcugcugugggacaccgugaccggcguggacauggcccuguga

SEQ ID NO: 188743 - RNA, 1401 nt, Artificial Sequence
  derived and/or modified CDS sequence (opt4) from neuraminidase__InfluenzaB__ABL84344
augcugcccagcaccauccagacccugacccuguuccugaccagcggcggcgugcugcugagccuguacgugagcgccagccugagcuaccugcuguacagcgacauccugcugaaguucagcagcaccgagaucaccgcccccaccaugccccugaacugcgccaacgccagcaacgugcaggccgugaaccacagcgccaccaagggcgugacccugccccugcccgagcccgaguggaccuaccccagacugagcugccccggcagcaccuuccagaaggcccugcugaucagcccccacagauucggcgagaccaagggcaacagcgccccccugaucaucagagagcccuucaucgccugcggccccaaggagugcaagcacuucgcccugacccacuacgccgcccagcccggcggcuacuacaacggcaccagagaggacagaaacaagcugagacaccugaucagcgugaagcugggcaagauccccaccguggagaacagcaucuuccacauggccgccuggagcggcagcgccugccacgacggcagagaguggaccuacaucggcguggacggccccgacagcaacgcccugcugaagaucaaguacggcgaggccuacaccgacaccuaccacagcuacgccaacaacauccugagaacccaggagagcgccugcaacugcaucggcggcgacugcuaccugaugaucaccgacggcagcgccagcggcgugagcgagugcagauuccugaagaucagagagggcagaaucaucaaggagaucuuccccaccggcagaguggagcacaccgaggagugcaccugcggcuucgccagcaacaagaccaucgagugcgccugcagagacaacagcuacaccgccaagagacccuucgugaagcugaacguggagaccgacaccgccgagaucagacugaugugcaccgagaccuaccuggacacccccagacccgacgacggcagcaucaccggccccugcgagagcaacggcgacaagggcagcggcggcaucaagggcggcuucgugcaccagagaauggccagcaagaucggcagaugguacagcagaaccaugagcaagaccaagagaaugggcaugggccuguacgugaaguacgacggcgaccccuggaucgacagcgacgcccugacccugagcggcgugauggugagcauggaggagcccggcugguacagcuucggcuucgagaucaaggacaagaagugcgacgugcccugcaucggcaucgagauggugcacgacggcggcaaggagaccuggcacagcgccgccaccgccaucuacugccugaugggcagcggccagcugcugugggacaccgugaccggcguggacauggcccuguga

SEQ ID NO: 188744 - RNA, 1401 nt, Artificial Sequence
  derived and/or modified CDS sequence (opt4) from neuraminidase__InfluenzaB__ABN50397
augcugcccagcaccauccagacccugacccuguuccugaccagcggcggcgugcugcugagccuguacgugagcgccagccugagcuaccugcuguacagcgacauccugcugaaguucagccccaccgagaucaccgcccccaccaugccccugaacugcgccaacgccagcaacgugcaggccgugaacagaagcgccaccaagggcgugacccugcugcugcccgagcccgaguggaccuaccccagacugagcugccccggcagcaccuuccagaaggcccugcugaucagcccccacagauucggcgagaccaagggcaacagcgccccccugaucaucagagagcccuucaucgccugcggccccaaggagugcaagcacuucgcccugacccacuacgccgcccagcccggcggcuacuacaacggcaccagagaggacagaaacaagcugagacaccugaucagcgugaagcugggcaagauccccaccguggagaacagcaucuuccacauggccgccuggagcggcagcgccugccacgacggcagagaguggaccuacaucggcguggacggccccgacagcaacgcccugcugaagaucaaguacggcgaggccuacaccgacaccuaccacagcuacgccaacaacauccugagaacccaggagagcgccugcaacugcaucggcggcgacugcuaccugaugaucaccgacggcagcgccagcggcaucagcgagugcagauuccugaagaucagagagggcagaaucaucaaggagaucuuccccaccggcagaguggagcacaccgaggagugcaccugcggcuucgccagcaacaagaccaucgagugcgccugcagagacaacagcuacaccgccaagagacccuucgugaagcugaacguggagaccgacaccgccgagaucagacugaugugcaccgagaccuaccuggacacccccagacccgacgacggcagcaucaccggccccugcgagagcaacggcgacaagggcagcggcggcaucaagggcggcuucgugcaccagagaauggccagcaagaucggcagaugguacagcagaaccaugagcaagaccaagagaaugggcaugggccuguacgugaaguacgacggcgaccccuggaucgacagcgacgcccugacccugagcggcgugauggugagcauggaggagcccggcugguacagcuucggcuucgagaucaaggacaagaagugcgacgugcccugcaucggcaucgagauggugcacgacggcggcaagaagaccuggcacagcgccgccaccgccaucuacugccugaugggcagcggccagcugcugugggacaccgugaccggcguggacauggaccuguga

SEQ ID NO: 188745 - RNA, 1401 nt, Artificial Sequence
  derived and/or modified CDS sequence (opt4) from neuraminidase__InfluenzaB__ABN50408
augcugcccagcaccauccagacccugacccuguuccugaccagcggcggcgugcugcugagccuguacgugagcgccagccugagcuaccugcuguacagcgacauccugcugaaguucagccccaccgagaucaccgcccccaccaugccccugaacugcgccaacgccagcaacgugcaggccgugaacagaagcgccaccaagggcgugacccugccccugcccgagcccgaguggaccuaccccagacugagcugccccggcagcaccuuccagaaggcccugcugaucagcccccacagauucggcgagaccaagggcaacagcgccccccugaucaucagagagcccuucaucgccugcggccccaaggagugcaagcacuucgcccugacccacuacgccgcccagcccggcggcuacuacaacggcaccagagaggacagaaacaagcugagacaccugaucagcgugaagcugggcaagauccccaccguggagaacagcaucuuccacauggccgccuggagcggcagcgccugccacgacggcagagaguggaccuacaucggcguggacggccccgacagcaacgcccugcugaagaucaaguacggcgaggccuacaccgacaccuaccacagcuacgccaacaacauccugagaacccaggagagcgccugcaacugcaucggcggcgacugcuaccugaugaucaccgacggcagcgccagcggcaucagcgagugcagauuccugaagaucagagagggcagaaucaucaaggagaucuuccccaccggcagaguggagcacaccgaggagugcaccugcggcuucgccagcaacaagaccaucgagugcgccugcagagacaacagcuacaccgccaagagacccuucgugaagcugaacguggagaccgacaccgccgagaucagacugaugugcaccgagaccuaccuggacacccccagacccgacgacggcagcaucaccggccccugcgagagcaacggcgacaagggcagcggcggcaucaagggcggcuucgugcaccagagaauggccagcaagaucggcagaugguacagcagaaccaugagcaagaccaagagaaugggcaugggccuguacgugaaguacgacggcgaccccuggaucgacagcgacgcccugacccugagcggcgugauggugagcauggaggagcccggcugguacagcuucggcuucgagaucaaggacaagaagugcgacgugcccugcaucggcaucgagauggugcacgacggcggcaagaagaccuggcacagcgccgccaccgccaucuacugccugaugggcagcggccagcugcugugggacaccgugaccggcguggacauggcccuguga

SEQ ID NO: 188746 - RNA, 1401 nt, Artificial Sequence
  derived and/or modified CDS sequence (opt4) from neuraminidase__InfluenzaB__ABN50419
augcugcccagcaccauccagacccugacccuguuccugaccagcggcggcgugcugcugagccuguacgugagcgccagccugagcuaccugcuguacagcgacauccugcugaaguucagccccaccgagaucaccgcccccaccaugccccuggacugcgccaacgccagcaacgugcaggccgugaacagaagcgccaccaagggcgugacccugcugcugcccgagcccgaguggaccuaccccagacugagcugccccggcagcaccuuccagaaggcccugcugaucagcccccacagauucggcgagaccaagggcaacagcgccccccugaucaucagagagcccuucaucgccugcggccccaaggagugcaagcacuucgcccugacccacuacgccgcccagcccggcggcuacuacaacggcaccagaggcgacagaaacaagcugagacaccugaucagcgugaagcugggcaagauccccaccguggagaacagcaucuuccacauggccgccuggagcggcagcgccugccacgacggcaaggaguggaccuacaucggcguggacggccccgacagcaacgcccugcugaagaucaaguacggcgaggccuacaccgacaccuaccacagcuacgccaacaacauccugagaacccaggagagcgccugcaacugcaucggcggcaacugcuaccugaugaucaccgacggcagcgccagcggcaucagcgagugcagauuccugaagaucagagagggcagaaucaucaaggagaucuuccccaccggcagagugaagcacaccgaggagugcaccugcggcuucgccagcaacaagaccaucgagugcgccugcagagacaacagcuacaccgccaagagacccuucgugaagcugaacguggagaccgacaccgccgagaucagacugaugugcaccgagaccuaccuggacacccccagacccgacgacggcagcaucaccggccugugcgagagcaacggcgacaagggcagcggcggcaucaagggcggcuucgugcaccagagaauggccagcaagaucggcagaugguacagcagaaccaugagcaagaccaagagaaugggcaugggccuguacgugaaguacgacggcgaccccuggaccgacagcgacgcccuggcccugagcggcgugauggugagcauggaggagcccggcugguacagcuucggcuucgagaucaaggacaagaagugcgacgugcccugcaucggcaucgagauggugcacgacggcggcaaggagaccuggcacagcgccgccaccgccaucuacugccugaugggcagcggccagcugcugugggacaccgugaccggcguggacauggcccuguga

SEQ ID NO: 188747 - RNA, 1401 nt, Artificial Sequence
  derived and/or modified CDS sequence (opt4) from neuraminidase__InfluenzaB__ABN50430
augcugcccagcaccauccagacccugacccuguuccugaccagcggcggcgugcugcugagccuguacgugagcgccagccugagcuaccugcuguacagcgacauccugcugaaguucagccccaccgagaucaccgcccccaccaugccccuggacugcgccaacgccagcaacgugcaggccgugaacagaagcgccaccaagggcgugacccugcugcugcccgagcccgaguggaccuaccccagacugagcugccccggcagcaccuuccagaaggcccugcugaucagcccccacagauucggcgagaccaagggcaacagcgccccccugaucaucagagagcccuucaucgccugcggccccaaggagugcaagcacuucgcccugacccacuacgccgcccagcccggcggcuacuacaacggcaccagaggcgacagaaacaagcugagacaccugaucagcgugaagcugggcaagauccccaccguggagaacagcaucuuccacauggccgccuggagcggcagcgccugccacgacggcaaggaguggaccuacaucggcguggacggccccgacagcaacgcccugcugaagaucaaguacggcgaggccuacaccgacaccuaccacagcuacgccaacaacauccugagaacccaggagagcgccugcaacugcaucggcggcaacugcuaccugaugaucaccgacggcagcgccagcggcaucagcgagugcagauuccugaagaucagagagggcagaaucaucaaggagaucuuccccaccggcagagugaagcacaccgaggagugcaccugcggcuucgccagcaacaagaccaucgagugcgccugcagagacaacagcuacaccgccaagagacccuucgugaagcugaacguggagaccgacaccgccgagaucagacugaugugcaccgagaccuaccuggacacccccagacccgacgacggcagcaucaccggccccugcgagagcaacggcgacaagggcagcggcggcaucaagggcggcuucgugcaccagagaauggccagcaagaucggcagaugguacagcagaaccaugagcaagaccaagagaaugggcaugggccuguacgugaaguacgacggcgaccccuggaccgacagcgacgcccuggcccugagcggcgugauggugagcauggaggagcccggcugguacagcuucggcuucgagaucaaggacaagaagugcgacgugcccugcaucggcaucgagauggugcacgacggcggcaaggagaccuggcacagcgccgccaccgccaucuacugccugaugggcagcggccagcugcugugggacaccgugaccggcguggacauggcccuguga

SEQ ID NO: 188748 - RNA, 1401 nt, Artificial Sequence; identical to SEQ ID NO: 188730
  derived and/or modified CDS sequence (opt4) from neuraminidase__InfluenzaB__ABN50463

SEQ ID NO: 188749 - RNA, 1401 nt, Artificial Sequence; identical to SEQ ID NO: 188644
  derived and/or modified CDS sequence (opt4) from neuraminidase__InfluenzaB__ABN50474

SEQ ID NO: 188750 - RNA, 1401 nt, Artificial Sequence
  derived and/or modified CDS sequence (opt4) from neuraminidase__InfluenzaB__ABN50485
augcugcccagcaccauccagacccugacccuguuccugaccagcggcggcgugcugcugagccuguacgugagcgccagccugagcuaccugcuguacagcgacauccugcugaaguucagccccaccgagaucaccgcccccaccaugccccuggacugcgccaacgccagcaacgugcaggccgugaacagaagcgccaccaagggcgugacccugcugcugcccgagcccgaguggaccuaccccagacugagcugccccggcagcaccuuccagaaggcccugcugaucagcccccacagauucggcgagaccaagggcaacagcgccccccugaucaucagagagcccuucaucgccugcggccccaaggagugcaagcacuucgcccugacccacuacgccgcccagcccggcggcuacuacaacggcaccagaggcgacagaaacaagcugagacaccugaucagcgugaagcugggcaagauccccaccguggagaacagcaucuuccacauggccgccuggagcggcagcgccugccacgacggcaaggaguggaccuacaucggcguggacggccccgacagcaacgcccugcugaagaucaaguacggcgaggccuacaccgacaccuaccacagcuacgccaacaacauccugagaacccaggagagcgccugcaacugcaucggcggcaacugcuaccugaugaucaccgacggcagcgccagcggcaucagcgagugcagauuccugaagaucagagagggcagaaucaucaaggagaucuuccccaccggcagagugaagcacaccgaggagugcaccugcggcuucgccagcaacaagaccaucgagugcgccugcagagacaacagcuacaccgccaagagacccuucgugaagcugaacguggagaccgacaccgccgagaucagacugaugugcaccgagaccuaccuggacacccccagacccgacgacggcagcaucaccggccccugcgaguucaacggcgacaagggcagcggcggcaucaagggcggcuucgugcaccagagaauggccagcaagaucggcagaugguacagcagaaccaugagcaagaccaagagaaugggcaugggccuguacgugaaguacgacggcgaccccuggaccgacagcgacgcccuggcccugagcggcgugauggugagcauggaggagcccggcugguacagcuucggcuucgagaucaaggacaagaagugcgacgugcccugcaucggcaucgagauggugcacgacggcggcaaggagaccuggcacagcgccgccaccgccaucuacugccugaugggcagcggccagcugcugugggacaccgugaccggcguggacauggcccuguga

SEQ ID NO: 188751 - RNA, 1401 nt, Artificial Sequence
  derived and/or modified CDS sequence (opt4) from neuraminidase__InfluenzaB__ABN50496
augcugcccagcaccauccagacccugacccuguuccugaccagcggcggcgugcugcugagccuguacgugagcgccagccugagcuaccugcuguacagcgacauccugcugaaguuccccagcaccgagaucaccgcccccaccaugccccuggacugcgccaacgccagcaacgugcaggccgugaacagaagcgccaccaagagagugacccugcugcugcccgagcccgaguggaccuaccccagacugagcugccccggcagcaccuuccagaaggcccugcugaucagcccccacagauucggcgagaccaagggcaacagcgccccccugaucaucagagagcccuucaucgccugcggccccaaggagugcaagcacuucgcccugacccacuacgccgcccagcccggcggcuacuacaacggcaccagaggcgacagaaacaagcugagacaccugaucagcgugaagcugggcaagauccccaccguggagaacagcaucuuccacauggccgccuggagcggcagcgccugccacgacggcaaggaguggaccuacaucggcguggacggccccgacaacaacgcccugcugaagaucaaguacggcgaggccuacaccgacaccuaccacagcuacgccaacaacauccugagaacccaggagagcgccugcaacugcaucggcggcaacugcuaccugaugaucaccgacggcagcgccagcggcgugagcgagugcagauuccugaagaucagagagggcagaaucaucaaggagaucuuccccaccggcagaaucaagcacaccgaggagugcaccugcggcuucgccagcaacaagaccaucgagugcgccugcagagacaacagcuacaccgccaagagacccuucgugaagcugaacguggagaccgacaccgccgagaucagacugaugugcaccgagaccuaccuggacacccccagacccgacgacggcagcaucaccggccccugcgagagcaacggcgacaagggcagcggcggcaucaagggcggcuucgugcaccagagaauggccagcaagaucggcagaugguacagcagaaccaugagcaagaccaagagaaugggcaugggccuguacgugaaguacgacggcgaccccugggccgacagcgacgcccuggccuucagcggcgugauggugagcauggaggagcccggcugguacagcuucggcuucgagaucaaggacaagaagugcgacgugcccugcaucggcaucgagauggugcacgacggcggcaaggagaccuggcacagcgccgccaccgccaucuacugccugaugggcagcggccagcugcugugggacaccgugaccggcgugaacauggcccuguga

SEQ ID NO: 188752 - RNA, 1401 nt, Artificial Sequence
  derived and/or modified CDS sequence (opt4) from neuraminidase__InfluenzaB__ABN50507
augcugcccagcaccauccagacccugacccuguuccugaccagcggcggcgugcugcugagccuguacgugagcgccagccugagcuaccugcuguacagcgacauccugcugaaguucagccccaccgagaucaccgcccccaccaugccccugaacugcgccaacgccagcaacgugcaggccgugaacagaagcgccaccaagggcgugacccugccccugcccgagcccgaguggaccuaccccagacugagcugccccggcagcaccuuccagaaggcccugcugaucagcccccacagauucggcgagaccaagggcaacagcgccccccugaucaucagagagcccuucaucgccugcggccccaaggagugcagacacuucgcccugacccacuacgccgcccagcccggcggcuacuacaacggcaccagagaggacagaaacaagcugagacaccugaucagcgugaagcugggcaagauccccaccguggagaacagcaucuuccacauggccgccuggagcggcagcgccugccacgacggcagagaguggaccuacaucggcguggacggccccgacagcaacgcccugcugaagaucaaguacggcgaggccuacaccgacaccuaccacagcuacgccaacaacauccugagaacccaggagagcgccugcaacugcaucggcggcgacugcuaccugaugaucaccgacggcagcgccagcggcaucagcgagugcagauuccugaagaucagagagggcagaaucaucaaggagaucuuccccaccggcagaguggagcacaccgaggagugcaccugcggcuucgccagcaacaagaccaucgagugcgccugcagagacaacagcuacaccgccaagagacccuucgugaagcugaacguggagaccgacaccgccgagaucagacugaugugcaccgagaccuaccuggacacccccagacccgacgacggcagcaucaccggccccugcgagagcaacggcgacaagggcagcggcggcaucaagggcggcuucgugcaccagagaauggccagcaagaucggcagaugguacagcagaaccaugagcaagaccaagagaaugggcaugggccuguacgugaaguacgacggcgaccccuggaucgacagcgacgcccugacccugagcggcgugauggugagcauggaggagcccggcugguacagcuucggcuucgagaucaaggacaagaagugcgacgugcccugcaucggcaucgagauggugcacgacggcggcaagaagaccuggcacagcgccgccaccgccaucuacugccugaugggcagcggccagcugcugugggacaccgugaccggcguggacauggcccuguga

SEQ ID NO: 188753 - RNA, 1401 nt, Artificial Sequence; identical to SEQ ID NO: 188651
  derived and/or modified CDS sequence (opt4) from neuraminidase__InfluenzaB__ABN50518

SEQ ID NO: 188754 - RNA, 1401 nt, Artificial Sequence; identical to SEQ ID NO: 188651
  derived and/or modified CDS sequence (opt4) from neuraminidase__InfluenzaB__ABN50529

SEQ ID NO: 188755 - RNA, 1401 nt, Artificial Sequence; identical to SEQ ID NO: 188644
  derived and/or modified CDS sequence (opt4) from neuraminidase__InfluenzaB__ABN50540

SEQ ID NO: 188756 - RNA, 1401 nt, Artificial Sequence; identical to SEQ ID NO: 188676
  derived and/or modified CDS sequence (opt4) from neuraminidase__InfluenzaB__ABN50551

SEQ ID NO: 188757 - RNA, 1401 nt, Artificial Sequence
  derived and/or modified CDS sequence (opt4) from neuraminidase__InfluenzaB__ABN50562
augcugcccagcaccauccagacccugacccuguuccugaccagcggcggcgcccugcugagccuguacgugagcgcccugcugagcuaccugcuguacagcgacauccugcugaaguucagccccaccaaggugaucgcccccaccaugagccuggacuacaccaacgccagcaacgugcaggccgugaaccacagcgccaccgaggagaugaccuuccugcugcccgagcccgaguggaccuaccccagacugagcugccagggcagcaccuuccagaaggcccugcugaucagcccccacagauucggcgaggccaagggcaacagcgccccccugaucaucagagagcccuucaucgccugcggccccaaggagugcaagcacuucgcccugacccacuacgccgcccagcccggcggcuacuacaacggcaccagagaggacagaaacaagcugagacaccugaucagcgugaaccugggcaagauccccaccguggagaacagcaucuuccacauggccgccuggagcggcagcgccugccacgacggcagagaguggaccuacaucggcguggacggccccgacagcaacgcccugaucaagaucaaguacggcgaggccuacaccgacaccuaccacagcuacgccaacaacauccugagaacccaggagagcgccugcaacugcaucggcggcgacugcuaccugaugaucaccgacggcagcgccagcggcaucagcagaugcagauuccugaagaucagagagggcagaaucaucaaggagaucuuccccaccggcagaguggagcacaccgaggagugcaccugcggcuucgccagcaacaagaccaucgagugcgccugcagagacaacagcuacaccgccaagagacccuucgugaagcugaacguggagaccgacaccgccgagaucagacugaugugcaccgagaccuaccuggacacccccagacccgacgacggcagcaucaccggccccugcgagagcaacggcgacaagggcaacggcggcaucaagggcggcuucgugcaccagagaauggccagcagaaucggcagaugguacagcagaaccaugagcaagaccaagagaaugggcauggagcuguacgugaaguacgacggcgaccccuggaccgacagcgacgcccuggcccccagcggcgugauggugagcauggaggagcccggcugguacagcuucggcuucgagaucaaggacaagaagugcgacgugcccugcaucggcaucgagauggugcacgacggcggcaagaagaccuggcacagcgccgccaccgccaucuacugccugaugggcagcggccagcugcugugggacaccgugaccggcguggacauggcccuguga

SEQ ID NO: 188758 - RNA, 1401 nt, Artificial Sequence; identical to SEQ ID NO: 188747
  derived and/or modified CDS sequence (opt4) from neuraminidase__InfluenzaB__ABN50573

SEQ ID NO: 188759 - RNA, 1401 nt, Artificial Sequence
  derived and/or modified CDS sequence (opt4) from neuraminidase__InfluenzaB__ABN50584
augcugcccagcaccauccagacccugacccuguuccugaccagcggcggcgugcugcugagccuguacgugagcgccagccugagcuaccugcuguacagcgacauccugcugaaguucagccccaccgagaucaccgccagcaccaugccccuggacugcgccaacgccagcaacgugcaggccgugaacagaagcgccaccaagggcgugacccugcugcugcccgagcccgaguggaccuaccccagacugagcugccccggcagcaccuuccagaaggcccugcugaucagcccccacagauucggcgagaccaagggcaacagcgccccccugaucaucagagagcccuucaucgccugcggccccaacgagugcaagcacuucgcccugacccacuacgccgcccagcccggcggcuacuacaacggcaccagaggcgacagaaacaagcugagacaccugaucagcgugaagcugggcaagauccccaccguggagaacagcaucuuccacauggccgccuggagcggcagcgccugccacgacggcaaggaguggaccuacaucggcguggacggccccgacaacaacgcccugcugaagaucaaguacggcgaggccuacaccgacaccuaccacagcuacgccaacaacauccugagaacccaggagagcgccugcaacugcaucggcggcaacugcuaccugaugaucaccgacggcagcgccagcggcgugagcgagugcagauuccugaagaucagagagggcagaaucaucaaggagaucuuccccaccggcagagugaagcacaccgaggagugcaccugcggcuucgccagcaacaagaccaucgagugcgccugcagagacaacagcuacaccgccaagagacccuucgugaagcugaacguggagagcgacaccgccgagaucagacugaugugcaccgagaccuaccuggacacccccagacccgacgacggcagcaucaccggccccugcgagagcaacggcgacaagggcagcggcggcaucaagggcggcuucgugcaccagagaauggccagcaagaucggcagaugguacagcagaaccaugagcaagaccgagagaaugggcaugggccuguacgugaaguacgacggcgaccccugggccgacagcgacgcccuggcccugagcggcgugauggugagcauggaggagcccggcugguacagcuucggcuucgagaucaaggacaagaagugcgacgugcccugcaucggcaucgagauggugcacgacggcggcaaggagaccuggcacagcgccgccaccgccaucuacugccugaugggcagcggccagcugcugugggacaccgugaccggcguggacauggcccuguga

SEQ ID NO: 188760 - RNA, 1401 nt, Artificial Sequence; identical to SEQ ID NO: 188644
  derived and/or modified CDS sequence (opt4) from neuraminidase__InfluenzaB__ABN50595

SEQ ID NO: 188761 - RNA, 1398 nt, Artificial Sequence
  derived and/or modified CDS sequence (opt4) from neuraminidase__InfluenzaB__ABN50606
augcugcccagcaccauccagacccugacccuguuccugaccagcggcggcgugcugcugagccuguacgugagcgccagccugagcuaccugcuguacagcgacauccugcugagauucagcagcaagaucaccgcccccaccaugacccuggacugcgccaacgccagcaacgugcaggccgugaacagaagcgccaccaaggagaugaccuuccugcugcccgagcccgaguggaccuaccccagacugagcugccagggcagcaccuuccagaaggcccugcugaucagcccccacagauucggcgaggccagaggcaacagcgccccccugaucaucagagagcccuucaucgccugcggccccaaggagugcaagcacuucgcccugacccacuacgccgcccagcccggcggcuacuacaacggcaccagagaggacagaaacaagcugagacaccugaucagcgugaagcugggcaagauccccaccguggagaacagcaucuuccacauggccgccuggagcggcagcgccugccacgacggcagagaguggaccuacaucggcguggacggccccgacagcaacgcccugaucaagaucaaguacggcgaggccuacaccgacaccuaccacagcuacgccaacaacauccugagaacccaggagagcgccugcaacugcaucggcggcgacugcuaccugaugaucaccgacggcagcgccagcggcaucagcgagugcagauuccugaagaucagagagggcagaaucaucaaggagaucuuccccaccggcagaguggagcacaccgaggagugcaccugcggcuucgccagcaacaagaccaucgagugcgccugcagagacaacagcuacaccgccaagagacccuucgugaagcugaacguggagaccgacaccgccgagaucagacugaugugcaccgagaccuaccuggacacccccagacccgacgacggcagcaucaccggccccugcgagagcgacggcgacaagggcagaggcggcaucaagggcggcuucgugcaccagagaauggccagcaagaucggcagaugguacagcagaaccaugagcaagaccgagagaaugggcauggagcuguacgugaaguacgacggcgaccccuggaccgacagcgacgcccuggcccccagcggcgugauggugagcaugaaggagcccggcugguacagcuucggcuucgagaucaaggacaagaagugcgacgugcccugcaucggcaucgagauggugcacgacggcggcaagaagaccuggcacagcgccgccaccgccaucuacugccugaugggcagcggccagcugcugugggacaccgugaccggcguggacauggcccuguga

SEQ ID NO: 188762 - RNA, 1398 nt, Artificial Sequence
  derived and/or modified CDS sequence (opt4) from neuraminidase__InfluenzaB__ABN50628
augcugcccagcaccauccagacccugacccuguuccugaccagcggcggcgugcugcugagccuguacgugagcgcccugcugagcuaccugcuguacagcgacauccugcugaaguucagccccaagaucaucgcccccaccaugagccuggacugcgccaacgccagcaacgugcaggccgugaaccacagcgccaccaaggagaugaccuuccugcugcccgagcccgaguggaccuaccccagacugagcugccagggcagcaccuuccagaaggcccugcugaucagcccccacagauucggcgaggccaagggcaacagcgccccccugaucaucagagagcccuucaucgccugcggccccaaggagugcaagcacuucgcccugacccacuacgccgcccagcccggcggcuacuacaacggcaccagagaggacagaaacaagcugagacaccugaucagcgugaaccugggcaagauccccaccguggagaacagcaucuuccacauggccgccuggagcggcagcgccugccacgacggcagagaguggaccuacaucggcguggacggccccgacagcaacgcccugaucaagaucaaguacggcgaggccuacaccgacaccuaccacagcuacgccaacaacauccugagaacccaggagagcgccugcaacugcaucggcggcgacugcuaccugaugaucaccgacggcagcgccagcggcaucagcaagugcagauuccugaagaucagagagggcagaaucaucaaggagaucuuccccaccggcagaguggagcacaccgaggagugcaccugcggcuucgccagcaacaagaccaucgagugcgccugcagagacaacagcuacaccgccaagagacccuucgugaagcugaacguggagaccgacaccgccgagaucagacugaugugcaccgagaccuaccuggacacccccagacccgacgacggcagcaucaccggccccugcgagagcaacggcgacaagggcagaggcggcgugaagggcggcuucgugcaccagagaauggccagcaagaucggcagaugguacagcagaaccaugagcaagaccgagagaaugggcauggagcuguacgugaaguacgacggcgaccccuggaccgacagcgacgcccuggcccccagcggcgugauggugagcauggaggagcccggcugguacagcuucggcuucgagaucaaggacaagaagugcgacgugcccugcaucggcaucgagauggugcacgacggcggcaagaagaccuggcacagcgccgccaccgccaucuacugccugaugggcagcggccagcugcugugggacaccgugaccggcguggacauggcccuguga

SEQ ID NO: 188763 - RNA, 1398 nt, Artificial Sequence
  derived and/or modified CDS sequence (opt4) from neuraminidase__InfluenzaB__ABN50639
augcugcccagcaccauccagacccugacccuguuccugaccagcggcggcgugcugcugagccuguacgugagcgcccugcugagcuaccugcuguacagcgacauccugcugaaguucagccccaagaucaucgcccccaccaugagccuggacugcgccaacgccagcaacgugcaggccgugaaccacagcgccaccaaggagaugaccuuccugcugcccgagcccgaguggaccuaccccagacugagcugccagggcagcaccuuccagaaggcccugcugaucagcccccacagauucggcgaggccaagggcaacagcgccccccugaucaucagagagcccuucaucgccugcggccccaaggagugcaagcacuucgcccugacccacuacgccgcccagcccggcggcuacuacaacggcaccagagaggacagaaacaagcugagacaccugaucagcgugaagcugggcaagauccccaccguggagaacagcaucuuccacauggccgccuggagcggcagcgccugccacgacggcagagaguggaccuacaucggcguggacggccccgacagcaacgcccuggugaagaucaaguacggcgaggccuacaccgacaccuaccacagcuacgccaacaacauccugagaacccaggagagcgccugcaacugcaucggcggcgacugcuaccugaugaucaccgacggcagcgccagcggcaucagcaagugcagauuccugaagaucagagagggcagaaucaucaaggagaucuuccccaccggcagaguggagcacaccgaggagugcaccugcggcuucgccagcaacaagaccaucgagugcgccugcagagacaacagcuacaccgccaagagacccuucgugaagcugaacguggagaccgacaccgccgagaucagacugaugugcaccgagaccuaccuggacacccccagacccgacgacggcagcaucaccggccccugcgagagcaacggcgacaagggcagaggcggcgugaagggcggcuucgugcaccagagaauggccagcaagaucggcagaugguacagcagaaccaugagcaagaccgagagaaugggcauggagcuguacgugaaguacgacggcgaccccuggaccgacagcgacgcccuggcccccagcggcgugauggugagcauggaggagcccggcugguacagcuucggcuucgagaucaaggacaagaagugcgacgugcccugcaucggcaucgagauggugcacgacggcggcaagaagaccuggcacagcgccgccaccgccaucuacugccugaugggcagcggccagcugcugugggacaccgugaccggcguggacauggcccuguga

SEQ ID NO: 188764 - RNA, 1398 nt, Artificial Sequence
  derived and/or modified CDS sequence (opt4) from neuraminidase__InfluenzaB__ABN50650
augcugcccagcaccauccagacccugacccuguuccugaccagcggcggcgugcugcugagccuguacgugagcgcccugcugagcuaccugcuguacagcgacgugcugcugaaguucagccccaagaucaucgcccccaccaugagccuggacugcgccaacgccagcaacgugcaggccgugaaccacagcgccaccgaggagaugaccuuccugcugcccgagcccgaguggaccuaccccagacugagcugccagggcagcaccuuccagaaggcccugcugaucagcccccacagauucggcgaggccaagggcaacagcgccccccugaucaucagagagcccuucaucgccugcggccccaaggagugcaagcacuucgcccugacccacuacgccgcccagcccggcggcuacuacaacggcaccagagaggacagaaacaagcugagacaccugaucagcgugaaccugggcaagauccccaccguggagaacagcaucuuccacauggccgccuggagcggcagcgccugccacgacggcagagaguggaccuacaucggcguggacggccccgacagcaacgcccugaucaagaucaaguacggcgaggccuacaccgacaccuaccacagcuacgccaacaacauccugagaacccaggagagcgccugcaacugcaucggcggcgacugcuaccugaugaucaccgacggcagcgccagcggcaucagcaagugcagauuccugaagaucagagagggcagaaucaucaaggagaucuuccccaccggcagaguggagcacaccgaggagugcaccugcggcuucgccagcaacaagaccaucgagugcgccugcagagacaacagcuacaccgccaagagacccuucgugaagcugaacguggagaccgacaccgccgagaucagacugaugugcaccgagaccuaccuggacacccccagacccgacgacggcagcaucaccggccccugcgagagcaacggcgacaagggccacggcggcaucaagggcggcuucgugcaccagagaauggccagcaagaucggcagaugguacagcagaaccaugagcaagaccaagagaaugggcauggagcuguacgugaaguacgacggcgaccccuggaccgacagcgacgcccuggcccccagcggcgugauggugagcauggaggagcccggcugguacagcuucggcuucgagaucaaggacaagaagugcgacgugcccugcaucggcaucgagauggugcacgacggcggcaagaagaccuggcacagcgccgccaccgccaucuacugccugaugggcagcggccagcugcugugggacaccgugaccggcguggacauggcccuguga

SEQ ID NO: 188765 - RNA, 1398 nt, Artificial Sequence
  derived and/or modified CDS sequence (opt4) from neuraminidase__InfluenzaB__ABN50661
augcugcccagcaccauccagacccugacccuguuccugaccagcggcggcgugcugcugagccuguacgugagcgcccugcugagcuaccugcuguacagcgacgugcugcugaaguucagccccaagaugaucgcccccaccaugagccuggacugcgccaacgccagcaacgugcaggccgugaaccacagcgccaccgaggagaugaccuuccugcugcccgagcccgaguggaccuaccccagacugagcugccagggcagcaccuuccagaaggcccugcugaucagcccccacagauucggcgaggccaagggcaacagcgccccccugaucaucagagagcccuucaucgccugcggccccaaggagugcaagcacuucgcccugacccacuacgccgcccagcccggcggcuacuacaacggcaccagagaggacagaaacaagcugagacaccugaucagcgugaaccugggcaagauccccaccguggagaacagcaucuuccacauggccgccuggagcggcagcgccugccacgacggcagagaguggaccuacaucggcguggacggccccgacagcaacgcccugaucaagaucaaguacggcgaggccuacaccgacaccuaccacagcuacgccaacaacauccugagaacccaggagagcgccugcaacugcaucggcggcgacugcuaccugaugaucaccgacggcagcgccagcggcaucagcaagugcagauuccugaagaucagagagggcagaaucaucaaggagaucuuccccaccggcagaguggagcacaccgaggagugcaccugcggcuucgccagcaacaagaccaucgagugcgccugcagagacaacagcuacaccgccaagagacccuucgugaagcugaacguggagaccgacaccgccgagaucagacugaugugcaccgagaccuaccuggacacccccagacccgacgacggcagcaucaccggccccugcgagagcaacggcgacaagggccacggcggcaucaagggcggcuucgugcaccagagaauggccagcaagaucggcagaugguacagcagaaccaugagcaagaccaagagaaugggcauggagcuguacgugaaguacgacggcgaccccuggaccgacagcgacgcccuggcccccagcggcgugauggugagcauggaggagcccggcugguacagcuucggcuucgagaucaaggacaagaagugcgacgugcccugcaucggcaucgagauggugcacgacggcggcaagaagaccuggcacagcgccgccaccgccaucuacugccugaugggcagcggccagcugcugugggacaccgugaccggcguggacauggcccuguga

SEQ ID NO: 188766 - RNA, 1401 nt, Artificial Sequence
  derived and/or modified CDS sequence (opt4) from neuraminidase__InfluenzaB__ABN50683
augcugcccagcaccauccagacccugacccuguuccugaccagcggcggcgugcugcugagccuguacgugagcgccagccugagcuaccugcuguacagcgacauccugcugaaguucagccccaccgagaucaccgcccccaccaugccccuggacugcgccaacgccagcaacgugcaggccgugaacagaagcgccaccaagggcgugacccugcugcugcccgagcccgaguggaccuaccccagacugagcugccccggcagcaccuuccagaaggcccugcugaucagcccccacagauucggcgagaccagaggcaacagcgccccccugaucaucagagagcccuucaucgccugcggccccaaggagugcaagcacuucgcccugacccacuacgccgcccagcccggcggcuacuacaacggcaccagagaggacagaaacaagcugagacaccugaucagcgugaagcugggcaagauccccaccguggagaacagcaucuuccacauggccgccuggagcggcagcgccugccacgacggcagagaguggaccuacaucggcguggacggccccgacagcaacgcccugcugaagaucaaguacggcgaggccuacaccgacaccuaccacagcuacgccaacaacauccugagaacccaggagagcgccugcaacugcaucggcggcgacugcuaccugaugaucaccgacggcagcgccagcggcaucagcaagugcagauuccugaagaucagagagggcagaaucaucaaggagaucuuccccaccggcagaguggagcacaccgaggagugcaccugcggcuucgccagcaacaagaccaucgagugcgccugcagagacaacagcuacaccgccaagagacccuucgugaagcugaacguggagaccgacaccgccgagaucagacugaugugcaccgagaccuaccuggacacccccagacccgacgacggcagcaucaccggccccugcgagagcaacggcgacaagggccugggcggcaucaagggcggcuucgugcaccagagaauggccagcaagaucggcagaugguacagcagaaccaugagcaagaccaagagaaugggcauggagcuguacgugaaguacgacggcgaccccuggaccgacagcgacgcccuggcccugagcggcgugauggugcccauggaggagcccggcugguacagcuucggcuucgagaucaaggacaagaagugcgacgugcccugcaucggcaucgagauggugcacgacggcggcaagaagaccuggcacagcgccgccaccgccaucuacugccugaugggcagcggccagcugcugugggacaccgugaccggcguggacauggcccuguga

SEQ ID NO: 188767 - RNA, 1401 nt, Artificial Sequence
  derived and/or modified CDS sequence (opt4) from neuraminidase__InfluenzaB__ABN50694
augcugcccagcaccauccagacccugacccuguuccugaccagcggcggcgugcugcugagccuguacgugagcgccagccugagcuaccugcuguacagcgacauccugcugaaguucagccccaccgagaucaccgcccccaccaugccccuggacugcgccaacgccagcaacgugcaggccgugaacagaagcgccaccaagggcgugacccugcugcugcccgagcccgaguggaccuaccccagacugagcugccccggcagcaccuuccagaaggcccugcugaucagcccccacagauucggcgagaccagaggcaacagcgccccccugaucaucagagagcccuucaucgccugcggccccaaggagugcaagcacuucgcccugacccacuacgccgcccagcccggcggcuacuacaacggcaccagagaggacagaaacaagcugagacaccugaucagcgugaagcugggcaagauccccaccguggagaacagcaucuuccacauggccgccuggagcggcagcgccugccacgacggcagagaguggaccuacaucggcguggacggccccgacagcaacgcccugcugaagaucaaguacggcgaggccuacaccgacaccuaccacagcuacgccaacaacauccugagaacccaggagagcgccugcaacugcaucggcggcgacugcuaccugaugaucaccgacggcagcgccagcggcaucagcaagugcagauuccugaagaucagagagggcagaaucaucaaggagaucuuccccaccggcagaguggagcacaccgaggagugcaccugcggcuucgccagcaacaagaccaucgagugcgccugcagagacaacagcuacaccgccaagagacccuucgugaagcugaacguggagaccgacaccgccgagaucagacugaugugcaccgagaccuaccuggacacccccagacccgacgacggcagcaucaccggccccugcgagagcaacggcgacaagggcagcggcggcaucaagggcggcuucgugcaccagagaauggccagcaagaucggcagaugguacagcagaaccaugagcaagaccaagagaaugggcaugggccuguacgugaaguacgacggcgaccccuggaccgacagcgacgcccuggcccugagcggcgugauggugagcauggaggagcccggcugguacagcuucggcuucgagaucaaggacaagaagugcgacgugcccugcaucggcaucgagauggugcacgacggcggcaagaagaccuggcacagcgccgccaccgccaucuacugccugaugggcagcggccagcugcugugggacaccgugaccggcguggacauggcccuguga

SEQ ID NO: 188768 - RNA, 1398 nt, Artificial Sequence
  derived and/or modified CDS sequence (opt4) from neuraminidase__InfluenzaB__ABN50705
augcugcccagcaccauccagacccugacccuguuccugacccugggcggcgugcugcugagccuguacgugagcgcccugcugagcuaccugcuguacagcgacgugcugcugaaguucagccccaagaugaucgcccccaccaugagccuggacugcgccaacgccagcaacgugcaggccgugaaccacagcgccaccgaggagaugaccuuccugcugcccgagcccgaguggaccuaccccagacugagcugccagggcagcaccuuccagaaggcccugcugaucagcccccacagauucggcgaggccaagggcaacagcgccccccugaucaucagagagcccuucaucgccugcggccccaaggagugcaagcacuucgcccugacccacuacgccgcccagcccggcggcuacuacaacggcaccagagaggacagaaacaagcugagacaccugaucagcgugaaccugggcaagauccccaccguggagaacagcaucuuccacauggccgccuggagcggcagcgccugccacgacggcagagaguggaccuacaucggcguggacggccccgacagcaacgcccugaucaagaucaaguacggcgaggccuacaccgacaccuaccacagcuacgccaacaacauccugagaacccaggagagcgccugcaacugcaucggcggcgacugcuaccugaugaucaccgacggcagcgccagcggcaucagcaagugcagauuccugaagaucagagagggcagaaucaucaaggagaucuuccccaccggcagaguggagcacaccgaggagugcaccugcggcuucgccagcaacaagaccaucgagugcgccugcagagacaacagcuacaccgccaagagacccuucgugaagcugaacguggagaccgacaccgccgagaucagacugaugugcaccgagaccuaccuggacacccccagacccgacgacggcagcaucaccggccccugcgagagcaacggcgacaagggccacggcggcaucaagggcggcuucgugcaccagagaauggccagcaagaucggcagaugguacagcagaaccaugagcaagaccaagagaaugggcauggagcuguacgugaaguacgacggcgaccccuggaccgacagcgacgcccuggcccccagcggcgugauggugagcauggaggagcccggcugguacagcuucggcuucgagaucaaggacaagaagugcgacgugcccugcaucggcaucgagauggugcacgacggcggcaagaagaccuggcacagcgccgccaccgccaucuacugccugaugggcagcggccagcugcugugggacaccgugaccggcguggacauggcccuguga

SEQ ID NO: 188769 - RNA, 1401 nt, Artificial Sequence
  derived and/or modified CDS sequence (opt4) from neuraminidase__InfluenzaB__ABN50716
augcugcccagcaccauccagacccugacccuguuccugaccagcggcggcgugcugcugagccuguacgugagcgccagccugagcuaccugcuguacagcggcauccugcugaaguucagccccaccgagaucaccgcccccaccaugccccuggacugcgccaacgccagcaacgugcaggccgugaacagaagcgccaccaagggcgugacccugcugcugcccgagcccgaguggaccuaccccagacugagcugccccggcagcaccuuccagaaggcccugcugaucagcccccacagauucggcgagaccagaggcaacagcgccccccugaucaucagagagcccuucaucgccugcggccccaaggagugcaagcacuucgcccugacccacuacgccgcccagcccggcggcuacuacaacggcaccagagaggacagaaacaagcugagacaccugaucagcgugaagcugggcaagauccccaccguggagaacagcaucuuccacauggccgccuggagcggcagcgccugccacgacggcagagaguggaccuacaucggcguggacggccccgacagcaacgcccugcugaagaucaaguacggcgaggccuacaccgacaccuaccacagcuacgccaacaacauccugagaacccaggagagcgccugcaacugcaucggcggcgacugcuaccugaugaucaccgacggcagcgccagcggcaucagcaagugcagauuccugaagaucagagagggcagaaucaucaaggagaucuuccccaccggcagaguggagcacaccgaggagugcaccugcggcuucgccagcaacaagaccaucgagugcgccugcagagacaacagcuacaccgccaagagacccuucgugaagcugaacguggagaccgacaccgccgagaucagacugaugugcaccgagaccuaccuggacacccccagacccgacgacggcagcaucaccggccccugcgagagcaacggcgacaagggcagcggcggcaucaagggcggcuucgugcaccagagaauggccagcaagaucggcagaugguacagcagaaccaugagcaagaccaagagaaugggcaugggccuguacgugaaguacgacggcgaccccuggaccgacagcgacgcccuggcccugagcggcgugauggugagcauggaggagcccggcugguacagcuucggcuucgagaucaaggacaagaagugcgacgugcccugcaucggcaucgagauggugcacgacggcggcaagaagaccuggcacagcgccgccaccgccaucuacugccugaugggcagcggccagcugcugugggacaccgugaccggcguggacauggcccuguga

SEQ ID NO: 188770 - RNA, 1401 nt, Artificial Sequence
  derived and/or modified CDS sequence (opt4) from neuraminidase__InfluenzaB__ABN50727
augcugcccagcaccauccagacccugacccuguuccugaccagcggcggcgugcugcugagccuguacgugagcgccagccugagcuaccugcuguacagcgacauccugcugaaguucagccccaccgagaucaccgcccccaccaugccccuggacugcgccaacgccagcaacgugcaggccgugaacagaagcgccaccaagggcgugacccugcugcugcccgagcccgaguggaccuaccccagacugagcugccccggcagcaccuuccagaaggcccugcugaucagcccccacagauucggcgagaccaagggcaacagcgccccccugaucaucagagagcccuucaucgccugcggccccaaggagugcaagcacuucgcccugacccacuacgccgcccagcccggcggcuacuacaacggcaccagagaggacagaaacaagcugagacaccugaucagcgugaagcugggcaagauccccaccguggagaacagcaucuuccacauggccgccuggagcggcagcgccugccacgacggcagagaguggaccuacaucggcguggacggccccgacagcaacgcccugcugaagaucaaguacggcgaggccuacaccgacaccuaccacagcuacgccaacaacauccugagaacccaggagagcgccugcaacugcaucggcggcgacugcuaccugaugaucaccgacggcagcgccagcggcaucagcgagugcagauuccugaagaucagagagggcagaaucaucaaggagaucuuccccaccggcagaguggagcacaccgaggagugcaccugcggcuucgccagcaacaagaccaucgagugcgccugcagagacaacagcuacaccgccaagagacccuucgugaagcugaacguggagaccgacaccgccgagaucagacugaugugcaccgagaccuaccuggacacccccagacccgacgacggcagcaucaccggccccugcgagagcaacggcgacaagggcagcggcggcaucaagggcggcuucgugcaccagagaauggccagcaagaucggcagaugguacagcagaaccaugagcaagaccaagagaaugggcaugggccuguacgugaaguacgacggcgaccccuggaccgacagcgacgcccuggcccugagcggcgugauggugagcauggaggagcccggcugguacagcuucggcuucgagaucaaggacaagaagugcgacgugcccugcaucggcaucgagauggugcacgacggcggcaagaagaccuggcacagcgccgccaccgccaucuacugccugaugggcagcggccagcugcugugggacaccgugaccggcguggacauggcccuguga

SEQ ID NO: 188771 - RNA, 1401 nt, Artificial Sequence; identical to SEQ ID NO: 188713
  derived and/or modified CDS sequence (opt4) from neuraminidase__InfluenzaB__ABN50738

SEQ ID NO: 188772 - RNA, 1401 nt, Artificial Sequence
  derived and/or modified CDS sequence (opt4) from neuraminidase__InfluenzaB__ABN50749
augcugcccagcaccauccagacccugacccuguuccugaccagcggcggcgugcugcugagccuguacgugagcgccagccugagcuaccugcuguacagcgacauccugcugaaguucagccccaccgagaucaccgcccccaccaugccccuggacugcgccaacgccagcaacgugcaggccgugaacagaagcgccaccaagggcgugacccugcugcugcccgagcccgaguggaccuaccccagacugagcugccccggcagcaccuuccagaaggcccugcugaucagcccccacagauucggcgagaccaagggcaacagcgccccccugaucaucagagagcccuucaucgccugcggccccaaggagugcaagcacuucgcccugacccacuacgccgcccagcccggcggcuacuacaacggcaccagaggcgacagaaacaagcugagacaccugaucagcgugaagcugggcaagauccccaccguggagaacagcaucuuccacauggccgccuggagcggcagcgccugccacgacggcaaggaguggaccuacaucggcguggacggccccgacagcaacgcccugcugaagaucaaguacggcgaggccuacaccgacaccuaccacagcuacgccaacaacauccugagaacccaggagagcgccugcaacugcaucggcggcaacugcuaccugaugaucaccgacggcagcgccagcggcaucagcgagugcagauuccugaagaucagagagggcagaaucaucaaggagaucuuccccaccggcagagugaagcacaccgaggagugcaccugcggcuucgccagcaacaagaccaucgagugcgccugcagagacaacagcuacaccgccaagagacccuucgugaagcugaacguggagaccgacaccgccgagaucagacugaugugcaccgagaccuaccuggacacccccagacccgacgacggcagcaucaccggccccugcgagagcaacggcgacaagggcagcggcggcaucaagggcggcuucgugcaccagagaauggccagcaagaucggcagaugguacagcagaaccaugagcaagaccaagagaaugggcaugggccuguacgugaaguacgacggcgaccccugggccgacagcgacgcccuggcccugagcggcgugauggugagcauggaggagcccggcugguacagcuucggcuucgagaucaaggacaagaagugcgacgugcccugcaucggcaucgagauggugcacgacggcggcaaggagaccuggcacagcgccgccaccgccaucuacugccugaugggcagcggccagcugcugugggacaccgugaccggcguggacauggcccuguga

SEQ ID NO: 188773 - RNA, 1398 nt, Artificial Sequence
  derived and/or modified CDS sequence (opt4) from neuraminidase__InfluenzaB__ABN51188
augcugcccagcaccauccagacccugacccuguuccugaccagcggcggcgugcugcugagccuguacgugagcgcccugcugagcuaccugcuguacagcgacauccugcugaaguucagccccaagaucaucgcccccaccaugcugcuggacugcgccaacgccagcaacgugcaggccgugaaccacagcgccaccaaggagaugaccuuccugcugcccgagcccgaguggaccuaccccagacugagcugccagggcagcaccuuccagaaggcccugcugaucagcccccacagauucggcgaggccaagggcaacagcgccccccugaucaucagagagcccuucaucgccugcggccccaaggagugcaagcacuucgcccugacccacuacgccgcccagcccggcggcuacuacaacggcaccagagaggacagaaacaagcugagacaccugaucagcgugaaccugggcaagauccccaccguggagaacagcaucuuccacauggccgccuggagcggcagcgccugccacgacggcagagaguggaccuacaucggcguggacggccccgacagcaacgcccugaucaagaucaaguacggcgaggccuacaccgacaccuaccacagcuacgccaacaacauccugagaacccaggagagcgccugcaacugcaucggcggcgacugcuaccugaugaucaccgacggcagcgccagcggcaucagcaagugcagauuccugaagaucagagagggcagaaucaucaaggagaucuuccccaccggcagaguggagcacaccgaggagugcaccugcggcuucgccagcaacaagaccaucgagugcgccugcagagacaacagcuacaccgccaagagacccuucgugaagcugaacguggagaccgacaccgccgagaucagacugaugugcaccgagaccuaccuggacacccccagacccgacgacggcagcaucaccggccccugcgagagcaacggcgacaagggcagaggcggcgugaagggcggcuucgugcaccagagaauggccagcaagaucggcagaugguacagcagaaccaugagcaagaccgagagaaugggcauggagcuguacgugaaguacgacggcgaccccuggaccgacagcgacgcccuggcccccagcggcgugauggugagcauggaggagcccggcugguacagcuucggcuucgagaucaaggacaagaagugcgacgugcccugcaucggcaucgagauggugcacgacggcggcaagaagaccuggcacagcgccgccaccgccaucuacugccugaugggcagcggccagcugcugugggacaccgugaccggcguggacauggcccuguga

SEQ ID NO: 188774 - RNA, 1398 nt, Artificial Sequence; identical to SEQ ID NO: 188762
  derived and/or modified CDS sequence (opt4) from neuraminidase__InfluenzaB__ABN51199

SEQ ID NO: 188775 - RNA, 1401 nt, Artificial Sequence
  derived and/or modified CDS sequence (opt4) from neuraminidase__InfluenzaB__ABN58665
augcugcccagcaccauccagacccugacccuguuccugaccagcggcggcgugcugcugagccuguacgugagcgcccugcugagcuaccugcuguacagcgacauccugcugaaguucagccccaccaagaucaucgcccccaccaugagccuggacugcgccaacgccagcaacgugcaggccgugaaccacagcgccaccgaggagaugaccuuccugcugcccgagcccgaguggaccuaccccagacugagcugccagggcagcaccuuccagaaggcccugcugaucagcccccacagauucggcgaggccaagggcaacagcgccccccugaucaucagagagcccuucaucgccugcggccccaaggagugcaagcacuucgcccugacccacuacgccgcccagcccggcggcuacuacaacggcaccagagaggacagaaacaagcugagacaccugaucagcgugaaccugggcaagauccccaccguggagaacagcaucuuccacauggccgccuggagcggcagcgccugccacgacggcagagaguggaccuacaucggcguggacggccccgacagcaacgcccugaucaagaucaaguacggcgaggccuacaccgacaccuaccacagcuacgccaacaacauccugagaacccaggagagcgccugcaacugcaucggcggcgacugcuaccugaugaucaccgacggcagcgccagcggcaucagcaagugcagauuccugaagaucagagagggcagaaucaucaaggagaucuuccccaccggcagaguggagcacaccgaggagugcaccugcggcuucgccagcaacaagaccaucgagugcgccugcagagacaacagcuacaccgccaagagacccuucgugaagcugaacguggagaccgacaccgccgagaucagacugaugugcaccgagaccuaccuggacacccccagacccgacgacggcagcaucaccggccccugcgagagcaacggcggcaagggcagcggcggcaucaagggcggcuucgugcaccagagaauggccagcaagaucggcagaugguacagcagaaccaugagcaagaccaagagaaugggcauggagcuguacgugaaguacgacggcgaccccuggaccgacagcgacgcccuggcccccagcggcgugauggugagcauggaggagcccggcugguacagcuucggcuucgagaucaaggacaagaagugcgacgugcccugcaucggcaucgagauggugcacgacggcggcaagaagaccuggcacagcgccgccaccgccaucuacugccugaugggcagcggccagcugcugugggacaccgugaccggcguggacauggcccuguga

SEQ ID NO: 188776 - RNA, 1401 nt, Artificial Sequence; identical to SEQ ID NO: 188663
  derived and/or modified CDS sequence (opt4) from neuraminidase__InfluenzaB__ABN59449

SEQ ID NO: 188777 - RNA, 1398 nt, Artificial Sequence; identical to SEQ ID NO: 188741
  derived and/or modified CDS sequence (opt4) from neuraminidase__InfluenzaB__ABR15999

SEQ ID NO: 188778 - RNA, 1401 nt, Artificial Sequence; identical to SEQ ID NO: 188770
  derived and/or modified CDS sequence (opt4) from neuraminidase__InfluenzaB__ABR16010

SEQ ID NO: 188779 - RNA, 1401 nt, Artificial Sequence
  derived and/or modified CDS sequence (opt4) from neuraminidase__InfluenzaB__ABR16021
augcugcccagcaccauccagacccugacccuguuccugaccagcggcggcgugcugcugagccuguacgugagcgccagccugagcuaccugcuguacagcgacauccugcugaaguucagccccaccgagaucaccgcccccaccaugccccuggacugcgccaacgccagcaacgugcaggccgugaacagaagcgccaccaagggcgugacccugcugcugcccgagcccgaguggaccuaccccagacugagcugccccggcagcaccuuccagaaggcccugcugaucagcccccacagauucggcgagaccaagggcaacagcgccccccugaucaucagagagcccuucaucgccugcggccccaacgagugcaagcacuucgcccugacccacuacgccgcccagcccggcggcuacuacaacggcaccagaggcgacagaaacaagcugagacaccugaucagcgugaagcugggcaagauccccaccguggagaacagcaucuuccacauggccgccuggagcggcagcgccugccacgacggcaaggaguggaccuacaucggcguggacggccccgacaacaacgcccugcugaagaucaaguacggcgaggccuacaccgacaccuaccacagcuacgccaacaagauccugagaacccaggagagcgccugcaacugcaucggcggcaacugcuaccugaugaucaccgacggcagcgccagcggcgugagcgagugcagauuccugaagaucagaaagggcagaaucaucaaggagaucuuccccaccggcagagugaagcacaccgaggagugcaccugcggcuucgccagcaacaagaccaucgagugcgccugcagagacaacagcuacaccgccaagagacccuucgugaagcugaacguggagaccgacaccgccgagaucagacugaugugcaccgacaccuaccuggacacccccagacccgacgacggcagcaucaccggccccugcgagagcaacggcgacaagggcagcggcggcaucaagggcggcuucgugcaccagagaauggccagcaagaucggcagaugguacagcagaaccaugagcaagaccgagagaaugggcaugggccuguacgugaaguacgacggcgaccccugggccgacagcgacgcccuggccuucagcggcgugauggugagcaugaaggagcccggcugguacagcuucggcuucgagaucaaggacaagaagugcgacgugcccugcaucggcaucgagauggugcacgacggcggcaaggagaccuggcacagcgccgccaccgccaucuacugccugaugggcagcggccagcugcugugggacaccgugaccggcguggacauggcccuguga

SEQ ID NO: 188780 - RNA, 1401 nt, Artificial Sequence; identical to SEQ ID NO: 188695
  derived and/or modified CDS sequence (opt4) from neuraminidase__InfluenzaB__ACA64903

SEQ ID NO: 188781 - RNA, 1401 nt, Artificial Sequence
  derived and/or modified CDS sequence (opt4) from neuraminidase__InfluenzaB__ACA64914
augcugcccagcaccauccagacccugacccuguuccugaccagcggcggcgugcugcugagccuguacgugagcgccagccugagcuaccugcuguacagcgacauccugcugaaguucagccagaccgagaucaccgcccccaucaugccccuggacugcgccaacgccagcaacgugcaggccgugaacagaagcgccgccaagggcgugacccugcugcugcccgagcccgaguggaccuaccccagacugagcugccccggcagcaccuuccagaaggcccugcugaucagcccccacagauucggcgagaccaagggcaacagcgccccccugaucaucagagagcccuucaucgccugcggccccaccgagugcaagcacuucgcccugacccacuacgccgcccagcccggcggcuacuacaacggcaccagagaggacagaaacaagcugagacaccugaucagcgugaagcugggcaagauccccaccguggagaacagcaucuuccacauggccgccuggagcggcagcgccugccacgacggcaaggaguggaccuacgugggcguggacggccccgacagcaacgcccugcugaagaucaaguacggcgaggccuacaccgacaccuaccacagcuacgccaagaacauccugagaacccaggagagcgccugcaacugcaucggcggcgacugcuaccugaugaucaccgacggccccgccagcggcaucagcgagugcagauuccugaagaucagagagggcagaaucaucaaggagaucuuccccaccggcagagugaagcacaccgaggagugcaccugcggcuucgccagcaacaagaccaucgagugcgccugcagagacaacagcuacaccgccaagagacccuucgugaagcugaacguggagaccgacaccgccgagaucagacugaugugcaccgagaccuaccuggacacccccagacccaacgacggcagcaucaccggccccugcgagagcgacggcgacaagggcagcggcggcaucaagggcggcuucgugcaccagagaauggccagcaagaucggcagaugguacagcagaaccaugagcaagaccaagagaaugggcaugggccuguacgugaaguacgacggcgaccccuggaccgacagcgaggcccuggcccugagcggcgugauggugagcauggacgagcccggcugguacagcuucggcuucgagaucaaggacaagaagugcgacgugcccugcaucggcaucgagauggugcacgacggcggcaagaccaccuggcacagcgccgccaccgccaucuacugccugaugggcagcggccagcugcugugggacaccgugaccggcguggacauggcccuguga

SEQ ID NO: 188782 - RNA, 1401 nt, Artificial Sequence; identical to SEQ ID NO: 188695
  derived and/or modified CDS sequence (opt4) from neuraminidase__InfluenzaB__ACA64936

SEQ ID NO: 188783 - RNA, 1401 nt, Artificial Sequence
  derived and/or modified CDS sequence (opt4) from neuraminidase__InfluenzaB__ACA64969
augcugcccagcaccauccagacccugacccuguuccugaccagcggcggcgugcugcugagccuguacgugagcgccagccugagcuaccugcuguacagcgacauccugcugaaguucagccccaccgagaucaccgcccccaccaugccccuggacugcgccaacgccagcaacgugcaggccgugaacagaagcgccgccaagggcgugacccugcugcugcccgagcccgaguggaccuaccccagacugagcugccccggcagcaccuuccagaaggcccugcugaucagcccccacagauucggcgagaccaagggcaacagcgccccccugaucaucagagagcccuucaucgccugcggccccaacgagugcaagcacuucgcccugacccacuacgccgcccagcccggcggcuacuacaacggcaccagaggcgacagaaacaagcugagacaccugaucagcgugaagcugggcaagauccccaccguggagaacagcaucuuccacauggccgccuggagcggcagcgccugccacgacggcaaggaguggaccuacaucggcguggacggccccgacaacaacgcccugcugaagaucaaguacggcgaggccuacaccgacaccuaccacagcuacgccaacaagauccugagaacccaggagagcgccugcaacugcaucggcggcaacugcuaccugaugaucaccgacggcagcgccagcggcgugagcgagugcagauuccugaagaucagagagggcagaaucaucaaggagaucuuccccaccggcagagugaagcacaccgaggagugcaccugcggcuucgccagcaacaagaccaucgagugcgccugcagagacaacagcuacaccgccaagagacccuucgugaagcugaacguggagaccgacaccgccgagaucagacugaugugcaccgacaccuaccuggacacccccagacccgacgacggcagcaucaccggccccugcgagagcaacggcgacaagggcagcggcggcaucaagggcggcuucgugcaccagagaauggccagcaagaucggcagaugguacagcagaaccaugagcaagaccgagagaaugggcaugggccuguacgugaaguacgacggcgaccccugggccgacagcgacgcccuggccuucagcggcgugauggugagcaugaaggagcccggcugguacagcuucggcuucgagaucaaggacaagaagugcgacgugcccugcaucggcaucgagauggugcacgacggcggcaaggagaccuggcacagcgccgccaccgccaucuacugccugaugggcagcggccagcugcugugggacaccgugaccggcguggacauggcccuguga

SEQ ID NO: 188784 - RNA, 1401 nt, Artificial Sequence
  derived and/or modified CDS sequence (opt4) from neuraminidase__InfluenzaB__ACA64980
augcugcccagcaccauccagacccugacccuguuccugaccagcggcggcgugcugcugagccuguacgugagcgccagccugagcuaccugcuguacagcgacauccugcugaaguucagccccaccgagaucaccgcccccaccaugagccuggacugcgccaacgccagcaacgugcaggccgugaacagaagcgccaccaagggcgugacccugcugcugcccgagcccgaguggaccuaccccagacugagcugccccggcagcaccuuccagaaggcccugcugaucagcccccacagauucggcgagaccaagggcaacagcgccccccugaucaucagagagcccuucaucgccugcggccccaacgagugcaagcacuucgcccugacccacuacgccgcccagcccggcggcuacuacaacggcaccagaggcgacagaaacaagcugagacaccugaucagcgugaagcugggcaagauccccaccguggagaacagcaucuuccacauggccgccuggagcggcagcgccugccacgacggcaaggaguggaccuacaucggcguggacggccccgacaacaacgcccugcugaagaucaaguacggcgaggccuacaccgacaccuaccacagcuacgccagcaagauccugagaacccaggagagcgccugcaacugcaucggcggcaacugcuaccugaugaucaccgacggcagcgccagcggcgugagcgagugcagauuccugaagaucagagagggcagaaucaucaaggagaucuuccccaccggcagagugaagcacaccgaggagugcaccugcggcuucgccagcaacaagaccaucgagugcgccugcagagacaacagcuacaccgccaagagacccuucgugaagcugaacguggagaccgacaccgccgagaucagacugaugugcaccgacaccuaccuggacacccccagacccgacgacggcagcaucaccggccccugcgagagcaacggcgacaagggcagcggcggcaucaagggcggcuucgugcaccagagaauggccagcaagaucggcagaugguacagcagaaccaugagcaagaccgagagaaugggcaugggccuguacgugaaguacgacggcgaccccugggccgacagcgacgcccuggccuucagcggcgugauggugagcaugaaggagcccggcugguacagcuucggcuucgagaucaaggacaagaagugcgacgugcccugcaucggcaucgagauggugcacgacggcggcaaggagaccuggcacagcgccgccaccgccaucuacugccugaugggcagcggccagcugcugugggacaccgugaccggcguggacauggcccuguga

SEQ ID NO: 188785 - RNA, 1401 nt, Artificial Sequence
  derived and/or modified CDS sequence (opt4) from neuraminidase__InfluenzaB__ACA64991
augcugcccagcaccauccagacccugacccuguuccugaccagcggcggcgugcugcugagccuguacgugagcgccagccugagcuaccugcuguacagcgacauccugcugaaguucagccccaccgagaucaccgcccccaccaugccccuggacugcgccaacgccagcaacgugcacgccgugaacagaagcgccaccaagggcgugacccugcugcugcccgagcccgaguggaccuaccccagacugagcugccccggcagcaccuuccagaaggcccugcugaucagcccccacagauucggcgagaccaagggcaacagcgccccccugaucaucagagagcccuucaucgccugcggccccaacgagugcaagcacuucgcccugacccacuacgccgcccagcccggcggcuacuacaacggcaccagaggcgacagaaacaagcugagacaccugaucagcgugaagcugggcaagauccccaccguggagaacagcaucuuccacauggccgccuggagcggcagcgccugccacgacggcaaggaguggaccuacaucggcguggacggccccgacaacaacgcccugcugaagaucaaguacggcgaggccuacaccgacaccuaccacagcuacgccaacaacauccugagaacccaggagagcgccugcaacugcaucggcggcaacugcuaccugaugaucaccgacggcagcgccagcggcgugagcgagugcagauuccugaagaucagagagggcagaaucaucaaggagaucuuccccaccggcagagugaagcacaccgaggagugcaccugcggcuucgccagcaacaagaccaucgagugcgccugcagagacaacagcuacaccgccaagagacccuucgugaagcugaacguggagaccgacaccgccgagaucagacugaugugcaccgacaccuaccuggacacccccagacccgacgacggcagcaucaccggccccugcgagagcaacggcgacaagggcagcggcggcaucaagggcggcuucgugcaccagagaauggccagcaagaucggcagaugguacagcagaaccaugagcaagaccgagagaaugggcaugggccuguacgugaaguacgacggcgaccccugggccgacagcgacgcccuggccuucggcggcgugauggugagcaugaaggagcccggcugguacagcuucggcuucgagaucaaggacaagaagugcgacgugcccugcaucggcaucgagauggugcacgacggcggcaaggagaccuggcacagcgccgccaccgccaucuacugccugaugggcagcggccagcugcugugggacaccgugaccggcguggacauggcccuguga

SEQ ID NO: 188786 - RNA, 1401 nt, Artificial Sequence; identical to SEQ ID NO: 188695
  derived and/or modified CDS sequence (opt4) from neuraminidase__InfluenzaB__ACA65013

SEQ ID NO: 188787 - RNA, 1401 nt, Artificial Sequence; identical to SEQ ID NO: 188695
  derived and/or modified CDS sequence (opt4) from neuraminidase__InfluenzaB__ACA65024

SEQ ID NO: 188788 - RNA, 1401 nt, Artificial Sequence
  derived and/or modified CDS sequence (opt4) from neuraminidase__InfluenzaB__ACA65035
augcugcccagcaccauccagacccugacccuguuccugaccagcggcggcgugcugcugagccuguacgugagcgccagccugagcuaccugcuguacagcgacauccugcugaaguucagccccaccgagaucaccgcccccaccaugccccuggacugcgccaacgccagcaacgugcaggccgugaacagaagcgccaccaagggcgugacccugcugcugcccgagcccgaguggaccuaccccagacugagcugccccggcagcaccuuccagaaggcccugcugaucagcccccacagauucggcgagaccaagggcaacagcgccccccugaucaucagagagcccuucaucgccugcggccccaacgagugcaagcacuucgcccugacccacuacgccgcccagcccggcggcuacuacaacggcaccagaggcgacagaaacaagcugagacaccugaucagcgugaagcugggcaagauccccaccguggagaacagcaucuuccacauggccgccuggagcggcagcgccugccacgacggcaaggaguggaccuacaucggcguggacggccccgacaacaacgcccugcugaagaucaaguacggcgaggccuacaccgacaccuaccacagcuacgccagcaagauccugagaacccaggagagcgccugcaacugcaucggcggcaacugcuaccugaugaucaccgacggcagcgccagcggcgugagcgagugcagauuccugaagaucagagagggcagaaucaucaaggagaucuuccccaccggcagagugaagcacaccgaggagugcaccugcggcuucgccagcaacaagaccaucgagugcgccugcagagacaacagcuacaccgccaagagacccuucgugaagcugaacguggagaccgacaccgccgagaucagacugaugugcaccgacaccuaccuggacacccccagacccgacgacggcagcaucaccggccccugcgagagcaacggcgacaagggcagcggcggcaucaagggcggcuucgugcaccagagaauggccagcaagaucggcagaugguacagcagaaccaugagcaagaccgagagaaugggcaugggccuguacgugaaguacgacggcgaccccugggccgacagcgacgcccuggccuucagcggcgugauggugagcaugaaggagcccggcugguacagcuucggcuucgagaucaaggacaagaagugcgacgugcccugcaucggcaucgagauggugcacgacggcggcaaggagaccuggcacagcgccgccaccgccaucuacugccugaugggcagcggccagcugcugugggacaccgugaccggcguggacauggcccuguga

SEQ ID NO: 188789 - RNA, 1401 nt, Artificial Sequence; identical to SEQ ID NO: 188695
  derived and/or modified CDS sequence (opt4) from neuraminidase__InfluenzaB__ACA65046

SEQ ID NO: 188790 - RNA, 1401 nt, Artificial Sequence
  derived and/or modified CDS sequence (opt4) from neuraminidase__InfluenzaB__ACA65057
augcugcccagcaccauccagacccugacccuguuccugaccagcggcggcgugcugcugagccuguacgugagcgccagccugagcuaccugcuguacagcgacauccugcugaaguucagccccaccgagaucaccgcccccaccaugccccuggacugcgccaacgccagcaacgugcaggccgugaacagaagcgccaccaagggcgugacccugcugcugcccgagcccgaguggaccuaccccagacugagcugccccggcagcaccuuccagaaggcccugcugaucagcccccacagauucggcgagaccaagggcaacagcgccccccugaucaucagagagcccuucaucgccugcggccccaacgagugcaagcacuucgcccugacccacuacgccgcccagcccggcggcuacuacaacggcaccagaggcgacagaaacaagcugagacaccugaucagcgugaagcugggcaagauccccaccguggagaacagcaucuuccacauggccgccuggagcggcagcgccugccacgacggcaaggaguggaccuacaucggcguggacggccccgacaacaacgcccugcugaagaucaaguacggcgaggccuacaccgacaccuaccacagcuacgccaacaagauccugagaacccaggagagcgccugcaacugcaucggcggcaacugcuaccugaugaucaccgacggcagcgccagcggcgugagcgagugcagauuccugaagaucagagagggcagaaucaucaaggagaucuuccccaccggcagagugaagcacaccgaggagugcaccugcggcuucgccagcaacaagaccaucgagugcgccugcagagacaacagcuacaccgccaagagacccuucgugaagcugaacguggaggccgacaccgccgagaucagacugaugugcaccgacaccuaccuggacacccccagacccgacgacggcagcaucaccggccccugcgaguucaacggcgacaagggcagcggcggcaucaagggcggcuucgugcaccagagaauggccagcaagaucggcagaugguacagcagaaccaugagcaagaccgagagaaugggcaugggccuguacgugaaguacgacggcgaccccugggccgacagcgacgcccuggccuucagcggcgugauggugagcaugaaggagcccggcugguacagcuucggcuucgagaucaaggacaagaagugcgacgugcccugcaucggcaucgagauggugcacgacggcggcaaggagaccuggcacagcgccgccaccgccaucuacugccugaugggcagcggccagcugcugugggacaccgugaccggcguggacauggcccuguga

SEQ ID NO: 188791 - RNA, 1401 nt, Artificial Sequence; identical to SEQ ID NO: 188695
  derived and/or modified CDS sequence (opt4) from neuraminidase__InfluenzaB__ACA65068

SEQ ID NO: 188792 - RNA, 1401 nt, Artificial Sequence; identical to SEQ ID NO: 188695
  derived and/or modified CDS sequence (opt4) from neuraminidase__InfluenzaB__ACA65079

SEQ ID NO: 188793 - RNA, 1401 nt, Artificial Sequence; identical to SEQ ID NO: 188695
  derived and/or modified CDS sequence (opt4) from neuraminidase__InfluenzaB__ACA65090

SEQ ID NO: 188794 - RNA, 1401 nt, Artificial Sequence; identical to SEQ ID NO: 188695
  derived and/or modified CDS sequence (opt4) from neuraminidase__InfluenzaB__ACA65101

SEQ ID NO: 188795 - RNA, 1401 nt, Artificial Sequence
  derived and/or modified CDS sequence (opt4) from neuraminidase__InfluenzaB__ACA96567
augcugcccagcaccauccagacccugacccuguuccugaccagcggcggcgugcugcugagccuguacgugagcgccagccugagcuaccugcuguacagcgacauccugcugaaguucagccccaccgagaucaccgcccccaccaugccccuggacugcgccaacgccagcaacgugcacgccgugaacagaagcgccaccaagggcgugacccugcugcugcccgagcccgagugggccuaccccagacugagcugccccggcagcaccuuccagaaggcccugcugaucagcccccacagauucggcgagaccaagggcaacagcgccccccugaucaucagagagcccuucaucgccugcggccccaacgagugcaagcacuucgcccugacccacuacgccgcccagcccggcggcuacuacaacggcaccagaggcgacagaaacaagcugagacaccugaucagcgugaagcugggcaagauccccaccguggagaacagcaucuuccacauggccgccuggagcggcagcgccugccacgacggcaaggaguggaccuacaucggcguggacggccccgacaacaacgcccugcugaagaucaaguacggcgaggccuacaccgacaccuaccacagcuacgccaacaacauccugagaacccaggagagcgccugcaacugcaucggcggcaacugcuaccugaugaucaccgacggcagcgccagcggcgugagcgagugcagauuccugaagaucagagagggcagaaucaucaaggagaucuuccccaccggcagagugaagcacaccgaggagugcaccugcggcuucgccagcaacaagaccaucgagugcgccugcagagacaacagcuacaccgccaagagacccuucgugaagcugaacguggagaccgacaccgccgagaucagacugaugugcaccgacaccuaccuggacacccccagacccgacgacggcagcaucaccggccccugcgagagcaacggcgacaagggcagcggcggcaucaagggcggcuucgugcaccagagaauggccagcaagaucggcagaugguacagcagaaccaugagcaagaccgagagaaugggcaugggccuguacgugaaguacgacggcgaccccugggccgacagcgacgcccuggccuucagcggcaucauggugagcaugaaggagcccggcugguacagcuucggcuucgagaucaaggacaagaagugcgacgugcccugcaucggcaucgagauggugcacgacggcggcaaggagaccuggcacagcgccgccaccgccaucuacugccugaugggcagcggccagcugcugugggacaccgugaccggcguggacauggcccuguga

SEQ ID NO: 188796 - RNA, 1401 nt, Artificial Sequence; identical to SEQ ID NO: 188695
  derived and/or modified CDS sequence (opt4) from neuraminidase__InfluenzaB__ACA96578

SEQ ID NO: 188797 - RNA, 1401 nt, Artificial Sequence; identical to SEQ ID NO: 188783
  derived and/or modified CDS sequence (opt4) from neuraminidase__InfluenzaB__ACA96589

SEQ ID NO: 188798 - RNA, 1401 nt, Artificial Sequence; identical to SEQ ID NO: 188695
  derived and/or modified CDS sequence (opt4) from neuraminidase__InfluenzaB__ACA96600

SEQ ID NO: 188799 - RNA, 1401 nt, Artificial Sequence
  derived and/or modified CDS sequence (opt4) from neuraminidase__InfluenzaB__ACA96611
augcugcccagcaccauccagacccugacccuguuccugaccagcggcggcgugcugcugagccuguacgugagcgccagccugagcuaccugcuguacagcgacauccugcugaaguucagccccaccgagaucaccgcccccaccaugccccuggacuacgccaacgccagcaacgugcacgccgugaaccacagcgccaccaagggcgugacccugcugcugcccgagcccgaguggaccuaccccagacugagcugccccggcagcaccuuccagaaggcccugcugaucagcccccacagauucggcgagaccaagggcaacagcgccccccugaucaucagagagcccuucaucgccugcggccccaacgagugcaagcacuucgcccugacccacuacgccgcccagcccggcggcuacuacaacggcaccagaggcgacagaaacaagcugagacaccugaucagcgugaagcugggcaagauccccaccguggagaacagcaucuuccacauggccgccuggagcggcagcgccugccacgacggcaaggaguggaccuacaucggcguggacggccccgacaacaacgcccugcugaagaucaaguacggcgaggccuacaccgacaccuaccacagcuacgccaacaacauccugagaacccaggagagcgccugcaacugcaucggcggcaacugcuaccugaugaucaccgacggcagcgccagcggcgugagcgagugcagauuccugaagaucagagagggcagaaucaucaaggagaucuuccccaccggcagagugaagcacaccgaggagugcaccugcggcuucgccagcaacaagaccaucgagugcgccugcagagacaacagcuacaccgccaagagacccuucgugaagcugaacguggagaccgacaccgccgagaucagacugaugugcaccgacaccuaccuggacacccccagacccgacgacggcagcaucaccggccccugcgagagcaacggcgacaagggcagcggcggcaucaagggcggcuucgugcaccagagaauggccagcaagaucggcagaugguacagcagaaccaugagcaagaccgagagaaugggcaugggccuguacgugaaguacgacggcgaccccugggccgacagcgacgcccuggccuucagcggcgugauggugagcaugaaggagcccggcugguacagcuucggcuucgagaucaaggacaagaagugcgacgugcccugcaucggcaucgagauggugcacgacggcggcaaggagaccuggcacagcgccgccaccgccaucuacugccugaugggcagcggcagacugcugugggacaccgugaccggcguggacauggcccuguga

SEQ ID NO: 188800 - RNA, 1401 nt, Artificial Sequence
  derived and/or modified CDS sequence (opt4) from neuraminidase__InfluenzaB__ACA96622
augcugcccagcaccauccagacccugacccuguuccugaccagcggcggcgugcugcugagccuguacgugagcgccagccugagcuaccugcuguacagcgacauccugcugaaguucagccccaccgagaucaccgcccccaccaugccccuggacugcgccaacgccagcaacgugcacgccgugaacagaagcgccaccaagggcgugacccugcugcugcccgagcccgaguggaccuaccccagacugagcugccccggcagcaccuuccagaaggcccugcugaucagcccccacagauucggcgagaccaagggcaacagcgccccccugaucaucagagagcccuucaucgccugcggccccaacgagugcaagcacuucgcccugacccacuacgccgcccagcccggcggcuacuacaacggcaccagaggcgacagaaacaagcugagacaccugaucagcgugaagcugggcaagauccccaccguggagaacagcaucuuccacauggccgccuggagcggcagcgccugccacgacggcaaggaguggaccuacaucggcguggacggccccgacaacaacgcccugcugaagaucaaguacggcgaggccuacaccgacaccuaccacagcuacgccaacaacauccugagaacccaggagagcgccugcaacugcaucggcggcaacugcuaccugaugaucaccgacggcagcgccagcggcgugagcgagugcagauuccugaagaucagagagggcagaaucaucaaggagaucuuccccaccggcagagugaagcacaccgaggagugcaccugcggcuucgccagcaacaagaccaucgagugcgccugcagagacaacagcuacaccgccaagagacccuucgugaagcugaacguggagaccgacaccgccgagaucagacugaugugcaccgacaccuaccuggacacccccagacccgacgacggcagcaucaucggccccugcgagagcaacggcgacaagggcagcggcggcaucaagggcggcuucgugcaccagagaauggccagcaagaucggcagaugguacagcagaaccaugagcaagaccgagagaaugggcaugggccuguacgugaaguacgacggcgaccccugggccgacagcgacgcccuggccuucagcggcgugauggugagcaugaaggagcccggcugguacagcuucggcuucgagaucaaggacaagaagugcgacgugcccugcaucggcaucgagauggugcacgacggcggcaaggagaccuggcacagcgccgccaccgccaucuacugccugaugggcagcggccagcugcugugggacaccgugaccggcguggacauggcccuguga

SEQ ID NO: 188801 - RNA, 1401 nt, Artificial Sequence; identical to SEQ ID NO: 188783
  derived and/or modified CDS sequence (opt4) from neuraminidase__InfluenzaB__ACA96633

SEQ ID NO: 188802 - RNA, 1401 nt, Artificial Sequence
  derived and/or modified CDS sequence (opt4) from neuraminidase__InfluenzaB__ACA96644
augcugcccagcaccauccagacccugacccuguuccugaccagcggcggcgugcugcugagccuguacgugagcgccagccugagcuaccugcuguacagcgacauccugcugaaguucagccccaccgagaucaccgcccccaccaugccccuggacugcgccaacgccagcaacgugcaggccgugaacagaagcgccaccaagggcgugacccugcugcugcccgagcccgaguggaccuaccccagacugagcugccccggcagcaccuuccagaaggcccugcugaucagcccccacagauucggcgagaccaagggcaacagcgccccccugaucaucagagagcccuucaucgccugcggccccaacgagugcaagcacuucgcccugacccacuacgccgcccagcccggcggcuacuacaacggcaccagaggcgacagaaacaagcugagacaccugaucagcaucaagcugggcaagauccccaccguggagaacagcaucuuccacauggccgccuggagcggcagcgccugccacgacggcaaggaguggaccuacaucggcguggacggccccgacaacaacgcccugcugaagaucaaguacggcgaggccuacaccgacaccuaccacagcuacgccaacaagauccugagaacccaggagagcgccugcaacugcaucggcggcaacugcuaccugaugaucaccgacggcagcgccagcggcgugagcgagugcagauuccugaagaucagagagggcagaaucaucaaggagaucuuccccaccggcagagugaagcacaccgaggagugcaccugcggcuucgccagcaacaagaccaucgagugcgccugcagagacaacagcuacaccgccaagagacccuucgugaagcugaacguggagaccgacaccgccgagaucagacugaugugcaccgacaccuaccuggacacccccagacccgacgacggcagcaucaccggccccugcgagagcaacggcgacaagggcagcggcggcaucaagggcggcuucgugcaccagagaauggccagcaagaucggcagaugguacagcagaaccaugagcaagaccgagagaaugggcaugggccuguacgugaaguacgacggcgaccccugggccgacagcgacgcccuggccuucagcggcgugaugaucagcaugaaggagcccggcugguacagcuucggcuucgagaucaaggacaagaagugcgacgugcccugcaucggcaucgagauggugcacgacggcggcaaggagaccuggcacagcgccgccaccgccaucuacugccugaugggcagcggccagcugcugugggacaccgugaccggcguggacauggcccuguga

SEQ ID NO: 188803 - RNA, 1401 nt, Artificial Sequence
  derived and/or modified CDS sequence (opt4) from neuraminidase__InfluenzaB__ACA96655
augcugcccagcaccauccagacccugacccuguuccugaccagcggcggcgugcugcugagccuguacgugagcgccagccugagcuaccugcuguacagcgacauccugcugaaguucagccagaccgagaucaccgcccccaucaugccccuggacugcgccaacgccagcaacgugcaggccgugaacagaagcgccaccaagggcgugacccugcugcugcccgagcccgaguggaccuaccccagacugagcugccccggcagcaccuuccagaaggcccugcugaucagcccccacagauucggcgagaccaagggcaacagcgccccccugaucaucagagagcccuucaucgccugcggccccaaggagugcaagcacuucgcccugacccacuacgccgcccagcccggcggcuacuacaacggcaccagagaggacagaaacaagcugagacaccugaucagcgugaagcugggcaagauccccaccguggagaacagcaucuuccacauggccgccuggagcggcagcgccugccacgacggcagagaguggaccuacaucggcguggacggccccgacagcaacgcccugcugaagaucaaguacggcgaggccuacaccgacaccuaccacagcuacgccaagaacauccugagaacccaggagagcgccugcaacugcaucggcggcgacugcuaccugaugaucaccgacggccccgccagcggcaucagcgagugcagauuccugaagaucagagagggcagaaucaucaaggagaucuuccccaccggcagagugaagcacaccgaggagugcaccugcggcuucgccagcaacaagaccaucgagugcgccugcagagacaacagcuacaccgccaagagacccuucgugaagcugaacguggagaccgacaccgccgagaucagacugaugugcaccgagaccuaccuggacacccccagacccaacgacggcagcaucaccggccccugcgagagcaacggcgacaagggcagcggcggcaucaagggcggcuucgugcaccagagaauggccagcaagaucggcagaugguacagcagaaccaugagcaagaccaagagaaugggcaugggccuguacgugaaguacgacggcgaccccuggaccgacagcgaggcccuggcccugagcggcgugauggugagcauggaggagcccggcugguacagcuucggcuucgagaucaaggacaagaagugcgacgugcccugcaucggcaucgagauggugcacgacggcggcaagaccaccuggcacagcgccgccaccgccaucuacugccugaugggcagcggccagcugcugugggacaccgugaccggcguggacauggcccuguga

SEQ ID NO: 188804 - RNA, 1401 nt, Artificial Sequence
  derived and/or modified CDS sequence (opt4) from neuraminidase__InfluenzaB__ACA96666
augcugcccagcaccauccagacccugacccuguuccugaccagcggcggcgugcugcugagccuguacgugagcgccagccugagcuaccugcuguacagcgacauccugcugaaguucagccccaccgagaucaccgcccccaccaugccccuggacugcgccaacgccagcaacgugcaggccgugaacagaagcgccaccaagggcgugacccugcugcugcccgagcccgaguggaccuaccccagacugagcugccccggcagcaccuuccagaaggcccugcugaucagcccccacagauucggcgagaccaagggcaacagcgccccccugaucaucagagagcccuucaucgccugcggccccaacgagugcaagcacuucgcccugacccacuacgccgcccagcccggcggcuacuacaacggcaccagagaggacagaaacaagcugagacaccugaucagcgugaagcugggcaagauccccaccguggagaacagcaucuuccacauggccgccuggagcggcagcgccugccacgacggcaaggaguggaccuacaucggcguggacggccccgacaacaacgcccugcugaagaucaaguacggcgaggccuacaccgacaccuaccacagcuacgccaacaagauccugagaacccaggagagcgccugcaacugcaucggcggcaacugcuaccugaugaucaccgacggcagcgccagcggcgugagcgagugcagauuccugaagaucagagagggcagaaucaucaaggagaucuuccccaccggcagagugaagcacaccgaggagugcaccugcggcuucgccagcaacaagaccaucgagugcgccugcagagacaacagcuacaccgccaagagacccuucgugaagcugaacguggagaccgacaccgccgagaucagacugaugugcaccgacaccuaccuggacacccccagacccgacgacggcagcaucaccggccccugcgagagcaacggcgacagaggcagcggcggcaucaagggcggcuucgugcaccagagaauggccagcaagaucggcagaugguacagcagaaccaugagcaagaccgagagaaugggcaugggccuguacgugaaguacgacggcgaccccugggccgacagcgacgcccuggccuucagcggcgugauggugagcaugaaggagcccggcugguacagcuucggcuucgagaucaaggacaagaagugcgacgugcccugcaucggcaucgagauggugcacgacgacggcaaggagaccuggcacagcgccgccaccgccaucuacugccugaugggcagcggccagcugcugugggacaccgugaccggcguggacauggcccuguga

SEQ ID NO: 188805 - RNA, 1401 nt, Artificial Sequence
  derived and/or modified CDS sequence (opt4) from neuraminidase__InfluenzaB__ACD56581
augcugcccagcaccauccagacccugacccuguuccugaccagcggcggcgugcugcugagccuguacgugagcgccagccugagcuaccugcuguacagcgacauccugcugaaguucagcaccaccgagaucaccgcccccaccaugccccuggacugcgccaacgccagcaacgugcaggccgugaacagaagcgccaccaagggcgugacccugcugcugcccgagcccgaguggaccuaccccagacugagcugccccggcagcaccuuccagaaggcccugcugaucagcccccacagauucggcgagaccaagggcaacagcgccccccugaucaucagagagcccuucaucgccugcggccccaaggagugcaagcacuucgcccugacccacuacgccgcccagcccggcggcuacuacaacggcaccagagaggacagaaacaagcugagacaccugaucagcgugaagcugggcaagauccccaccguggagaacagcaucuuccacauggccgccuggagcggcagcgccugccacgacggcaaggaguggaccuacaucggcguggacggccccgacagcaacgcccugcugaagaucaaguacggcgaggccuacaccgacaccuaccacagcuacgccaacaacauccugagaacccaggagagcgccugcaacugcaucggcggcaacugcuaccugaugaucaccgacggcagcgccagcggcaucagcgagugcagauuccugaagaucagagagggcagaaucaucaaggagaucuuccccaccggcagagugaagcacaccgaggagugcaccugcggcuucgccagcaacaagaccaucgagugcgccugcagagacaacagcuacaccgccaagagacccuucgugaagcugaacguggagaccgacaccgccgagaucagacugaugugcaccgagaccuaccuggacacccccagacccgacgacggcagcaucaccggccccugcgagagcaacggcaacaagggcagcggcggcaucaagggcggcuucgugcaccagagaauggccagcaagaucggcagaugguacagcagaaccaugagcaagaccaagagaaugggcaugggccuguacgugaaguacgacggcgaccccuggaccgacagcgacgcccuggcccugagcggcgugauggugagcauggaggagcccggcugguacagcuucggcuucgagaucaaggacaagaagugcgacgugcccugcaucggcaucgagauggugcacgacggcggcaaggagaccuggcacagcgccgccaccgccaucuacugccugaugggcagcggccagcugcugugggacaccgugaccggcguggacauggcccuguga

SEQ ID NO: 188806 - RNA, 1401 nt, Artificial Sequence
  derived and/or modified CDS sequence (opt4) from neuraminidase__InfluenzaB__ACF33793
augcugcccagcaccauccagacccugacccuguuccugaccagcggcggcgugcugcugagccuguacgugagcgccagccugagcuaccugcuguacagcgacauccugcugaaguucagccccaccgagaucaccgcccccaccaugccccuggacugcgccaacgccagcaacgugcaggccgugaacagaagcgccaccaagggcgugacccugcugcugcccgagcccgaguggaccuaccccagacugagcugccccggcagcaccuuccagaaggcccugcugaucagcccccacagauucggcgagaccaagggcaacagcgccccccugaucaucagagagcccuucaucgccugcggccccaacgagugcaagcacuucgcccugacccacuacgccgcccagcccggcggcuacuacaacggcaccagaggcgacagaaacaagcugagacaccugaucagcgugaagcugggcaagauccccaccguggagaacagcaucuuccacauggccgccuggagcggcagcgccugccacgacggcaaggaguggaccuacaucggcguggacggccccgacaacaacgcccugcugaagaucaaguacggcgaggccuacaccgacaccuaccacagcuacgccaacaacauccugagaacccaggagagcgccugcaacugcaucggcggcaacugcuaccugaugaucaccgacggcagcgccagcggcgugagcgagugcagauuccugaagaucagagagggcagaaucaucaaggagaucuuccccaccggcagagugaagcacaccgaggagugcaccugcggcuucgccagcaacaagaccaucgagugcgccugcagagacaacagcuacaccgccaagagacccuucgugaagcugaacguggagaccgacaccgccgagaucagacugaugugcaccgacaccuaccuggacauccccagacccgacgacggcagcaucaccggccccugcgagagcaacggcgacaagggcagcggcggcaucaagggcggcuucgugcaccagagaauggccagcaagaucggcagaugguacagcagaaccaugagcaagaccgagagaaugggcaugggccuguacgugaaguacgacggcgaccccugggccgacagcgacgcccuggccuucagcggcgugauggugagcaugaaggagcccggcugguacagcuucggcuucgagaucaaggacaagaagugcgacgugcccugcaucggcaucgagauggugcacgacggcggcaaggagaccuggcacagcgccgccaccgccaucuacugccugaugggcagcggccagcugcugugggacaccgugaccggcguggacauggcccuguga

SEQ ID NO: 188807 - RNA, 1401 nt, Artificial Sequence
  derived and/or modified CDS sequence (opt4) from neuraminidase__InfluenzaB__ACF33795
augcugcccagcaccauccagacccugacccuguuccugaccagcggcggcgugcugcugagccuguacgugagcgccagccugagcuaccugcuguacagcgacauccugcugaaguuccccagcaccgagaucaccgcccccaccaugccccuggacugcgccaacgccagcaacgugcaggccgugaacagaagcgccaccaagggcgugacccugcugcugcccgagcccgaguggaccuaccccagacugagcugccccggcagcaccuuccagaaggcccugcugaucagcccccacagauucggcgagaccaagggcaacagcgccccccugaucaucagagagcccuucaucgccugcggccccaaggagugcaagcacuucgcccugacccacuacgccgcccagcccggcggcuacuacaacggcaccagaggcgacagaaacaagcugagacaccugaucagcgugaagcugggcaagauccccaccguggagaacagcaucuuccacauggccgccuggagcggcagcgccugccacgacggcaaggaguggaccuacaucggcguggacggccccgacaacaacgcccugcugaagaucaaguacggcgaggccuacaccgacaccuaccacagcuacgccaacaacauccugagaacccaggagagcgccugcaacugcaucggcggcaacugcuaccugaugaucaccgacggcagcgccagcggcgugagcgagugcagauuccugaagaucagagagggcagaaucaucaaggagaucuuccccaccggcagaaucaagcacaccgaggagugcaccugcggcuucgccagcaacaagaccaucgagugcgccugcagagacaacagcuacaccgccaagagacccuucgugaagcugaacguggagaccgacaccgccgagaucagacugaugugcaccgagaccuaccuggacacccccagacccgacgacggcagcaucaccggccccugcgagagcaacggcgacaagggcagcggcggcaucaagggcggcuucgugcaccagagaauggccagcaagaucggcagaugguacagcagaaccaugagcaagaccgagaagaugggcaugggccuguacgugaaguacgacggcgagcccugggccgacagcgacgcccugaccuucagcggcgugauggugagcauggaggagcccggcugguacagcuucggcuucgagaucaaggacaagaagugcgacgugcccugcaucggcaucgagauggugcacgacggcggcaaggagaccuggcacagcgccgccaccgccaucuacugccugaugggcagcggccagcugcugugggacaccgugaccggcgugaacauggcccuguga

SEQ ID NO: 188808 - RNA, 1401 nt, Artificial Sequence
  derived and/or modified CDS sequence (opt4) from neuraminidase__InfluenzaB__ACF33797
augcugcccagcaccauccagacccugacccuguuccugaccagcggcggcgugcugcugagccuguacgugagcgccagccugagcuaccugcuguacagcgacauccugcugaaguucagccccaccgagaucaccgcccccaccaugccccuggacugcgccaacgccagcaacgugcaggccgugaacagaagcgccaccaagggcgugacccugcugcugcccgagcccgaguggaccuaccccagacugagcugccccggcagcaccuuccagaaggcccugcugaucagcccccacagauucggcgagaccaagggcaacagcgccccccugaucaucagagagcccuucaucgccugcggccccaacgagugcaagcacuucgcccugacccacuacgccgcccagcccggcggcuacuacaacggcaccagaggcgacagaaacaagcugagacaccugaucagcgugaagcugggcaagauccccaccguggagaacagcaucuuccacauggccgccuggagcggcagcgccugccacgacggcaaggaguggaccuacaucggcguggacggccccgacaacaacgcccugcugaagaucaaguacggcgaggccuacaccgacaccuaccacagcuacgccaacaacacccugagaacccaggagagcgccugcaacugcaucggcggcaacugcuaccugaugaucaccgacggcagcgccagcggcgugagcgagugcagauuccugaagaucagagagggcagaaucaucaaggagaucuuccccaccggcagagugaagcacaccgaggagugcaccugcggcuucgccagcaacaagaccaucgagugcgccugcagagacaacagcuacaccgccaagagacccuucgugaagcugaacguggagaccgacaccgccgagaucagacugaugugcaccgagaccuaccuggacacccccagacccgacgacggcagcaucaccggccccugcgagagcaacggcgacaagggcagcggcggcaucaagggcggcuucgugcaccagagaauggccagcaagaucggcagaugguacagcagaaccaugagcaagaccgagagaaugggcaugggccuguacgugaaguacgacggcgaccccugggccgacagcgacgcccuggcccugaucggcgugauggugagcauggaggagcccggcugguacagcuucggcuucgagaucaaggacaagaagugcgacgugcccugcaucggcaucgagauggugcacgacggcggcaaggagaccuggcacagcgccgccaccgccaucuacugccugaugggcagcggccagcugcugugggacaccgugaccggcgugaacauggcccuguga

SEQ ID NO: 188809 - RNA, 1401 nt, Artificial Sequence; identical to SEQ ID NO: 188788
  derived and/or modified CDS sequence (opt4) from neuraminidase__InfluenzaB__ACF41662

SEQ ID NO: 188810 - RNA, 1401 nt, Artificial Sequence
  derived and/or modified CDS sequence (opt4) from neuraminidase__InfluenzaB__ACF54140
augcugcccagcaccauccagacccugacccuguuccugaccagcggcggcgugcugcugagccuguacgugagcgccagccugagcuaccugcuguacagcgacauccugcugaaguucagccccaccgagaucaccgcccccaccaugccccuggacugcgccaacgccagcaacgugcaggccgugaacagaagcgccaccaagggcgugacccugcugcugcccgagcccgaguggaccuaccccagacugagcugccccggcagcaccuuccagaaggcccugcugaucagcccccacagauucggcgagaccaagggcaacagcgccccccugaucaucagagagcccuucaucgccugcggccccaacgagugcaagcacuucgcccugacccacuacgccgcccagcccggcggcuacuacaacggcaccaagggcgacagaaacaagcugagacaccugaucagcgugaagcugggcaagauccccaccguggagaacagcaucuuccacauggccgccuggagcggcagcgccugccacgacggcaaggaguggaccuacaucggcguggacggccccgacaacaacgcccugcugaagaucaaguacggcgaggccuacaccgacaccuaccacagcuacgccaacaagauccugagaacccaggagagcgccugcaacugcaucggcggcaacugcuaccugaugaucaccgacggcagcgccagcggcgugagcgagugcagauuccugaagaucagagagggcagaaucaucaaggagaucuuccccaccggcagagugaagcacaccgaggagugcaccugcggcuucgccagcaacaagaccaucgagugcgccugcagagacaacagcuacaccgccaagagacccuucgugaagcugaacguggagaccgacaccgccgagaucagacugaugugcaccgacaccuaccuggacacccccagacccgacgacggcagcaucaccggccccugcgagagcaacggcgacagaggcagcggcggcaucaagggcggcuucgugcaccagagaauggccagcaagaucggcagaugguacagcagaaccaugagcaagaccgagagaaugggcaugggccuguacgugaaguacgacggcgaccccugggccgacagcgacgcccuggccuucagcggcgugauggugagcaugaaggagcccggcugguacagcuucggcuucgagaucaaggacaagaagugcgacgugcccugcaucggcaucgagauggugcacgacggcggcaaggagaccuggcacagcgccgccaccgccaucuacugccugaugggcagcggccagcugcugugggacaccgugaccggcguggacauggcccuguga

SEQ ID NO: 188811 - RNA, 1401 nt, Artificial Sequence
  derived and/or modified CDS sequence (opt4) from neuraminidase__InfluenzaB__ACF54151
augcugcccagcaccauccagacccugacccuguuccugaccagcggcggcgugcugcugagccuguacgugagcgccagccugagcuaccugcuguacagcgacauccugcugaaguuccccagcaccgagaucaccgcccccaccaugccccuggacugcgccaacgccagcaacgugcaggccgugaacagaagcgccaccaagggcgugacccugcugcugcccgagcccgaguggaccuaccccagacugagcugccccggcagcaccuuccagaaggcccugcugaucagcccccacagauucggcgagaccaagggcaacagcgccccccugaucaucagagagcccuucaucgccugcggccccaaggagugcaagcacuucgcccugacccacuacgccgcccagcccggcggcuacuacaacggcaccagaggcaacagaaacaagcugagacaccugaucagcgugaagcugggcaagauccccaccguggagaacagcaucuuccacauggccgccuggagcggcagcgccugccacgacggcaaggaguggaccuacaucggcguggacggccccgacaacaacgcccugcugaagaucaaguacggcgaggccuacaccgacaccuaccacagcuacgccaacaacauccugagaacccaggagagcgccugcaacugcaucggcggcaacugcuaccugaugaucaccgacggcagcgccagcggcgugagcgagugcagauuccugaagaucagagagggcagaaucaucaaggagaucuuccccaccggcagaaucaagcacaccgaggagugcaccugcggcuucgccagcaacaagaccaucgagugcgccugcagagacaacagcuacaccgccaagagacccuucgugaagcugaacguggagaccgacaccgccgagaucagacugaugugcaccgagaccuaccuggacacccccagacccgacgacggcagcaucaccggccccugcgagagcaacggcgacaagggcagcggcggcaucaagggcggcuucgugcaccagagaauggccagcaagaucggcagaugguacagcagaaccaugagcaagaccaagagaaugggcaugggccuguacgugaaguacgacggcgaccccugggccgacagcgacgcccuggccuucagcggcgugauggugagcauggaggagcccggcugguacagcuucggcuucgagaucaaggacaagaagugcgacgugcccugcaucggcaucgagauggugcacgacggcggcaaggagaccuggcacagcgccgccaccgccaucuacugccugaugggcagcggccagcugcugugggacaccgugaccggcgugaacauggcccuguga

SEQ ID NO: 188812 - RNA, 1401 nt, Artificial Sequence
  derived and/or modified CDS sequence (opt4) from neuraminidase__InfluenzaB__ACF54162
augcugcccagcaccauccagacccugacccuguuccugaccagcggcggcgugcugcugagccuguacgugagcgccagccugagcuaccugcuguacagcgacauccugcugaaguucagccagaccgagaucaccgcccccaucaugccccuggacugcgccaacgccagcaacgugcaggccgugaacagaagcgccaccaagggcgugacccugcugcugcccgagcccgaguggaccuaccccagacugagcugccccggcagcaccuuccagaaggcccugcugaucagcccccacagauucggcgagaccaagggcaacagcgccccccugaucaucagagagcccuucaucgccugcggccccaaggagugcaagcacuucgcccugacccacuacgccgcccagcccggcggcuacuacaacggcaccagagaggacagaaacaagcugagacaccugaucagcgugaagcugggcaagauccccaccguggagaacagcaucuuccacauggccgccuggagcggcagcgccugccacgacggcaaggaguggaccuacaucggcguggacggccccgacagcaacgcccugcugaagaucaaguacggcgaggccuacaccgacaccuaccacagcuacgccaagaacauccugagaacccaggagagcgccugcaacugcaucggcggcgacugcuaccugaugaucaccgacggccccgccagcggcaucagcgagugcagauuccugaagaucagagagggcagaaucaucaaggagaucuuccccaccggcagagugaagcacaccgaggagugcaccugcggcuucgccagcaacaagaccaucgagugcgccugcagagacaacaacuacaccgccaagagacccuucgugaagcugaacguggagaccgacaccgccgagaucagacugaugugcaccgagaccuaccuggacacccccagacccaacgacggcagcaucaccggccccugcgagagcgacggcgacaagggcagcggcggcaucaagggcggcuucgugcaccagagaauggccagcaagaucggcagaugguacagcagaaccaugagcaagaccaagagaaugggcauggagcuguacgugaaguacgacggcgaccccuggaccgacagcgaggcccuggcccugagcggcgugauggugagcauggaggagcccggcugguacagcuucggcuucgagaucaaggacaagaagugcgacgugcccugcaucggcaucgagauggugcacgacggcggcaagaccaccuggcacagcgccgccaccgccaucuacugccugaugggcagcggccagcugcugugggacaccgugaccggcguggacauggcccuguga

SEQ ID NO: 188813 - RNA, 1401 nt, Artificial Sequence
  derived and/or modified CDS sequence (opt4) from neuraminidase__InfluenzaB__ACF54184
augcugcccagcaccauccagacccugacccuguuccugaccagcggcggcgugcugcugagccuguacgugagcgccagccugagcuaccugcuguacagcgacauccugcugaaguucagcaccaccgagaucaccgcccccaccaugccccuggacugcgccaacgccagcaacgugcaggccgugaacagaagcgccaccaagggcgugacccugcugcugcccgagcccgaguggaccuaccccagacugagcugccccggcagcaccuuccagaaggcccugcugaucagcccccacagauucggcgagaccaagggcaacagcgccccccugaucaucagagagcccuucaucgccugcggccccaaggagugcaagcacuucgcccugacccacuacgccgcccagcccggcggcuacuacaacggcaccaaggaggacagaaacaagcugagacaccugaucagcgugaagcugggcaagauccccaccguggagaacagcaucuuccacauggccgccuggagcggcagcgccugccacgacggcaaggaguggaccuacaucggcguggacggccccgacagcaacgcccugcugaagaucaaguacggcgaggccuacaccgacaccuaccacagcuacgccaacaacauccugagaacccaggagagcgccugcaacugcaucggcggcaacugcuaccugaugaucaccgacggcagcgccagcggcaucagcgagugcagauuccugaagaucagagagggcagaaucaucaaggagaucuuccccaccggcagagugaagcacaccgaggagugcaccugcggcuucgccagcaacaagaccaucgagugcgccugcagagacaacagcuacaccgccaagagacccuucgugaagcugaacguggagaccgacaccgccgagaucagacugaugugcaccgagaccuaccuggacacccccagacccgacgacggcagcaucaccggccccugcgagagcaacggcaacaagggcagcggcggcaucaagggcggcuucgugcaccagagaauggccagcaagaucggcagaugguacagcagaaccaugagcaagaccaagagaaugggcaugggccuguacgugaaguacgacggcgaccccuggaccgacagcgacgcccuggcccugagcggcgugauggugagcauggaggagcccggcugguacagcuucggcuucgagaucaaggacaagaagugcgacgugcccugcaucggcaucgagauggugcacgacggcggcaaggagaccuggcacagcgccgccaccgccaucuacugccugaugggcagcggccagcugcugugggacaccgugaccggcguggacauggcccuguga

SEQ ID NO: 188814 - RNA, 1401 nt, Artificial Sequence
  derived and/or modified CDS sequence (opt4) from neuraminidase__InfluenzaB__ACF54206
augcugcccagcaccauccagacccugacccuguuccugaccagcggcggcgugcugcugagccuguacgugagcgccagccugagcuaccugcuguacagcgacauccugcugaaguucagcaccaccgagaccaccgcccccaccaugccccuggacugcgccaacgccagcaacgugcaggccgugaacagaagcgccaccaagggcgugacccugcugcugcccgagcccgaguggaccuaccccagacugagcugccccggcagcaccuuccagaaggcccugcugaucagcccccacagauucggcgagaccaagggcaacagcgccccccugaucaucagagagcccuucaucgccugcggccccaaggagugcaagcacuucgcccugacccacuacgccgcccagcccggcggcuacuacaacggcaccagagaggacagaaacaagcugagacaccugaucagcgugaagcugggcaagauccccaccguggagaacagcaucuuccacauggccgccuggagcggcagcgccugccacgacggcaaggaguggaccuacaucggcguggacggccccgacagcaacgcccugcugaagaucaaguacggcgaggccuacaccgacaccuaccacagcuacgccaacaacauccugagaacccaggagagcgccugcaacugcaucggcggcaacugcuaccugaugaucaccgacggcagcgccagcggcaucagcgagugcagauuccugaagaucagagagggcagaaucaucaaggagaucuuccccaccggcagagugaagcacaccgaggagugcaccugcggcuucgccagcaacaagaccaucgagugcgccugcagagacaacagcuacaccgccaagagacccuucgugaagcugaacguggagaccgacaccgccgagaucagacugaugugcaccgagaccuaccuggacacccccagacccgacgacggcagcaucaccggccccugcgagagcaacggcaacaagggcagcggcggcaucaagggcggcuucgugcaccagagaauggccagcaagaucggcagaugguacagcagaaccaugagcaagaccaagagaaugggcaugggccuguacgugaaguacgacggcgaccccuggaccgacagcgacgcccuggcccugagcggcgugauggugagcauggaggagcccggcugguacagcuucggcuucgagaucaaggacaagaagugcgacgugcccugcaucggcaucgagauggugcacgacggcggcaaggagaccuggcacagcgccgccaccgccaucuacugccugaugggcagcggccagcugcugugggacaccgugaccggcguggacauggcccuguga

SEQ ID NO: 188815 - RNA, 1401 nt, Artificial Sequence
  derived and/or modified CDS sequence (opt4) from neuraminidase__InfluenzaB__ACF54217
augcugcccagcaccauccagacccugacccuguuccugaccagcggcggcgugcugcugagccuguacgugagcgccagccugagcuaccugcuguacagcgacauccugcugaaguucagccagaccgagaucaccgcccccaucaugccccuggacugcgccaacgccagcaacgugcaggccgugaaccacagcgccaccaagggcgugacccugcugcugcccgagcccgaguggaccuaccccagacugagcugccccggcagcaccuuccagaaggcccugcugaucagcccccacagauucggcgagaccaagggcaacagcgccccccugaucaucagagagcccuucaucgccugcggccccaaggagugcaagcacuucgcccugacccacuacgccgcccagcccggcggcuacuacaacggcaccagagaggacagaaacaagcugagacaccugaucagcgugaagcugggcaagauccccaccguggagaacagcaucuuccacauggccgccuggagcggcagcgccugccacgacggcagagaguggaccuacaucggcguggacggccccgacagcaacgcccugcugaagaucaaguacggcgaggccuacaccgacaccuaccacagcuacgccaagaacauccugagaacccaggagagcgccugcaacugcaucggcggcgacugcuaccugaugaucaccgacggccccgccagcggcaucagcgagugcagauuccugaagaucagagagggcagaaucaucaaggagaucuuccccaccggcagagugaagcacaccgaggagugcaccugcggcuucgccagcaacaagaccaucgagugcgccugcagagacaacagcuacaccgccaagagacccuucgugaagcugaacguggagaccgacaccgccgagaucagacugaugugcaccgagaccuaccuggacacccccagacccaacgacggcagcaucaccggccccugcgagagcaacggcgacaagggcagcggcggcaucaagggcggcuucgugcaccagagaauggccagcaagaucggcagaugguacagcagaaccaugagcaagaccaagagaaugggcaugggccuguacgugaaguacgacggcgaccccuggaccgacagcgaggcccuggcccugagcggcgugauggugagcauggaggagcccggcugguacagcuucggcuucgagaucaaggacaagaagugcgacgugcccugcaucggcaucgagauggugcacgacggcggcaagaccaccuggcacagcgccgccaccgccaucuacugccugaugggcagcggccagcugcugugggacaccgugaccggcguggacauggcccuguga

SEQ ID NO: 188816 - RNA, 1401 nt, Artificial Sequence; identical to SEQ ID NO: 188707
  derived and/or modified CDS sequence (opt4) from neuraminidase__InfluenzaB__ACF54228

SEQ ID NO: 188817 - RNA, 1401 nt, Artificial Sequence; identical to SEQ ID NO: 188728
  derived and/or modified CDS sequence (opt4) from neuraminidase__InfluenzaB__ACF54239

SEQ ID NO: 188818 - RNA, 1401 nt, Artificial Sequence
  derived and/or modified CDS sequence (opt4) from neuraminidase__InfluenzaB__ACF54261
augcugcccagcaccauccagacccugacccuguuccugaccagcggcggcgugcugcugagccuguacgugagcgccagccugagcuaccugcuguacagcgacauccugcugaaguucagccccaccgagaucaccgcccccaccaugccccuggacugcgccaacgccagcaacgugcaggccgugaacagaagcgccaccaagggcgugacccugcugcugcccgagcccgaguggaccuaccccagacugagcugccccggcagcaccuuccagaaggcccugcugaucagcccccacagauucggcgagaccaagggcaacagcgccccccugaucaucagagagcccuucaucgccugcggccccaaggagugcaagcacuucgcccugacccacuacgccgcccagcccggcggcuacuacaacggcaccagagaggacagaaacaagcugagacaccuggugagcgugaagcugggcaagauccccaccguggagaacagcaucuuccacauggccgccuggagcggcagcgccugccacgacggcaaggaguggaccuacaucggcguggacggccccgacagcaacgcccugcugaagaucaaguacggcgaggccuacaccgacaccuaccacagcuacgccaacaacauccugagaacccaggagagcgccugcaacugcaucggcggcaacugcuaccugaugaucaccgacggcagcgccagcggcaucagcgagugcagauuccugaagaucagagagggcagaaucaucaaggagaucuuccccaccggcagagugaagcacaccgaggagugcaccugcggcuucgccagcaacaagaccaucgagugcgccugcagagacaacagcuacaccgccaagagacccuucgugaagcugaacguggagaccgacaccgccgagaucagacugaugugcaccgagaccuaccuggacacccccagacccgacgacggcagcaucaccggccccugcgagagcaacggcgacaagggcagcggcggcaucaagggcggcuucgugcaccagagaauggccagcaagaucggcagaugguacagcagaaccaugagcaagaccaagagaaugggcaugggccuguacgugaaguacgacggcgaccccuggaccgacagcgacgcccuggcccugagcggcgugauggugagcauggaggagcccggcugguacagcuucggcuucgagaucaaggacaagaagugcgacgugcccugcaucggcaucgagauggugcacgacggcggcaaggagaccuggcacagcgccgccaccgccaucuacugccugaugggcagcggccagcugcugugggacaccgugaccggcguggacauggcccuguga

SEQ ID NO: 188819 - RNA, 1401 nt, Artificial Sequence
  derived and/or modified CDS sequence (opt4) from neuraminidase__InfluenzaB__ACF54272
augcugcccagcaccauccagacccugacccuguuccugaccagcggcggcgugcugcugagccuguacgugagcgccagccugagcuaccugcuguacagcgacauccugcugaaguucagcaccaccgagaucaccgcccccaccaugccccuggacugcgccaacgccagcaacgugcaggccgugaacagaagcgccaccaagggcgugacccugcugcugcccgagcccgaguggaccuaccccagacugagcugccccggcagcaccuuccagaaggcccugcugaucagcccccacagauucggcgagaccaagggcaacagcgccccccugaucaucagagagcccuucaucgccugcggccccaaggagugcaagcacuucgcccugacccacuacgccgcccagcccggcggcuacuacaacggcaccagagaggacagaaacaagcugagacaccugaucagcgugaagcugggcaagauccccaccguggagaacagcaucuuccacauggccgccuggagcggcagcgccugccacgacggcaaggaguggaccuacaucggcguggacggccccgacagcaacgcccugcugaagaucaaguacggcgaggccuacaccgacaccuaccacagcuacgccaacaacauccugagaacccaggagagcgccugcaacugcaucggcggcaacugcuaccugaugaucaccgacggcagcgccagcggcaucagcgagugcagauuccugaagaucagagagggcagaaucaucaaggagaucuuccccaccggcagagugaagcacaccgaggagugcaccugcggcuucgccagcaacaagaccaucgagugcgccugcagagacaacagcuacaccgccaagagacccuucgugaagcugaacguggagaccgacaccgccgagaucagacugaugugcaccgagaccuaccuggacacccccagacccgacgacggcagcaucaccggccccugcgagagcaacggcgacaagggcagcggcggcaucaagggcggcuucgugcaccagagaauggccagcaagaucggcagaugguacagcagaaccaugagcaagaccaagagaaugggcaugggccuguacgugaaguacgacggcgaccccuggaccgacagcgacgcccuggcccugagcggcgugauggugagcauggaggagcccggcugguacagcuucggcuucgagaucaaggacaagaagugcgacgugcccugcaucggcaucgagauggugcacgacggcggcaaggagaccuggcacagcgccgccaccgccaucuacugccugaugggcagcggccagcugcugugggacaccgugaccggcguggacauggcccuguga

SEQ ID NO: 188820 - RNA, 1401 nt, Artificial Sequence
  derived and/or modified CDS sequence (opt4) from neuraminidase__InfluenzaB__ACF54283
augcugcccagcaccauccagacccugacccuguuccugaccagcggcggcgugcugcugagccuguacgugagcgccagccugagcuaccugcuguacagcgacauccugcugaaguucagcaccaccgagaucaccgcccccaccaugccccuggacugcgccaacgccagcaacgugcaggccgugaacagaagcgccaccaagggcgugacccugcugcugcccgagcccgaguggaccuaccccagacugagcugccccggcagcaccuuccagaaggcccugcugaucagcccccacagauucggcgagaccaagggcaacagcgccccccugaucaucagagagcccuucaucgccugcggccccaaggagugcaagcacuucgcccugacccacuacgccgcccagcccggcggcuacuacaacggcaccagagaggacagaaacaagcugagacaccuggugagcgugaagcugggcaagauccccaccguggagaacagcaucuuccacauggccgccuggagcggcagcgccugccacgacggcaaggaguggaccuacaucggcguggacggccccgacagcaacgcccugcugaagaucaaguacggcgaggccuacaccgacaccuaccacagcuacgccaacaacauccugagaacccaggagagcgccugcaacugcaucggcggcaacugcuaccugaugaucaccgacggcagcgccagcggcaucagcgagugcagauuccugaagaucagagagggcagaaucaucaaggagaucuuccccaccggcagagugaagcacaccgaggagugcaccugcggcuucgccagcaacaagaccaucgagugcgccugcagagacaacagcuacaccgccaagagacccuucgugaagcugaacguggagaccgacaccgccgagaucagacugaugugcaccgagaccuaccuggacacccccagacccgacgacggcagcaucaccggccccugcgagagcaacggcgacaagggcagcggcggcaucaagggcggcuucgugcaccagagaauggccagcaagaucggcagaugguacagcagaaccaugagcaagaccaagagaaugggcaugggccuguacgugaaguacgacggcgaccccuggaccgacagcgacgcccuggcccugagcggcgugauggugagcauggaggagcccggcugguacagcuucggcuucgagaucaaggacaagaagugcgacgugcccugcaucggcaucgagauggugcacgacggcggcaaggagaccuggcacagcgccgccaccgccaucuacugccugaugggcagcggccagcugcugugggacaccgugaccggcguggacauggcccuguga

SEQ ID NO: 188821 - RNA, 1401 nt, Artificial Sequence
  derived and/or modified CDS sequence (opt4) from neuraminidase__InfluenzaB__ACF54294
augcugcccagcaccauccagacccugacccuguuccugaccagcggcggcgugcugcugagccuguacgugagcgccagccugagcuaccugcuguacagcgacauccugcugaaguucagcaccaccgagaucaccgcccccaccaucccccuggacugcgccaacgccagcaacgugcaggccgugaacagaagcgccaccaagggcgugaccuuccugcugcccgagcccgaguggaccuaccccagacugagcugccccggcagcaccuuccagaaggcccugcugaucagcccccacagauucggcgagaccaagggcaacagcgccccccugaucaucagagagcccuucaucgccugcggccccaaggagugcaagcacuucgcccugacccacuacgccgcccagcccggcggcuacuacaacggcaccagagaggacagaaacaagcugagacaccugaucagcgugaagcugggcaagauccccaccguggagaacagcaucuuccacauggccgccuggagcggcagcgccugccacgacggcaaggaguggaccuacaucggcguggacggccccgacagcaacgcccugcugaagaucaaguacggcgaggccuacaccgacaccuaccacagcuacgccaacaacauccugagaacccaggagagcgccugcaacugcaucggcggcaacugcuaccugaugaucaccgacggcagcgccagcggcaucagcgagugcagauuccugaagaucagagagggcagaaucaucaaggagaucuuccccaccggcagagugaagcacaccgaggagugcaccugcggcuucgccagcaacaagaccaucgagugcgccugcagagacaacagcuacaccgccaagagacccuucgugaagcugaacguggagaccgacaccgccgagaucagacugaugugcaccgagaccuaccuggacacccccagacccgacgacggcagcaucaccggccccugcgagagcaacggcaacaagggcagcggcggcaucaagggcggcuucgugcaccagagaauggccagcaagaucggcagaugguacagcagaaccaugagcaagaccaagagaaugggcaugggccuguacgugaaguacgacggcgaccccuggaccgacagcgacgcccuggcccugagcggcgugauggugagcauggaggagcccggcugguacagcuucggcuucgagaucaaggacaagaagugcgacgugcccugcaucggcaucgagauggugcacgacggcggcaaggagaccuggcacagcgccgccaccgccaucuacugccugaugggcagcggccagcugcugugggacaccgugaccggcguggacauggcccuguga

SEQ ID NO: 188822 - RNA, 1401 nt, Artificial Sequence
  derived and/or modified CDS sequence (opt4) from neuraminidase__InfluenzaB__ACF54305
augcugcccagcaccauccagacccugacccuguuccugaccagcggcggcgugcugcugagccuguacgugagcgccagccugagcuaccugcuguacagcgacauccugcugaaguucagcaccaccgagaucaccgcccccaccaugccccuggacugcgccaacgccagcaacgugcaggccgugaacagaagcgccaccaagggcgugaccuuccugcugcccgagcccgaguggaccuaccccagacugagcugccccggcagcaccuuccagaaggcccugcugaucagcccccacagauucggcgagaccaagggcaacagcgccccccugaucaucagagagcccuucaucgccugcggccccaaggagugcaagcacuucgcccugacccacuacgccgcccagcccggcggcuacuacaacggcaccagagaggacagaaacaagcugagacaccugaucagcguggagcugggcaagauccccaccguggagaacagcaucuuccacauggccgccuggagcggcagcgccugccacgacggcaaggaguggaccuacaucggcguggacggccccgacagcaacgcccugcugaagaucaaguacggcgaggccuacaccgacaccuaccacagcuacgccaacaacauccugagaacccaggagagcgccugcaacugcaucggcggcaacugcuaccugaugaucaccgacggcagcgccagcggcaucagcgagugcagauuccugaagaucagagagggcagaaucaucaaggagaucuuccccaccggcagagugaagcacaccgaggagugcaccugcggcuucgccagcaacaagaccaucgagugcgccugcagagacaacagcuacaccgccaagagacccuucgugaagcugaacguggagaccgacaccgccgagaucagacugaugugcaccgagaccuaccuggacacccccagacccgacgacggcagcaucaccggccccugcgagagcaacggcaacaagggcagcggcggcaucaagggcggcuucgugcaccagagaauggccagcaagaucggcagaugguacagcagaaccaugagcaagaccaagagaaugggcaugggccuguacgugaaguacgacggcgaccccuggaccgacagcgacgcccuggcccugagcggcgugauggugagcauggaggagcccggcugguacagcuucggcuucgagaucaaggacaagaagugcgacgugcccugcaucggcaucgagauggugcacgacggcggcaaggagaccuggcacagcgccgccaccgccaucuacugccugaugggcagcggccagcugcugugggacaccgugaccggcguggacauggcccuguga

SEQ ID NO: 188823 - RNA, 1401 nt, Artificial Sequence
  derived and/or modified CDS sequence (opt4) from neuraminidase__InfluenzaB__ACF54316
augcugcccagcaccauccagacccugacccuguuccugaccagcggcggcgugcugcugagccuguacgugagcgccagccugagcuaccugcuguacagcgacauccugcugaaguucagccccaccgagaucaccgcccccaccaugccccuggacugcgccaacgccagcaacgugcaggccgugaacagaagcgccaccaagggcgugacccugcugcugcccgagcccgaguggaccuaccccagacugagcugccccggcagcaccuuccagaaggcccugcugaucagcccccacagauucggcgagaccaagggcaacagcgccccccugaucaucagagagcccuucaucgccugcggccccaacgagugcaagcacuucgcccugacccacuacgccgcccagcccggcggcuacuacaacggcaccagaggcgacagaaacaagcugagacaccugaucagcgugaagcugggcaagauccccaccguggagaacagcaucuuccacauggccgccuggagcggcagcgccugccacgacggcaaggaguggaccuacaucggcguggacggccccgacaacaacgcccugcugaagaucaaguacggcgaggccuacaccgacaccuaccacagcuacgccaacaacauccugagaacccaggagagcgccugcaacugcaucggcggcaacugcuaccugaugaucaccgacggcagcgccagcggcgugagcgagugcagauuccugaagaucagagagggcagaaucaucaaggagaucuuccccaccggcagagugaagcacaccgaggagugcaccugcggcuucgccagcaacaagaccaucgagugcgccugcagagacaacagcuacaccgccaagagacccuucgugaagcugaacguggagaccgacaccgccgagaucagacugaugugcaccgagaccuaccuggacacccccagacccgacgacggcagcaucaccggccccugcgagagcaacggcgacaagggcagcggcggcaucaagggcggcuucgugcaccagagaauggccagcaagaucggcagaugguacagcagaaccaugagcaagaccgagagaaugggcaugggccuguacgugaaguacgacggcgaccccugggccgacagcgacgcccuggcccugaucggcgugauggugagcauggaggagcccggcugguacagcuucggcuucgagaucaaggacaagaacugcgacgugcccugcaucggcaucgagauggugcacgacggcggcaaggagaccuggcacagcgccgccaccgccaucuacugccugaugggcagcggccagcugcugugggacaccgugaccggcgugaacauggcccuguga

SEQ ID NO: 188824 - RNA, 1404 nt, Artificial Sequence
  derived and/or modified CDS sequence (opt4) from neuraminidase__InfluenzaB__ACF54338
augcugcccagcaccauccagacccugacccuguuccugaccagcggcggcgugcugcugagccuguacgugagcgccagccugagcuaccugcuguacagcgacauccugcugaaguuccccagcaccgagaucaccgcccccaccaugccccuggacugcgccaacgccagcaacgugcaggccgugaacagaagcgccaccaagggcgugacccugcugcugcugcccgagcccgaguggaccuaccccagacugagcugccccggcagcaccuuccagaaggcccugcugaucagcccccacagauucggcgagaccaagggcaacagcgccccccugaucaucagagagcccuucaucgccugcggccccaaggagugcaagcacuucgcccugacccacuacgccgcccagcccggcggcuacuacaacggcaccagaggcgacagaaacaagcugagacaccugaucagcgugaagcugggcaagauccccaccguggagaacagcaucuuccacauggccgccuggagcggcagcgccugccacgacggcaaggaguggaccuacaucggcguggacggccccgacaacaacgcccugcugaagaucaaguacggcgaggccuacaccgacaccuaccacagcuacgccaacaacauccugagaacccaggagagcgccugcaacugcaucggcggcaacugcuaccugaugaucaccgacggcagcgccagcggcgugagcgagugcagauuccugaagaucagagagggcagaaucaucaaggagaucuuccccaccggcagaaucaagcacaccgaggagugcaccugcggcuucgccagcaacaagaccaucgagugcgccugcagagacaacagcuacaccgccaagagacccuucgugaagcugaacguggagaccgacaccgccgagaucagacugaugugcaccgagaccuaccuggacacccccagacccgacgacggcagcaucaccggccccugcgagagcaacggcggcaagggcagcggcggcaucaagggcggcuucgugcaccagagaauggccagcaagaucggcagaugguacagcagaaccaugagcaagaccgagagaaagggcaugggccuguacgugaaguacgacggcgaccccugggccgacagcgacgcccugguguucagcggcgugauggugagcauggaggagcccggcugguacagcuucggcuucgagaucaaggacaagaagugcgacgugcccugcaucggcaucgagauggugcacgacggcggcaaggagaccuggcacagcgccgccaccgccaucuacugccugaugggcagcggccagcugcugugggacaccgugaccggcgugaacauggcccuguga

SEQ ID NO: 188825 - RNA, 1401 nt, Artificial Sequence
  derived and/or modified CDS sequence (opt4) from neuraminidase__InfluenzaB__ACF54349
augcugcccagcaccauccagacccugacccuguuccugaccagcggcggcgugcugcugagccuguacgugagcgccagccugagcuaccugcuguacagcgacauccugcugaaguucagccagaccgagaucaccgcccccaucaugccccuggacugcgccaacgccagcaacgugcaggccgugaacagaagcgccgccaagggcgugacccugcugcugcccgagcccgaguggaccuaccccagacugagcugccccggcagcaccuuccagaaggcccugcugaucaacccccacagauucggcgagaccaagggcaacagcgccccccugaucaucagagagcccuucaucgccugcggccccaccgagugcaagcacuucgcccugacccacuacgccgcccagcccggcggcuacuacaacggcaccagagaggacagaaacaagcugagacaccugaucagcgugaagcugggcaagauccccaccguggagaacagcaucuuccacauggccgccuggagcggcagcgccugccacgacggcaaggaguggaccuacaucggcguggacggccccgacagcaacgcccugcugaagaucaaguacggcgaggccuacaccgacaccuaccacagcuacgccaagaacauccugagaacccaggagagcgccugcaacugcaucggcggcgacugcuaccugaugaucaccgacggcagcgccagcggcaucagcgagugcagauuccugaagaucagagagggcagaaucaucaaggagaucuuccccaccggcagagugaagcacaccgaggagugcaccugcggcuucgccagcaacaagaccaucgagugcgccugcagagacaacagcuacaccgccaagagacccuucgugaagcugaacguggagaccgacaccgccgagaucagacugaugugcaccgagaccuaccuggacacccccagacccaacgacggcagcaucaccggccccugcgagagcgacggcgacaagggcagcggcggcaucaagggcggcuucgugcaccagagaauggccagcaagaucggcagaugguacagcagaaccaugagcaagaccaagagaaugggcaugggccuguacgugaaguacgacggcgaccccuggaccgacagcgaggcccuggcccugagcggcgugauggugagcauggaggagcccggcugguacagcuucggcuucgagaucaaggacaagaagugcgacgugcccugcaucggcaucgagauggugcacgacggcggcaagaccaccuggcacagcgccgccaccgccaucuacugccugaugggcagcggccagcugcugugggacaccgugaccggcguggacauggcccuguga

SEQ ID NO: 188826 - RNA, 1401 nt, Artificial Sequence
  derived and/or modified CDS sequence (opt4) from neuraminidase__InfluenzaB__ACF54371
augcugcccagcaccauccagacccugacccuguuccugaccagcggcggcgugcugcugagccuguacgugagcgccagccugagcuaccugcuguacagcgacauccugcugaaguucagccagaccgagaucaccgcccccaucaugccccuggacugcgccaacgccagcaacgugcaggccgugaacagaagcgccgccaagggcgugacccugcugcugcccgagcccgaguggaccuaccccagacugagcugccccggcagcaccuuccagaaggcccugcugaucagcccccacagauucggcgagaccaagggcaacagcgccccccugaucaucagagagcccuucaucgccugcggccccaccgagugcaagcacuucgcccugacccacuacgccgcccagcccggcggcuacuacaacggcaccagagaggacagaaacaagcugagacaccugaucagcgugaagcugggcaagauccccaccguggagaacagcaucuuccacauggccgccuggagcggcagcgccugccacgacggcaaggaguggaccuacaucggcguggacggccccgacagcaacgcccugcugaagaucaaguacggcgaggccuacaccgacaccuaccacagcuacgccaagaacauccugagaacccaggagagcgccugcaacugcaucggcggcgacugcuaccugaugaucaccgacggccccgccagcggcaucagcgagugcagauuccugaagaucagagagggcagaaucaucaaggagaucuuccccaccggcagagugaagcacaccgaggagugcaccugcggcuucgccagcaacaagaccaucgagugcgccugcagagacaacagcuacaccgccaagagacccuucgugaagcugaacguggagaccgacaccgccgagaucagacugaugugcaccgagaccuaccuggacacccccagacccaacgacggcagcaucaccggccccugcgagagcgacggcgacaagggcagcggcggcaucaagggcggcuucgugcaccagagaauggccagcaagaucggcagaugguacagcagaaccaugagcaagaccaagagaaugggcaugggccuguacgugaaguacgacggcgaccccuggaccgacagcgaggcccuggcccugagcggcgugauggugagcauggaggagcccggcugguacagcuucggcuucgagaucaaggacaagaagugcgacgugcccugcaucggcaucgagauggugcacgacggcggcaagaccaccuggcacagcgccgccaccgccaucuacugccugaccggcagcggccagcugcugugggacaccgugaccggcguggacauggcccuguga

SEQ ID NO: 188827 - RNA, 1401 nt, Artificial Sequence
  derived and/or modified CDS sequence (opt4) from neuraminidase__InfluenzaB__ACI22549
augcugcccagcaccauccagacccugacccuguuccugaccagcggcggcgugcugcugagccuguacgugagcgccagccugagcuaccugcuguacagcgacauccugcugaaguucagccccaccgagaucaccgccagaaccaugccccuggacugcgccaacgccagcaacgugcaggccgugaacagaagcgccaccaagggcgugacccugcugcugcccgagcccgaguggaccuaccccagacugagcugccccggcagcaccuuccagaaggcccugcugaucagcccccacagauucggcgagaccaagggcaacagcgccccccugaucaucagagagcccuucaucgccugcggccccaacgagugcaagcacuucgcccugacccacuacgccgcccagcccggcggcuacuacaacggcaccagaggcgacagaaacaagcugagacaccugaucagcgugaagcugggcaagauccccaccguggaggacagcaucuuccacauggccgccuggagcggcagcgccugccacgacggcaaggaguggaccuacaucggcguggacggccccgacaacaacgcccugcugaagaucaaguacggcgaggccuacaccgacaccuaccacagcuacgccaacaacauccugagaacccaggagagcgccugcaacugcaucggcggcaacugcuaccugaugaucaccgacggcagcgccagcggcgugagcgagugcagauuccugaagaucagagagggcagaaucaucaaggagaucuuccccaccggcagagugaagcacaccgaggagugcaccugcggcuucgccagcaacaagaccaucgagugcgccugcagagacaacagcuacaccgccaagagacccuucgugaagcugaacguggagaccgacaccgccgagaucagacugaugugcaccgagaccuaccuggacacccccagacccgacgacggcagcaucaccggccccugcgagagcaacggcgacaagggcagcggcggcaucaagggcggcuucgugcaccagagaauggccagcaagaucggcagaugguacagcagaaccaugagcaagaccgagagaaugggcaugggccuguacgugaaguacgacggcgaccccugggccgacagcgacgcccuggcccugaucggcgugauggugagcauggaggagcccggcugguacagcuucggcuucgagaucaaggacaagaacugcgacgugcccugcaucggcaucgagauggugcacgacggcggcaaggagaccuggcacagcgccgccaccgccaucuacugccugaugggcagcggccagcugcugugggacaccgugaccggcgugaacauggcccuguga

SEQ ID NO: 188828 - RNA, 1401 nt, Artificial Sequence
  derived and/or modified CDS sequence (opt4) from neuraminidase__InfluenzaB__ACI22551
augcugcccagcaccauccagacccugacccuguuccugaccagcggcggcgugcugcugagccuguacgugagcgccagccugagcuaccugcuguacagcgacauccugcugaaguucagccccaccgagaucaccgcccugaccaugccccuggacugcgccaacgccagcaacgugcaggccgugaacagaagcgccaccaagggcgugacccugcugcugcccgagcccgaguggaccuaccccagacugagcugccccggcagcaccuuccagaaggcccugcugaucagcccccacagauucggcgagaccaagggcaacagcgccccccugaucaucagagagcccuucaucgccugcggccccaacgagugcaagcacuucgcccugacccacuacgccgcccagcccggcggcuacuacaacggcaccagaggcgacagaaacaagcugagacaccugaucagcgugaagcugggcaagauccccaccguggagaacagcaucuuccacauggccgccuggagcggcagcgccugccacgacggcaaggaguggaccuacaucggcguggacggccccgacaacaacgcccugcugaagaucaaguacggcgaggccuacaccgacaccuaccacagcuacgccaacaacauccugagaacccaggagagcgccugcaacugcaucggcggcaacugcuaccugaugaucaccgacggcagcgccagcggcgugagcgagugcagauuccugaagaucagagagggcagaaucaucaaggagaucuuccccaccggcagagugaagcacaccgaggagugcaccugcggcuucgccagcaacaagaccaucgagugcgccugcagagacaacagcuacaccgccaagagacccuucgugaagcugaacguggagaccgacaccgccgagaucagacugaugugcaccgagaccuaccuggacacccccagacccgacgacggcagcaucaccggccccugcgagagcaacggcgacaagggcagcggcggcaucaagggcggcuucgugcaccagagaauggccagcaagaucggcagaugguacagcagaaccaugagcaagaccgagagaaugggcaugggccuguacgugaaguacgacggcgaccccugggccgacagcgacgcccuggcccugaucggcgugauggugagcauggaggagcccggcugguacagcuucggcuucgagaucaaggacaagaacugcgacgugcccugcaucggcaucgagauggugcacgacggcggcaaggagaccuggcacagcgccgccaccgccaucuacugccugaugggcagcggccagcugcugugggacaccgugaccggcgugaacauggcccuguga

SEQ ID NO: 188829 - RNA, 1401 nt, Artificial Sequence; identical to SEQ ID NO: 188828
  derived and/or modified CDS sequence (opt4) from neuraminidase__InfluenzaB__ACI22555

SEQ ID NO: 188830 - RNA, 1401 nt, Artificial Sequence; identical to SEQ ID NO: 188695
  derived and/or modified CDS sequence (opt4) from neuraminidase__InfluenzaB__ACI22557

SEQ ID NO: 188831 - RNA, 1401 nt, Artificial Sequence
  derived and/or modified CDS sequence (opt4) from neuraminidase__InfluenzaB__ACI22559
augcugcccagcaccauccagacccugacccuguuccugaccagcggcggcgugcugcugagccuguacgugagcgccagccugagcuaccugcuguacagcgacauccugcugaaguuccccagcaccgagaucaccgcccccaccaugccccuggacugcgccaacgccagcaacgugcaggccgugaaccugagcgccaccaagggcgugacccugcugcugcccgagcccgaguggaccuaccccagacugagcugccccggcagcaccuuccagaaggcccugcugaucagcccccacagauucggcgagaccaagggcaacagcgccccccugaucaucagagagcccuucaucgccugcggccccaaggagugcaagcacuucgcccugacccacuacgccgcccagcccggcggcuacuacaacggcaccagaggcgacagaaacaagcugagacaccugaucagcgugaagcugggcaagauccccaccguggagaacagcaucuuccacauggccgccuggagcggcagcgccugccacgacggcaaggaguggaccuacaucggcguggacggccccgacaacaacgcccugcugaagaucaaguacggcgaggccuacaccgacaccuaccacagcuacgccaacaacauccugagaacccaggagagcgccugcaacugcaucggcggcaacugcuaccugaugaucaccgacggcagcgccagcggcgugagcgagugcagauuccugaagaucagagagggcagaaucaucaaggagaucuuccccaccggcagaaucaagcacaccgaggagugcaccugcggcuucgccagcaacaagaccaucgagugcgccugcagagacaacagcuacaccgccaagagacccuucgugaagcugaacguggagaccgacaccgccgagaucagacugaugugcaccgagaccuaccuggacacccccagacccgacgacggcagcaucaccggccccugcgagagcaacggcggcaagggcagcggcggcaucaagggcggcuucgugcaccagagaauggccagcaagaucggcagaugguacagcagaaccaugagcaagaccgagagaaagggcaugggccuguacgugaaguacgacggcgaccccugggccgacagcgacgcccuggccuucagcggcgugauggugagcauggaggagcccggcugguacagcuucggcuucgagaucaaggacaagaagugcgacgugcccugcaucggcaucgagauggugcacgacggcggcaaggagaccuggcacagcgccgccaccgccaucuacugccugaugggcagcggccagcugcugugggacaccgugaccggcgugaacauggcccuguga

SEQ ID NO: 188832 - RNA, 1401 nt, Artificial Sequence
  derived and/or modified CDS sequence (opt4) from neuraminidase__InfluenzaB__ACI22561
augcugcccagcaccauccagacccugacccuguuccugaccagcggcggcgugcugcugagccuguacgugagcgccagccugagcuaccugcuguacagcgacauccugcugaaguucagccccaccgagaucaccgcccccaccaugccccuggacugcgccaacgccagcaacgugcaggccgugaacagaagcgccaccaagggcggcacccugcugcugcccgagcccgaguggaccuaccccagacugagcugccccggcagcaccuuccagaaggcccugcugaucagcccccacagauucggcgagaccaagggcaacagcgccccccugaucaucagagagcccuucaucgccugcggccccaacgagugcaagcacuucgcccugacccacuacgccgcccagcccggcggcuacuacaacggcaccagaggcgacagaaacaagcugagacaccugaucagcgugaagcugggcaagauccccaccguggagaacagcaucuuccacauggccgccuggagcggcagcgccugccacgacggcaaggaguggaccuacaucggcguggacggccccgacaacaacgcccugcugaagaucaaguacggcgaggccuacaccgacaccuaccacagcuacgccaacaagauccugagaacccaggagagcgccugcaacugcaucggcggcaacugcuaccugaugaucaccgacggcagcgccagcggcgugagcgagugcagauuccugaagaucagagagggcagaaucaucaaggagaucuuccccaccggcagagugaagcacaccgaggagugcaccugcggcuucgccagcaacaagaccaucgagugcgccugcagagacaacagcuacaccgccaagagacccuucgugaagcugaacguggagaccgacaccgccgagaucagacugaugugcaccgacaccuaccuggacacccccagacccgacgacggcagcaucaccggccccugcgagagcaacggcgacaagggcagcggcggcaucaagggcggcuucgugcaccagagaauggccagcaagaucggcagaugguacagcagaaccaugagcaagaccgagagaaugggcaugggccuguacgugaaguacgacggcgaccccugggccgacagcgacgcccuggccuucagcggcgugauggugagcaugaaggagcccggcugguacagcuucggcuucgagaucaaggacaagaagugcgacgugcccugcaucggcaucgagauggugcacgacggcggcaaggagaccuggcacagcgccgccaccgccaucuacugccugaugggcagcggccagcugcugugggacaccgugaccggcguggacauggcccuguga

SEQ ID NO: 188833 - RNA, 1401 nt, Artificial Sequence; identical to SEQ ID NO: 188695
  derived and/or modified CDS sequence (opt4) from neuraminidase__InfluenzaB__ACI22563

SEQ ID NO: 188834 - RNA, 1401 nt, Artificial Sequence
  derived and/or modified CDS sequence (opt4) from neuraminidase__InfluenzaB__ACI22565
augcugcccagcaccauccagacccugacccuguuccugaccagcggcggcgugcugcugagccuguacgugagcgccagccugagcuaccugcuguacagcgacauccugcugaaguuccccagcaccgagaucaccgcccccaccaugccccuggacugcgccaacgccagcaacgugcaggccgugaaccacagcgccaccaagggcgugacccugcugcugcccgagcccgaguggaccuaccccagacugagcugccccggcagcaccuuccagaaggcccugcugaucagcccccacagauucggcgagaccaagggcaacagcgccccccugaucaucagagagcccuucaucgccugcggccccaaggagugcaagcacuucgcccugacccacuacgccgcccagcccggcggcuacuacaacggcaccagaggcgacagaaacaagcugagacaccugaucagcgugaagcugggcaagauccccaccguggagaacagcaucuuccacauggccgccuggagcggcagcgccugccacgacggcaaggaguggaccuacaucggcguggacggccccgacaacaacgcccugcugaagaucaaguacggcgaggccuacaccgacaccuaccacagcuacgccaacaacauccugagaacccaggagagcgccugcaacugcaucggcggcaacugcuaccugaugaucaccgacggcagcgccagcggcgugagcgagugcagauuccugaagaucagagagggcagaaucaucaaggagaucuuccccaccggcagaaucaagcacaccgaggagugcaccugcggcuucgccagcaacaagaccaucgagugcgccugcagagacaacagcuacaccgccaagagacccuucgugaagcugaacguggagaccgacaccgccgagaucagacugaugugcaccgagaccuaccuggacacccccagacccgacgacggcagcaucaccggccccugcgagagcaacggcggcaagggcagcggcggcaucaagggcggcuucgugcaccagagaauggccagcaagaucggcagaugguacagcagaaccaugagcaagaucgagagaaagggcaugggccuguacgugaaguacgacggcgaccccugggccgacagcgacgcccuggccuucagcggcgugauggugagcauggaggagcccggcugguacagcuucggcuucgagaucagagacaagaagugcgacgugcccugcaucggcaucgagauggugcacgacggcggcaaggagaccuggcacagcgccgccaccgccaucuacugccugaugggcagcggccagcugcugugggacaccgugaccggcgugaacauggcccuguga

SEQ ID NO: 188835 - RNA, 1401 nt, Artificial Sequence; identical to SEQ ID NO: 188695
  derived and/or modified CDS sequence (opt4) from neuraminidase__InfluenzaB__ACI22567

SEQ ID NO: 188836 - RNA, 1401 nt, Artificial Sequence; identical to SEQ ID NO: 188695
  derived and/or modified CDS sequence (opt4) from neuraminidase__InfluenzaB__ACI22569

SEQ ID NO: 188837 - RNA, 1401 nt, Artificial Sequence
  derived and/or modified CDS sequence (opt4) from neuraminidase__InfluenzaB__ACJ53908
augcugcacagcaccauccagacccugacccuguuccugaccagcggcggcgugcugcugagccuguacgugagcgccagccugagcuaccugcuguacagcgacauccugcugaaguucagccagaccgagaucaccgcccccaucaugccccuggacugcgccaacgccagcagcgugcaggccgugaacagaagcgccgccaagggcgugacccugcugcugcccgagcccgaguggaccuaccccagacugagcugccccggcagcaccuuccagaaggcccugcugaucagcccccacagauucggcgagaccaagggcaacagcgccccccugaucaucagagagcccuucaucgccugcggccccaccgagugcaagcacuucgcccugacccacuacgccgcccagcccggcggcuacuacaacggcaccagagaggacagaaacaagcugagacaccugaucagcgugaagcugggcaagauccccaccguggagaacagcaucuuccacauggccgccuggagcggcagcgccugccacgacggcaaggaguggaccuacaucggcguggacggccccgacagcaacgcccugcugaagaucaaguacggcgaggccuacaccgacaccuaccacagcuacgccaagaacauccugagaacccaggagagcgccugcaacugcaucggcggcgacugcuaccugaugaucaccgacggccccgccagcggcaucagcgagugcagauuccugaagaucagagagggcagaaucaucaaggagaucuuccccaccggcagagugaagcacaccgaggagugcaccugcggcuucgccagcaacaagaccaucgagugcgccugcagagacaacagcuacaccgccaagagacccuucgugaagcugaacguggagaccgacaccgccgagaucagacugaugugcaccgagaccuaccuggacacccccagacccaacgacggcagcaucaccggccccugcgagagcgacggcgacaagggcagcggcggcaucaagggcggcuucgugcaccagagaauggccagcaagaucggcagaugguacagcagaaccaugagcaagaccaagagaaugggcaugggccuguacgugaaguacgacggcgaccccuggaccgacagcgaggcccuggcccugagcggcgugauggugagcauggaggagcccggcugguacagcuucggcuucgagaucaaggacaagaagugcgacgugcccugcaucggcaucgagauggugcacgacggcggcaagaccaccuggcacagcgccgccaccgccaucuacugccugaugggcagcggccagcugcugugggacaccgugaccggcguggacauggcccuguga

SEQ ID NO: 188838 - RNA, 1401 nt, Artificial Sequence; identical to SEQ ID NO: 188713
  derived and/or modified CDS sequence (opt4) from neuraminidase__InfluenzaB__ACN32560

SEQ ID NO: 188839 - RNA, 1401 nt, Artificial Sequence; identical to SEQ ID NO: 188783
  derived and/or modified CDS sequence (opt4) from neuraminidase__InfluenzaB__ACN32582

SEQ ID NO: 188840 - RNA, 1401 nt, Artificial Sequence; identical to SEQ ID NO: 188695
  derived and/or modified CDS sequence (opt4) from neuraminidase__InfluenzaB__ACN32593

SEQ ID NO: 188841 - RNA, 1401 nt, Artificial Sequence
  derived and/or modified CDS sequence (opt4) from neuraminidase__InfluenzaB__ACN32604
augcugcccagcaccauccagacccugacccuguuccugaccagcggcggcgugcugcugagccuguacgugagcgccagccugagcuaccugcuguacagcgacauccugcugaaguucagccccaccgagaucaccgcccccaccaugccccuggacugcgccaacgccagcaacgugcacgccgugaacagaagcgccaccaagggcgugacccugcugcugcccgagcccgaguggaccuaccccagacugagcugccccggcagcaccuuccagaaggcccugcugaucagcccccacagauucggcgagaccaagggcaacagcgccccccugaucaucagagagcccuucaucgccugcggccccaacgagugcaagcacuucgcccugacccacuacgccgcccagcccggcggcuacuacaacggcaccagaggcgacagaaacaagcugagacaccugaucagcgugaagcugggcaagauccccaccguggagaacagcaucuuccacauggccgccuggagcggcagcgccugccacgacggcaaggaguggaccuacaucggcguggacggccccgacaacaacgcccugcugaagaucaaguacggcgaggccuacaccgacaccuaccacagcuacgccaacaacauccugagaacccaggagagcgccugcaacugcaucggcggcaacugcuaccugaugaucaccgacggcagcgccagcggcgugagcgagugcagauuccugaagaucagagagggcagaaucaucaaggagaucuuccccaccggcagagugaagcacaccgaggagugcaccugcggcuucgccagcaacaagaccaucgagugcgccugcagagacaacagcuacaccgccaagagacccuucgugaagcugaacguggagaccgacaccgccgagaucagacugaugugcaccgacaccuaccuggacacccccagacccgacgacggcagcaucaccggccccugcgaguucaacggcgacaagggcagcggcggcaucaagggcggcuucgugcaccagagaauggccagcaagaucggcagaugguacagcagaaccaugagcaagaccgagagaaugggcaugggccuguacgugaaguacgacggcgaccccugggccgacagcgacgcccuggccuucagcggcgugauggugagcaugaaggagcccggcugguacagcuucggcuucgagaucaaggacaagaagugcgacgugcccugcaucggcaucgagauggugcacgacggcggcaaggagaccuggcacagcgccgccaccgccaucuacugccugaugggcagcggccagcugcugugggacaccgugaccggcguggacauggcccuguga

SEQ ID NO: 188842 - RNA, 1401 nt, Artificial Sequence; identical to SEQ ID NO: 188695
  derived and/or modified CDS sequence (opt4) from neuraminidase__InfluenzaB__ACN32615

SEQ ID NO: 188843 - RNA, 1401 nt, Artificial Sequence
  derived and/or modified CDS sequence (opt4) from neuraminidase__InfluenzaB__ACN32775
augcugcccagcaccauccagacccugacccuguuccugaccagcggcggcgugcugcugagccuguacgugagcgccagccugagcuaccugcuguacagcgacauccugcugaaguucagccccaccgagaucaacgcccccaccaugccccuggacugcgccaacgccagcaacgugcacgccgugaacagaagcgccaccaagggcgugacccugcugcugcccgagcccgaguggaccuaccccagacugagcugccccggcagcaccuuccagaaggcccugcugaucagcccccacagauucggcgagaccaagggcaacagcgccccccugaucaucagagagcccuucaucgccugcggccccaacgagugcaagcacuucgcccugacccacuacgccgcccagcccggcggcuacuacaacggcaccagaggcgacagaaacaagcugagacaccugaucagcgugaagcugggcaagauccccaccguggagaacagcaucuuccacauggccgccuggagcggcagcgccugccacgacggcaaggaguggaccuacaucggcguggacggccccgacaacaacgcccugcugaagaucaaguacggcgaggccuacaccgacaccuaccacagcuacgccaacaacauccugagaacccaggagagcgccugcaacugcaucggcggcaacugcuaccugaugaucaccgacggcagcgccagcggcaucagcgagugcagauuccugaagaucagagagggcagaaucaucaaggagaucuuccccaccggcagagugaagcacaccgaggagugcaccugcggcuucgccagcaacaagagcaucgagugcgccugcagagacaacagcuacaccgccaagagacccuucgugaagcugaacguggagaccgacaccgccgagaucagacugaugugcaccgacaccuaccuggacacccccagacccgacgacggcagcaucaccggccccugcgagagcaacggcgacaagggcagcggcggcaucaagggcggcuucgugcaccagagaauggccagcaagaucggcagaugguacagcagaaccaugagcaagaccgagagaaugggcaugggccuguacgugaaguacgacggcgaccccugggccgacagcgacgcccuggccuucagcggcgugauggugagcaugaaggagcccggcugguacagcuucggcuucgagaucaaggacaagaagugcgacgugcccugcaucggcaucgagauggugcacgacggcggcaaggagaccuggcacagcgccgccaccgccaucuacugccugaugggcagcggccagcugcugugggacaccgugaccggcguggacauggcccuguga

SEQ ID NO: 188844 - RNA, 1401 nt, Artificial Sequence; identical to SEQ ID NO: 188695
  derived and/or modified CDS sequence (opt4) from neuraminidase__InfluenzaB__ACN32786

SEQ ID NO: 188845 - RNA, 1401 nt, Artificial Sequence
  derived and/or modified CDS sequence (opt4) from neuraminidase__InfluenzaB__ACO05928
augcugcccagcaccauccagacccugacccuguuccugaccagcggcggcgugcugcugagccuguacgugagcgccagccugagcuaccugcuguacagcgacauccugcugaaguuccccagcaccgagaucaccgcccccaccaugccccuggacugcgccaacgccagcaacgugcaggccgugaacagaagcgccaccaagggcgugacccugcugcugcccgagcccgaguggaccuaccccagacugagcugccccggcagcaccuuccagaaggcccugcugaucagcccccacagauucggcgagaccaagggcaacagcgccccccugaucaucagagagcccuucaucgccugcggccccaaggagugcaagcacuucgcccugacccacuacgccgcccagcccggcggcuacuacaacggcaccagaggcgacagaaacaagcugagacaccugaucagcgugaagcugggcaagauccccaccguggagaacagcaucuuccacauggccgccuggagcggcagcgccugccacgacggcaaggaguggaccuacaucggcguggacggccccgacaacaacgcccugcugaagaucaaguacggcgaggccuacaccgacaccuaccacagcuacgccaacaacauccugagaacccaggagagcgccugcaacugcaucggcggcaacugcuaccugaugaucaccgacggcagcgccagcggcgugagcgagugcagauuccugaagaucagagagggcagaaucaucaaggagaucuuccccaccggcagaaucaagcacaccgaggagugcaccugcggcuucgccagcaacaagaccaucgagugcgccugcagagacaacagcuacaccgccaagagacccuucgugaagcugaacguggagaccgacaccgccgagaucagacugaugugcaccgagaccuaccuggacacccccagacccgacgacggcagcaucaccggccccugcgagagcaacggcgacaagggcagcggcggcaucaagggcggcuucgugcaccagagaauggccagcaagaucggcagaugguacagcagaaccaugagcaagaccaagagaaugggcaugggccuguacgugaaguacgacggcgaccccugggccgacagcgacgcccuggccuucagcggcgugauggugcccauggaggagcccggcugguacagcuucggcuucgagaucaaggacaagaagugcgacgugcccugcaucggcaucgagauggugcacgacggcggcaaggagaccuggcacagcgccgccaccgccaucuacugccugaugggcagcggccagcugcugugggacaccgugaccggcgugaacauggcccuguga

SEQ ID NO: 188846 - RNA, 1401 nt, Artificial Sequence; identical to SEQ ID NO: 188707
  derived and/or modified CDS sequence (opt4) from neuraminidase__InfluenzaB__ACO05950

SEQ ID NO: 188847 - RNA, 1401 nt, Artificial Sequence
  derived and/or modified CDS sequence (opt4) from neuraminidase__InfluenzaB__ACO05961
augcugcccagcaccauccagacccugacccuguuccugaccagcggcggcgugcugcugagccuguacgugagcgccagccugagcuaccugcccuacagcgacauccugcugaaguuccccagcaccgagaucaccgcccccaccaugccccuggacugcgccaacgccagcaacgugcaggccgugaacagaagcgccaccaagggcgugacccugcugcugcccgagcccgaguggaccuaccccagacugagcugccccggcagcaccuuccagaaggcccugcugaucagcccccacagauucggcgagaccaagggcaacagcgccccccugaucaucagagagcccuucaucgccugcggccccaaggagugcaagcacuucgcccugacccacuacgccgcccagcccggcggcuacuacaacggcaccagaggcgacagaaacaagcugagacaccugaucagcgugaagcugggcaagauccccaccguggagaacagcaucuuccacauggccgccuggagcggcagcgccugccacgacggcaaggaguggaccuacaucggcguggacggccccgacaacaacgcccugcugaagaucaaguacggcgaggccuacaccgacaccuaccacagcuacgccaacaacauccugagaacccaggagagcgccugcaacugcaucggcggcaacugcuaccugaugaucaccgacggcagcgccagcggcgugagcgagugcagauuccugaagaucagagagggcagaaucaucaaggagaucuuccccaccggcagaaucaagcacaccgaggagugcaccugcggcuucgccagcaacaagaccaucgagugcgccugcagagacaacagcuacaccgccaagagacccuucgugaagcugaacguggagaccgacaccgccgagaucagacugaugugcaccgagaccuaccuggacacccccagacccgacgacggcagcaucaccggccccugcgagagcaacggcgacaagggcagcggcggcaucaagggcggcuucgugcaccagagaauggccagcaagaucggcagaugguacagcagaaccaugagcaagaccaagagaaugggcaugggccuguacgugaaguacgacggcgaccccugggccgacagcgacgcccuggccuucagcggcgugauggugagcauggaggagcccggcugguacagcuucggcuucgagaucaaggacaagaagugcgacgugcccugcaucggcaucgagauggugcacgacggcggcaaggagaccuggcacagcgccgccaccgccaucuacugccugaugggcagcggccagcugcugugggacaccgugaccggcgugaacauggcccuguga

SEQ ID NO: 188848 - RNA, 1401 nt, Artificial Sequence
  derived and/or modified CDS sequence (opt4) from neuraminidase__InfluenzaB__ACO05972
augcugcccagcaccauccagacccugacccuguuccugaccagcggcggcgugcugcugagccuguacgugagcgccagccugagcuaccugcuguacagcgacauccugcugaaguucagccagaccgagaucaccgcccccaucaugccccuggacugcgccaacgccagcaacgugcaggccgugaacagaagcgccgccaagggcgugacccugcugcugcccgagcccgaguggaccuaccccagacugagcugccccggcagcaccuuccagaaggcccugcugaucagcccccacagauucggcgagaccaagggcaacagcgccccccugaucaucagagagcccuucaucgccugcggccccaccgagugcaagcacuucgcccugacccacuacgccgcccagcccggcggcuacuacaacggcaccagagaggacagaaacaagcugagacaccugaucagcgugaagcugggcaagauccccaccguggagaacagcaucuuccacauggccgccuggagcggcagcgccugccacgacggcaaggaguggaccuacaucggcguggacggccccgacagcaacgcccugcugaagaucaaguacggcgaggccuacaccgacaccuaccacagcuacgccaagaacauccugagaacccaggagagcgccugcaacugcaucggcggcgacugcuaccugaugaucaccgacggccccgccagcggcaucagcgagugcagauuccugaagaucagagagggcagaaucaucaaggagaucuuccccaccggcagagugaagcacaccgaggagugcaccugcggcuucgccagcaacaagaccaucgagugcgccugcagagacaacagcuacaccgccaagagacccuucgugaagcugaacguggagaccgacaccgccgagaucagacugaugugcaccgagaccuaccuggacacccccagacccaacgacggcagcaucaccggccccugcgagagcgacggcgacaagggcagcggcggcaucaagggcggcuucgugcaccagagaauggccagcaagaucggcagaugguacagcagaaccaugagcaagaccaagagaaugggcaugggccuguacgugaaguacgacggcgaccccuggaccgacagcgaggcccuggcccugagcggcgugauggugagcauggaggagcccggcugguacagcuucggcuucgagaucaaggacaagaagugcgacgugcccugcaucggcaucgagauggugcacgacggcggcaagaccaccuggcacagcgccgccaccgccaucuacugccugaugggcagcggccagcugcugugggacaccgugaccggcguggacauggcccuguga

SEQ ID NO: 188849 - RNA, 1401 nt, Artificial Sequence; identical to SEQ ID NO: 188848
  derived and/or modified CDS sequence (opt4) from neuraminidase__InfluenzaB__ACO05983

SEQ ID NO: 188850 - RNA, 1401 nt, Artificial Sequence; identical to SEQ ID NO: 188848
  derived and/or modified CDS sequence (opt4) from neuraminidase__InfluenzaB__ACO05994

SEQ ID NO: 188851 - RNA, 1401 nt, Artificial Sequence
  derived and/or modified CDS sequence (opt4) from neuraminidase__InfluenzaB__ACO06005
augcugcccagcaccauccagacccugacccuguuccugaccagcggcggcgugcugcugagccuguacgugagcgccagccugagcuaccugcuguacagcgacauccugcugaaguucagccccaccgagaucaccgcccccaccaugccccuggacugcgccaacgccagcaacgugcaggccgugaacagaagcgccaccaagggcgugacccugcugcugcccgagcccgaguggaccuaccccagacugagcugccccggcagcaccuuccagaaggcccugcugaucagcccccacagauucggcgagaccaagggcaacagcgccccccugaucaucagagagcccuucaucgccugcggccccaacgagugcaagcacuucgcccugacccacuacgccgcccagcccggcggcuacuacaacggcaccagaggcgacagaaacaagcugagacaccugaucagcgugaagcugggcaagauccccaccguggagaacagcaucuuccacauggccgccuggagcggcagcgccugccacgacggcaaggaguggaccuacaucggcguggacggccccgacaacaacgcccugcugaagaucaaguacggcgaggccuacaccgacaccuaccacagcuacgccaacaagauccugagaacccaggagagcgccugcaacugcaucggcggcaacugcuaccugaugaucaccgacggcagcgccagcggcgugagcgagugcagauuccugaagaucagagagggcagaaucaucaaggagaucuuccccaccggcagagugaagcacaccgaggagugcaccugcggcuucgccagcaacaagaccaucgagugcgccugcagagacaacagcuacaccgccaagagacccuucgugaagcugaacguggagaccgacaccgccgagaucagacugaugugcaccgacaccuaccuggacacccccagacccgacgacggcagcaucaccggccccugcgagagcaacggcgacagaggcagcggcggcaucaagggcggcuucgugcaccagagaauggccagcaagaucggcagaugguacagcagaaccaugagcaagaccgagagaaugggcaugggccuguacgugaaguacgacggcgaccccugggccgacagcgacgcccuggccuucagcggcgugauggugagcaugaaggagcccggcugguacagcuucggcuucgagaucaaggacaagaagugcgacgugcccugcaucggcaucgagauggugcacgacggcggcaaggagaccuggcacagcgccgccaccgccaucuacugccugaugggcagcggccagcugcugugggacaccgugaccggcguggacauggcccuguga

SEQ ID NO: 188852 - RNA, 1401 nt, Artificial Sequence
  derived and/or modified CDS sequence (opt4) from neuraminidase__InfluenzaB__ACO06027
augcugcccagcaccauccagacccugacccuguuccugaccagcggcggcgugcugcugagccuguacgugagcgccagccugagcuaccugcuguacagcgacauccugcugaaguucagccagaccgagaucaccgcccccaucaugccccuggacugcgccaacgccagcaacgugcaggccgugaacagaagcgccgccaagggcgugacccugcugcugcccgagcccgaguggaccuaccccagacugagcugccccggcagcaccuuccagaaggcccugcugaucagcccccacagauucggcgagaccaagggcaacagcgccccccugaucaucagagagcccuucaucgccugcggccccaccgagugcaagcacuucgcccugacccacuacgccgcccagcccggcggcuacuacaacggcaccagagaggacagaaacaagcugagacaccugaucagcgugaagcugggcaagauccccaccguggagaacagcaucuuccacauggccgccuggagcggcagcgccugccacgacggcaaggaguggaccuacaucggcguggacggccccgacagcaacgcccugcugaagaucaaguacggcgaggccuacaccgacaccuaccacagcuacgccaagaacauccugagaacccaggagagcgccugcaacugcaucggcggcgacugcuaccugaugaucaccgacggccccgccagcggcaucagcgagugcagauuccugaagaucagagagggcagaaucaucaaggagaucuuccccaccggcagagugaagcacaccgaggagugcaccugcggcuucgccagcaacaagaccaucgagugcgccugcagagacaacagcuacaccgccaagagacccuucgugaagcugaacguggagaccgacaccgccgagaucagacugaugugcaccgagaccuaccuggacacccccagacccaacgacggcagcaucaccggccccugcgagagcgacggcgacaagggcagcggcggcaucaagggcggcuucgugcaccagagaauggccagcaagaucggcagaugguacagcagaaccaugagcaagaccaagagaaugggcaugggccuguacgugaaguacgacggcgaccccuggaccgacagcgaggcccuggcccugagcggcgugauggugagcauggaggagcccggcugguacagcuucggcuucgagaucaaggacaagaagugcgacgugcccugcaucggcaucgagauggugcacgacggcggcaagaccaccuggcacagcgccgccaccgccaucuacugccugaugggcagcggccagcugcugugggacaccgugaccggcguggacaugacccuguga

SEQ ID NO: 188853 - RNA, 1401 nt, Artificial Sequence
  derived and/or modified CDS sequence (opt4) from neuraminidase__InfluenzaB__ACO06066
augcugcccagcaccauccagacccugacccuguuccugaccagcggcggcgugcugcugagccuguacgugagcgccagccugagcuaccugcuguacagcgacauccugcugaaguucagccagaccgagaucaccgcccccaucaugccccuggacugcgccaacgccagcaacgugcaggccgugaacagaagcguggccaagggcgugacccugcugcugcccgagcccgaguggaccuaccccagacugagcugccccggcagcaccuuccagaaggcccugcugaucagcccccacagauucggcgagaccaagggcaacagcgccccccugaucaucagagagcccuucaucgccugcggccccaccgagugcaagcacuucgcccugacccacuacgccgcccagcccggcggcuacuacaacggcaccagagaggacagaaacaagcugagacaccugaucagcgugaagcugggcaagauccccaccguggagaacagcaucuuccacauggccgccuggagcggcagcgccugccacgacggcaaggaguggaccuacaucggcguggacggccccgacagcaacgcccugcugaagaucaaguacggcgaggccuacaccgacaccuaccacagcuacgccaagaacauccugagaacccaggagagcgccugcaacugcaucggcggcgacugcuaccugaugaucaccgacggccccgccagcggcaucagcgagugcagauuccugaagaucagagagggcagaaucaucaaggagaucuuccccaccggcagagugaagcacaccgaggagugcaccugcggcuucgccagcaacaagaccaucgagugcgccugcagagacaacagcuacaccgccaagagacccuucgugaagcugaacguggagaccgacaccgccgagaucagacugaugugcaccgagaccuaccuggacacccccagacccaacgacggcagcaucaccggccccugcgagagcgacggcgacaagggcagcggcggcaucaagggcggcuucgugcaccagagaauggccagcaagaucggcagaugguacagcagaaccaugagcaagaccaagagaaugggcaugggccuguacgugaaguacgacggcgaccccuggaccgacagcgaggcccuggcccugagcggcgugauggugagcauggaggagcccggcugguacagcuucggcuucgagaucaaggacaagaagugcgacgugcccugcaucggcaucgagauggugcacgacggcggcaagaccaccuggcacagcgccgccaccgccaucuacugccugaugggcagcggccagcugcugugggacaccgugaccggcguggacaugacccuguga

SEQ ID NO: 188854 - RNA, 1401 nt, Artificial Sequence
  derived and/or modified CDS sequence (opt4) from neuraminidase__InfluenzaB__ACO94665
augcugcccagcaccauccagacccugacccuguuccugaccagcggcggcgugcugcugagccuguacgugagcgccagccugagcuaccugcuguacagcgacauccugcugaaguucagccccaccgagaucaccgccagcaccaugccccuggacugcgccaacgccagcaacgugcaggccgugaacagaagcgccaccaagggcgugacccugcugcugcccgagcccgaguggaccuaccccagacugagcugccccggcagcaccuuccagaaggcccugcugaucagcccccacagauucggcgagaccaagggcaacagcgccccccugaucaucagagagcccuucaucgccugcggccccaacgagugcaagcacuucgcccugacccacuacgccgcccagcccggcggcuacuacaacggcaccagaggcgacagaaacaagcugagacaccugaucagcgugaagcugggcaagauccccaccguggagaacagcaucuuccacauggccgccuggagcggcagcgccugccacgacggcaaggaguggaccuacaucggcguggacggccccgacaacaacgcccugcugaagaucaaguacggcgaggccuacaccgacaccuaccacagcuacgccaacaagauccugagaacccaggagagcgccugcaacugcaucggcggcaacugcuaccugaugaucaccgacggcagcgccagcggcgugagcgagugcagauuccugaagaucagagagggcagaaucaucaaggagaucuuccccaccggcagagugaagcacaccgaggagugcaccugcggcuucgccagcaacaagaccaucgagugcgccugcagagacaacagcuacaccgccaagagacccuucgugaagcugaacguggagaccgacaccgccgagaucagacugaugugcaccgacaccuaccuggacacccccagacccgacgacggcagcaucaccggccccugcgagagcaacggcgacaagggcagcggcggcaucaagggcggcuucgugcaccagagaauggccagcaagaucggcagaugguacagcagaaccaugagcaagaccgagagaaugggcaugggccuguacgugaaguacgacggcgaccccugggccgacagcgacgcccuggccuucagcggcgugauggugagcaugaaggagcccggcugguacagcuucggcuucgagaucaaggacaagaagugcgacgugcccugcaucggcaucgagauggugcacgacggcggcaaggagaccuggcacagcgccgccaccgccaucuacugccugaugggcagcggccagcugcugugggacaccgugaccggcguggacauggcccuguga

SEQ ID NO: 188855 - RNA, 1401 nt, Artificial Sequence; identical to SEQ ID NO: 188695
  derived and/or modified CDS sequence (opt4) from neuraminidase__InfluenzaB__ACQ45607

SEQ ID NO: 188856 - RNA, 1401 nt, Artificial Sequence
  derived and/or modified CDS sequence (opt4) from neuraminidase__InfluenzaB__ACQ45610
augcugcccagcaccauccagacccugacccuguuccugaccagcggcggcgugcugcugagccuguacgugagcgccagccugagcuaccugcuguacagcgacauccugcugaaguucagccccaccgagaucaccgcccccaccgugccccuggacugcgccaacgccagcaacgugcaggccgugaacagaagcgccaccaagggcgugacccugcugcugcccgagcccgaguggaccuaccccagacugagcugccccggcagcaccuuccagaaggcccugcugaucagcccccacagauucggcgagaccaagggcaacagcgccccccugaucaucagagagcccuucaucgccugcggccccaacgagugcaagcacuucgcccugacccacuacgccgcccagcccggcggcuacuacaacggcaccagaggcgacagaaacaagcugagacaccugaucagcgugaagcugggcaagauccccaccguggagaacagcaucuuccacauggccgccuggagcggcagcgccugccacgacggcaaggaguggaccuacaucggcguggacggccccgacaacaacgcccugcugaagaucaaguacggcgaggccuacaccgacaccuaccacagcuacgccaacaagauccugagaacccaggagagcgccugcaacugcaucggcggcaacugcuaccugaugaucaccgacggcagcgccagcggcgugagcgagugcagauuccugaagaucagagagggcagaaucaucaaggagaucuuccccaccggcagagugaaguacaccgaggagugcaccugcggcuucgccagcaacaagaccaucgagugcgccugcagagacaacagcuacaccgccaagagacccuucgugaagcugaacguggagaccgacaccgccgagaucagacugaugugcaccgacaccuaccuggacacccccagacccgacgacggcagcaucaccggccccugcgagagcaacggcgacaagggcagcggcggcaucaagggcggcuucgugcaccagagaauggccagcaagaucggcagaugguacagcagaaccaugagcaagaccgagagaaugggcaugggccuguacgugaaguacgacggcgaccccugggccgacagcgacgcccuggccuucagcggcgugauggugagcaugaaggagcccggcugguacagcuucggcuucgagaucaaggacaagaagugcgacgugcccugcaucggcaucgagauggugcacgacggcggcaaggagaccuggcacagcgccgccaccgccaucuacugccugaugggcagcggccagcugcugugggacaccgugaccggcguggacauggcccuguga

SEQ ID NO: 188857 - RNA, 1401 nt, Artificial Sequence; identical to SEQ ID NO: 188695
  derived and/or modified CDS sequence (opt4) from neuraminidase__InfluenzaB__ACQ45613

SEQ ID NO: 188858 - RNA, 1401 nt, Artificial Sequence; identical to SEQ ID NO: 188851
  derived and/or modified CDS sequence (opt4) from neuraminidase__InfluenzaB__ACR15626

SEQ ID NO: 188859 - RNA, 1401 nt, Artificial Sequence; identical to SEQ ID NO: 188851
  derived and/or modified CDS sequence (opt4) from neuraminidase__InfluenzaB__ACR15637

SEQ ID NO: 188860 - RNA, 1401 nt, Artificial Sequence; identical to SEQ ID NO: 188822
  derived and/or modified CDS sequence (opt4) from neuraminidase__InfluenzaB__ACR15648

SEQ ID NO: 188861 - RNA, 1401 nt, Artificial Sequence; identical to SEQ ID NO: 188851
  derived and/or modified CDS sequence (opt4) from neuraminidase__InfluenzaB__ACR15659

SEQ ID NO: 188862 - RNA, 1401 nt, Artificial Sequence; identical to SEQ ID NO: 188851
  derived and/or modified CDS sequence (opt4) from neuraminidase__InfluenzaB__ACR15670

SEQ ID NO: 188863 - RNA, 1401 nt, Artificial Sequence; identical to SEQ ID NO: 188676
  derived and/or modified CDS sequence (opt4) from neuraminidase__InfluenzaB__ACR15681

SEQ ID NO: 188864 - RNA, 1401 nt, Artificial Sequence
  derived and/or modified CDS sequence (opt4) from neuraminidase__InfluenzaB__ACR15692
augcugcccagcaccauccagacccugacccuguuccugaccagcggcggcgugcugcugagccuguacgugagcgccagccugagcuaccugcuguacagcgacauccugcugaaguucagccccaccgagaucaccgcccccaccaugccccugggcugcgccaacgccagcaacgugcaggccgugaacagaagcgccaccaagggcgugacccugcugcugcccgagcccgaguggaccuaccccagacugagcugccccggcagcaccuuccagaaggcccugcugaucagcccccacagauucggcgagaccaagggcaacagcgccccccugaucaucagagagcccuucaucgccugcggccccaaggagugcaagcacuucgcccugacccacuacgccgcccagcccggcggcuacuacaacggcaccagaggcgacagaaacaagcugagacaccugaucagcgugaagcugggcaagauccccaccguggagaacagcaucuuccacauggccgccuggagcggcagcgccugccacgacggcaaggaguggaccuacaucggcguggacggccccgacaacaacgcccugcugaagaucaaguacggcgaggccuacaccgacaccuaccacagcuacgccaacaacauccugagaacccaggagagcgccugcaacugcaucggcggcaacugcuaccugaugaucaccgacggcagcgccagcggcaucagcgagugcagauuccugaagaucagagagggcagaaucaucaaggagaucuuccccaccggcagagugaagcacaccgaggagugcaccugcggcuucgccagcaacaagaccaucgagugcgccugcagagacaacagcuacaccgccaagagacccuucgugaagcugaacguggagaccgacaccgccgagaucagacugaugugcaccgagaccuaccuggacacccccagacccgacgacggcagcaucaccggccccugcgagagcaacggcgacaagggcagcggcggcaucaagggcggcuucgugcaccagagaauggccagcaagaucggcagaugguacagcagaaccaugagcaagaccaagagaaugggcaugggccuguacgugaaguacgacggcgaccccugggccgacaacgacgcccuggcccugagcggcgugauggugagcauggaggagcccggcugguacagcuucggcuucgagaucaaggacaagaagugcgacgugcccugcaucggcaucgagauggugcacgacggcggcaaggagaccuggcacagcgccgccaccgccaucuacugccugaugggcagcggccagcugcugugggacaccgugaccggcguggacauggcccuguga

SEQ ID NO: 188865 - RNA, 1401 nt, Artificial Sequence; identical to SEQ ID NO: 188852
  derived and/or modified CDS sequence (opt4) from neuraminidase__InfluenzaB__ACR15703

SEQ ID NO: 188866 - RNA, 1401 nt, Artificial Sequence; identical to SEQ ID NO: 188852
  derived and/or modified CDS sequence (opt4) from neuraminidase__InfluenzaB__ACR15714

SEQ ID NO: 188867 - RNA, 1401 nt, Artificial Sequence; identical to SEQ ID NO: 188767
  derived and/or modified CDS sequence (opt4) from neuraminidase__InfluenzaB__ACR15725

SEQ ID NO: 188868 - RNA, 1401 nt, Artificial Sequence; identical to SEQ ID NO: 188728
  derived and/or modified CDS sequence (opt4) from neuraminidase__InfluenzaB__ACR15736

SEQ ID NO: 188869 - RNA, 1401 nt, Artificial Sequence; identical to SEQ ID NO: 188851
  derived and/or modified CDS sequence (opt4) from neuraminidase__InfluenzaB__ACR39340

SEQ ID NO: 188870 - RNA, 1401 nt, Artificial Sequence
  derived and/or modified CDS sequence (opt4) from neuraminidase__InfluenzaB__ADL28399
augcugcccagcaccauccagacccugacccuguuccugaccagcggcggcgugcugcugagccuguacgugagcgccagccugagcuaccugcuguacagcgacauccugcugaaguucagccccaccgagaucaccgcccccaccaugccccuggacugcgccaacgccagcaacgugcaggccgugaacagaagcgccaccaagggcgugacccugcugcugcccgagcccgaguggaccuaccccagacugagcugccccggcagcaccuuccagaaggcccugcugaucagcccccacagauucggcgagaccaagggcaacagcgccccccugaucaucagagagcccuucaucgccugcggccccaacgagugcaagcacuucgcccugacccacuacgccgcccagcccggcggcuacuacaacggcaccagaggcgacagaaacaagcugagacaccugaucagcgugaagcugggcaagauccccaccguggagaacagcaucuuccacauggccgccuggagcggcagcgccugccacgacggcaaggaguggaccuacaucggcguggacggccccgacaacaacgcccugcugaagaucaaguacggcgaggccuacaccgacaccuaccacagcuacgccaacaacauccugagaacccaggagagcgccugcaacugcaucggcggcaacugcuaccugaugaucaccgacggcagcgccagcggcgugagcgagugcagauuccugaagaucagagagggcagaaucaucaaggagaucuuccccaccggcagagugaagcacaccgaggagugcaccugcggcuucgccagcaacaagaucaucgagugcgccugcagagacagcagcuacaccgccaagagacccuucgugaagcugaacguggagaccgacaccgccgagaucagacugaugugcaccgagaccuaccuggacacccccagacccaacgacggcagcaucaccggccccugcgagagcaacggcgacaagggcagcggcggcaucaagggcggcuucgugcaccagagaauggccagcaagaucggcagaugguacagcagaaccaugagcaagaccgagagaaugggcaugggccuguacgugaaguacgacggcgaccccugggccgacagcgacgcccuggcccugagcggcgugauggugagcauggaggagcccggcugguacagcuucggcuucgagaucaaggacaagaagugcgacgugcccugcaucggcaucgagauggugcacgacggcggcaaggagaccuggcacagcgccgccaccgccaucuacugccugaugggcagcggccagcugcugugggacaccgugaccggcguggacauggcccuguga

SEQ ID NO: 188871 - RNA, 1401 nt, Artificial Sequence; identical to SEQ ID NO: 188848
  derived and/or modified CDS sequence (opt4) from neuraminidase__InfluenzaB__ADN32822

SEQ ID NO: 188872 - RNA, 1401 nt, Artificial Sequence
  derived and/or modified CDS sequence (opt4) from neuraminidase__InfluenzaB__ADR02756
augcugcccagcaccauccagacccugacccuguuccugaccagcggcggcgugcugcugagccuguacgugagcgccagccugagcuaccugcuguacagcgacauccugcugaaguucagccagaccgagaucaccgcccccaucaucccccuggacugcgccaacgccagcaacgugcaggccgugaacagaagcgccgccaagggcgugacccugcugcugcccgagcccgaguggaccuaccccagacugagcugccccggcagcaccuuccagaaggcccugcugaucagcccccacagauucggcgagaccaagggcaacagcgccccccugaucaucagagagcccuucaucgccugcggccccaccgagugcaagcacuucgcccugacccacuacgccgcccagcccggcggcuacuacaacggcaccagagaggacagaaacaagcugagacaccugaucagcgugaagcugggcaagauccccaccguggagaacagcaucuuccacauggccgccuggagcggcagcgccugccacgacggcaaggaguggaccuacaucggcguggacggccccgacagcaacgcccugcugaagaucaaguacggcgaggccuacaccgacaccuaccacagcuacgccaagaacauccugagaacccaggagagcgccugcaacugcaucggcggcgacugcuaccugaugaucaccgacggccccgccagcggcaucagcgagugcagauuccugaagaucagagagggcagaaucaucaaggagaucuuccccaccggcagagugaagcacaccgaggagugcaccugcggcuucgccagcaacaagaccaucgagugcgccugcagagacaacagcuacaccgccaagagacccuucgugaagcugaacguggagaccgacaccgccgagaucagacugaugugcaccgagaccuaccuggacacccccagacccaacgacggcagcaucaccggccccugcgagagcgacggcgacaagggcagcggcggcaucaagggcggcuucgugcaccagagaauggccagcaagaucggcagaugguacagcagaaccaugagcaagaccaagagaaugggcaugggccuguacgugaaguacgacggcgaccccuggaccgacagcgaggcccuggcccugagcggcgugauggugagcauggaggagcccggcugguacagcuucggcuucgagaucaaggacaagaagugcgacgugcccugcaucggcaucgagauggugcacgacggcggcaagaccaccuggcacagcgccgccaccgccaucuacugccugaugggcagcggccagcugcugugggacaccgugaccggcguggacauggcccuguga

SEQ ID NO: 188873 - RNA, 1401 nt, Artificial Sequence
  derived and/or modified CDS sequence (opt4) from neuraminidase__InfluenzaB__AEA51353
augcugcccagcaccauccagacccugacccuguuccugaccagcggcggcgugcugcugagccuguacgugagcgccagccugagcuaccugcuguacagcgacauccugcugaaguucagcagaaccgagaucaccgcccccaucaugccccuggacugcgccaacgccagcaacgugcaggccgugaacagaagcgccaccaagggcgugacccugcugcugcccgagcccgaguggaccuaccccagacugagcugccccggcagcaccuuccagaaggcccugcugaucagcccccacagauucggcgagaccaagggcaacagcgccccccugaucaucagagagcccuucaucgccugcggccccaaggagugcaagcacuucgcccugacccacuacgccgcccagcccggcggcuacuacaacggcaccagagaggacagaaacaagcugagacaccugaucagcgugaagcugggcaagauccccaccguggagaacagcaucuuccacauggccgccuggagcggcagcgccugccacgacggcagagaguggaccuacaucggcguggacggccccgacagcaacgcccugcugaagaucaaguacggcggcgccuucaccgacaccuaccacagcuacgccaagaacauccugagcccccaggagagcgccugcaacugcaucggcggcgacugcuaccugaugaucaccgacggccccgccagcggcaucagcgagugcagauuccugaagaucagagagggcagaaucaucaaggagaucuuccccaccggcagagugaagcacaccgaggagugcaccugcggcuucgccagcaacaagaccaucgagugcgccugcagagacaacagcuacaccgccaagagacccuucgugaagcugaacguggagaccgacaccgccgagaucagacugaugugcaccgagaccuaccuggacacccccagacccaacgacggcagcaucaccggccccugcgagagcaacggcgacaagggcagcggcggcaucaagggcggcuucgugcaccagagaauggccagcaagaucggcagaugguacagcagaaccaugagcaagaccaagagaaugggcaugggccuguacgugaaguacgacggcgaccccuggaccgacagcgaggcccuggcccugagcggcgugauggugagcauggaggagcccggcugguacagcuucggcuucgagaucaaggacaagaagugcgacgugcccugcaucggcaucgagauggugcacgacggcggcaagaccaccuggcacagcgccgccaccgccaucuacugccugaugggcagcggccagcugcugugggacaccgugaccggcgugaacaugacccuguga

SEQ ID NO: 188874 - RNA, 1401 nt, Artificial Sequence
  derived and/or modified CDS sequence (opt4) from neuraminidase__InfluenzaB__AEA51355
augcugcccagcaccauccagacccugacccuguuccugaccagcggcggcgugcugcugagccuguacgugagcgccagccugagcuaccugcuguacagcgacauccugcugaaguucagccccaccgagaucaccgcccccaccaugccccuggacugcgccaacaccagcaacgugcaggccgugaacagaagcgccaccaagggcgugacccugcugcugcccgagcccgaguggaccuaccccagacugagcugccccggcagcaccuuccagaaggcccugcugaucagcccccacagauucggcgagaccaagggcaacagcgccccccugaucaucagagagcccuucaucgccugcggccccaacgagugcaagcacuucgcccugacccacuacgccgcccagcccggcggcuacuacaacggcaccagaggcgacagaaacaagcugagacaccugaucagcgugaagcugggcaagauccccaccguggagaacagcaucuuccacauggccgccuggagcggcagcgccugccacgacggcaaggaguggaccuacaucggcguggacggccccgacaacaacgcccugcugaagaucaccuacggcgaggccuaccccggcaccuaccacagcuacgccaucaagaaccccagaacccaggagagcgcccccaacugcuucggcggccacagcuuccccaucaucacccacgccccccccagcggcgugugggagcccagauuccugaagaucagagagggcagaaucaucaacgagaucuuccccaccggcagagugaagccccccgaggagugcaccugcggcuucgccagcaacaacaccaucgagugcgccugcagagacaacaacugcaccgccaagagacccuucgugaaguuccacguggagagcgaccccgccgagaucagagccaugugcaccgacaccuaccuggacagccccagacccgacgacggcagcaucaccggccccugcgacagcaacggcgacaagggcagcggcggcaucaagggcggcuucgugcaccagagaauggagagcaagaucggcagaugguacagcagaaccaugagcaagaccgagagaaugggcaugggccuguacgugaaguacgacggcgaccccugggccgacagcgacgcccuggccaacagcggcgugauggugagcaugaacgagcccggcagcagcagcuucggcuucgagaucaaggacaagaagugcgacgugcccugcaucggcaucgagauggugcacgacggcggcaaggagaccuggcacagcgccgccaccgccaucuacugccugaugggcagcggccagcugcugugggacaccgugaccggcguggacauggcccuguga

SEQ ID NO: 188875 - RNA, 1401 nt, Artificial Sequence
  derived and/or modified CDS sequence (opt4) from neuraminidase__InfluenzaB__AEA51357
augcugcccagcaccauccagacccugacccuguuccugaccagcggcggcgugcugcugagccuguacgugagcgccagccugagcuaccugcuguacagcgacauccugcugaaguucagcagaaccgagaucaccgcccccaucaugccccuggacugcgccaacgccagcaacgugcaggccgugaacagaagcgccaccaagggcgugacccugcugcugcccgagcccgaguggaccuaccccagacugagcugccccggcagcaccuuccagaaggcccugcugaucagcccccacagauucggcgagaccaagggcaacagcgccccccugaucaucagagagcccuucaucgccugcggccccaaggagugcaagcacuucgcccugacccacuacgccgcccagcccggcggcuacuacaacggcaccagagaggacagaaacaagcugagacaccugaucagcgugaagcugggcaagauccccaccguggagaacagcaucuuccacauggccgccuggagcggcagcgccugccacgacggcagagaguggaccuacaucggcguggacggccccgacagcaacgcccugcugaagaucaaguucggcgaggccuacaccgacaccuaccacagcuacgccaagaacauccugggcacccaggagagcgccugcaacugcaucggcggcgacugcaaccugaugaucaccgacggccccgccagcggcaucagcgagagcagauuccugaagaucggcgagggcagaaucaucaaggagaucuuccccaccggcagagugaagcacaccgaggagugcaccugcggcuucgccagcaacaagaccaucgagugcgccugcagagacaacagcuacaccgccaagagacccuucgugaagcugaacguggagaccgacaccgccgagaucagacugaugugcaccgagaccuaccuggacacccccagacccaacgacggcagcaucaccggccccugcgagagcaacggcgacaagggcagcggcggcaucaagggcggcuucgugcaccagagaauggccagcaagaucggcagaugguacagcagaaccaugagcaagaccgagagaaugggcaugggccuguacgugaaguacgacggcgaccccugggccgacagcgacgcccuggccuucagcggcgugauggugagcaugaaggagcccggcugguacagcuucggcuucgagaucaaggacaagaagugcgacgugcccugcaucggcaucgagauggugcacgacggcggcaaggagaccuggcacagcgccgccaccgccaucuacugccugaugggcagcggccagcugcugugggacaccgugaccggcgugaacauggcccuguga

SEQ ID NO: 188876 - RNA, 1401 nt, Artificial Sequence
  derived and/or modified CDS sequence (opt4) from neuraminidase__InfluenzaB__AEA51359
augcugcccagcaccauccagacccugacccuguuccugaccagcggcggcgugcugcugagccuguacgugagcgccagccugagcuaccugcuguacagcgacauccugcugaaguucagcagaaccgagaucaccgcccccaucaugccccuggacugcgccaacgccagcaacgugcaggccgugaacagaagcgccaccaagggcgugacccugcugcugcccgagcccgaguggaccuaccccagacugagcugccccggcagcaccuuccagaaggcccugcugaucagcccccacagauucggcgagaccaagggcaacagcgccccccugaucaucagagagcccuucaucgccugcggccccaaggagugcaagcacuucgcccugacccacuacgccgcccagcccggcggcuacuacaacggcaccagagaggacagaaacaagcugagacaccugaucagcgugaagcugggcaagauccccaccguggagaacagcaucuuccacauggccgccuggagcggcagcgccugccacgacggcagagaguggaccuacaucggcguggacggccccgacagcaacgcccugcugaagaucaaguacggcgaggccuacaccgacaccuaccacagcuacgccaagaacauccugagaacccaggagagcgccugcaacugcaucggcggcgacugcuaccugaugaucaccgacggccccgccagcggcaucagcgagugcagauuccugaagaucagagagggcagaaucaucaaggagaucuuccccaccggcagagugaagcacaccgaggagugcaccugcggcuucgccagcaacaagaccaucgagugcgccugcagagacaacagcuacaccgccaagagacccuucgugaagcugaacguggagaccgacaccgccgagaucagacugaugugcaccgagaccuaccuggacacccccagacccaacgacggcagcaucaccggccccugcgagagcgacggcgacaagggcagcggcggcaucaagggcggcuucgugcaccagagaauggccagcaagaucggcagaugguacagcagaaccaugagcaagaccaagagaaugggcaugggccuguacgugaaguacgacggcgaccccuggaccgacagcgaggcccuggcccugagcggcgugauggugagcauggaggagcccggcugguacagcuucggcuucgagaucaaggacaagaagugcgacgugcccugcaucggcaucgagauggugcacgacggcggcaagaccaccuggcacagcgccgccaccgccaucuacugccugaugggcagcggccagcugcugugggacaccgugaccggcguggacauggcccuguga

SEQ ID NO: 188877 - RNA, 1401 nt, Artificial Sequence
  derived and/or modified CDS sequence (opt4) from neuraminidase__InfluenzaB__AEA51365
augcugcccagcaccauccagacccugacccuguuccugaccagcggcggcgugcugcugagccuguacgugagcgccagccugagcuaccugcuguacagcgacauccugcugaaguucagcagaaccgagaucaccgcccccaucaugccccuggacugcgccaacgccagcaacgugcaggccgugaacagaagcgccaccaagggcgugacccugcugcugcccgagcccgaguggaccuaccccagacugagcugccccggcagcaccuuccagaaggcccugcugaucagcccccacagauucggcgagaccaagggcaacagcgccccccugaucaucagagagcccuucaucgccugcggccccaaggagugcaagcacuucgcccugacccacuacgccgcccagcccggcggcuacuacaacggcaccagagaggacagaaacaagcugagacaccugaucagcgugaagcugggcaagauccccaccguggagaacagcaucuuccacauggccgccuggagcggcagcgccugccacgacggcagagaguggaccuacaucggcguggacggccccgacagcaacgcccugcugaagaucaaguacggcgaggccuacaccgacaccuaccacagcuacgccaagaacauccugagaacccaggagagcgccugcaacugcaucggcggcgacugcuaccugaugaucaccgacggccccgccagcggcaucagcgagugcagauuccugaagaucagagagggcagaaucaucaaggagaucuuccccaccggcagagugaagcacaccgaggagugcaccugcggcuucgccagcaacaagaccaucgagugcgccugcagagacaacagcuacaccgccaagagacccuucgugaagcugaacguggagaccgacaccgccgagaucagacugaugugcaccgagaccuaccuggacacccccagacccaacgacggcagcaucaccggccccugcgagagcaacggcgacaagggcagcggcggcaucaagggcggcuucgugcaccagagaauggccagcaagaucggcagaugguacagcagaaccaugagcaagaccaagagaaugggcaugggccuguacgugaaguacgacggcgaccccuggaccgacagcgaggcccuggcccugagcggcgugauggugagcauggaggagcccggcugguacagcuucggcuucgagaucaaggacaagaagugcgacgugcccugcaucggcaucgagauggugcacgacggcggcaagaccaccuggcacagcgccgccaccgccaucuacugccugaugggcagcggccagcugcugugggacaccgugaccggcgugaacaugacccuguga

SEQ ID NO: 188878 - RNA, 1401 nt, Artificial Sequence; identical to SEQ ID NO: 188877
  derived and/or modified CDS sequence (opt4) from neuraminidase__InfluenzaB__AEA51367

SEQ ID NO: 188879 - RNA, 1401 nt, Artificial Sequence; identical to SEQ ID NO: 188877
  derived and/or modified CDS sequence (opt4) from neuraminidase__InfluenzaB__AEA51371

SEQ ID NO: 188880 - RNA, 1401 nt, Artificial Sequence
  derived and/or modified CDS sequence (opt4) from neuraminidase__InfluenzaB__AEA51373
augcugcccagcaccauccagacccugacccuguuccugaccagcggcggcgugcugcugagccuguacgugagcgccagccugagcuaccugcuguacagcgacauccugcugaaguucagccccaccgagaucaccgcccccaccaugccccuggacugcgccaacgccagcaacgugcaggccgugaacagaagcgccaccaagggcgugacccugcugcugcccgagcccgaguggaccuaccccagacugagcugccccggcagcaccuuccagaaggcccugcugaucagcccccacagauucggcgagaccaagggcaacagcgccccccugaucaucagagagcccuucaucgccugcggccccaacgagugcaagcacuucgcccugacccacuacgccgcccagcccggcggcuacuacaacggcaccagaggcgacagaaacaagcugagacaccugaucagcgugaagcugggcaagauccccaccguggagaacagcaucuuccacauggccgccuggagcggcagcgccugccacgacggcaaggaguggaccuacaucggcguggacggccccgacaacaacgcccugcugaaggugaaguacggcgaggccuacaccgacaccuaccacagcuacgccaacaagauccugagaacccaggagagcgccugcaacugcaucggcggcaacugcuaccugaugaucaccgacggcagcgccagcggcgugagcgagugcagauuccugaagaucagagagggcagaaucaucaaggagaucuuccccaccggcagagugaagcacaccgaggagugcaccugcggcuucgccagcaacaagaccaucgagugcgccugcagagacaacagcuacaccgccaagagacccuucgugaagcugaacguggagaccgacaccgccgagaucagacugaugugcaccgacaccuaccuggacacccccagacccgacgacggcagcaucaccggccccugcgagagcaacggcgacaagggcagcggcggcaucaagggcggcuucgugcaccagagaauggccagcaagaucggcagaugguacagcagaaccaugagcaagaccaagagaaugggcaugggccuguacgugaaguacgacggcgaccccuggaccgacagcgaggcccuggcccugagcggcgugauggugagcauggaggagcccggcugguacagcuucggcuucgagaucaaggacaagaagugcgacgugcccugcaucggcaucgagauggugcacgacggcggcaaggagaccuggcacagcgccgccaccgccaucuacugccugaugggcagcggccagcugcugugggacaccgugaccggcgugaacaugacccuguga

SEQ ID NO: 188881 - RNA, 1401 nt, Artificial Sequence
  derived and/or modified CDS sequence (opt4) from neuraminidase__InfluenzaB__AEA51377
augcugcccagcaccauccagacccugacccuguuccugaccagcggcggcgugcugcugagccuguacgugagcgccagccugagcuaccugcuguacagcgacauccugcugaaguucagccccaccgagaucaccgcccccaccaugccccuggacugcgccaacgccagcaacgugcaggccgugaacagaagcgccaccaagggcgugacccugcugcugcccgagcccgaguggaccuaccccagacugagcugccccggcagcaccuuccagaaggcccugcugaucagcccccacagauucggcgagaccaagggcaacagcgccccccugaucaucagagagcccuucaucgccugcggccccaacgagugcaagcacuucgcccugacccacuacgccgcccagcccggcggcuacuacaacggcaccagaggcgacagaaacaagcugagacaccugaucagcgugaagcugggcaagauccccaccguggagaacagcaucuuccacauggccgccuggagcggcagcgccugccacgacggcaaggaguggaccuacaucggcguggacggccccgacaacaacgcccugcugaaggugaaguacggcgaggccuacaccgacaccuaccacagcuacgccaacaagauccugagaacccaggagagcgccugcaacugcaucggcggcaacugcuaccugaugaucaccgacggcagcgccagcggcgugagcgagugcagauuccugaagaucagagagggcagaaucaucaaggagaucuuccccaccggcagagugaagcacaccgaggagugcaccugcggcuucgccagcaacaagaccaucgagugcgccugcagagacaacagcuacaccgccaagagacccuucgugaagcugaacguggagaccgacaccgccgagaucagacugaugugcaccgacaccuaccuggacacccccagacccgacgacggcagcaucaccggccccugcgagagcaacggcgacaagggcagcggcggcaucaagggcggcuucgugcaccagagaauggagagcaagaucggcagaugguacagcagaaccaugagcaagaccgagagaaugggcaugggccuguacgugaaguacgacggcgaccccugggccgacagcgacgcccuggccuucagcggcgugauggugagcaugaaggagcccggcugguacagcuucggcuucgagaucaaggacaagaagugcgacgugcccugcaucggcaucgagauggugcacgacggcggcaaggagaccuggcacagcgccgccaccgccaucuacugccugaugggcagcggccagcugcugugggacaccgugaccggcguggacauggcccuguga

SEQ ID NO: 188882 - RNA, 1401 nt, Artificial Sequence; identical to SEQ ID NO: 188881
  derived and/or modified CDS sequence (opt4) from neuraminidase__InfluenzaB__AEA51379

SEQ ID NO: 188883 - RNA, 1401 nt, Artificial Sequence
  derived and/or modified CDS sequence (opt4) from neuraminidase__InfluenzaB__AEA51381
augcugcccagcaccauccagacccugacccuguuccugaccagcggcggcgugcugcugagccuguacgugagcgccagccugagcuaccugcuguacagcgacauccugcugaaguucagccccaccgagaucaccgcccccaccaugccccuggacugcgccaacgccagcaacgugcaggccgugaacagaagcgccaccaagggcgugacccugcugcugcccgagcccgaguggaccuaccccagacugagcugccccggcagcaccuuccagaaggcccugcugaucagcccccacagauucggcgagaccaagggcaacagcgccccccugaucaucagagagcccuucaucgccugcggccccaacgagugcaagcacuucgcccugacccacuacgccgcccagcccggcggcuacuacaacggcaccagaggcgacagaaacaagcugagacaccugaucagcgugaagcugggcaagauccccaccguggagaacagcaucuuccacauggccgccuggagcggcagcgccugccacgacggcaaggaguggaccuacaucggcguggacggccccgacaacaacgcccugcugaaggugaaguacggcgaggccuacaccgacaccuaccacagcuacgccaacaagauccugagaacccaggagagcgccugcaacugcaucggcggcaacugcuaccugaugaucaccgacggcagcgccagcggcgugagcgagugcagauuccugaagaucagagagggcagaaucaucaaggagaucuuccccaccggcagagugaagcacaccgaggagugcaccugcggcuucgccagcaacaagaccaucgagugcgccugcagagacaacagcuacaccgccaagagacccuucgugaagcugaacguggagaccgacaccgccgagaucagacugaugugcaccgacaccuaccuggacacccccagacccaacgacggcagcaucaccggccccugcgagagcgacggcgacaagggcagcggcggcaucaagggcggcuucgugcaccagagaaugaagagcaagaucggcagaugguacagcagaaccaugagcaagaccgagagaaugggcaugggccuguacgugaaguacgacggcgaccccugggccgacagcgacgcccuggccuucagcggcgugauggugagcgugaaggagcccggcugguacagcuucggcuucgagaucaaggacaagaagugcgacgugcccugcaucggcaucgagauggugcacgacggcggcaaggagaccuggcacagcgccgccaccgccaucuacugccugaugggcagcggccagcugcugugggacaccgugaccggcguggacauggcccuguga

SEQ ID NO: 188884 - RNA, 1401 nt, Artificial Sequence; identical to SEQ ID NO: 188881
  derived and/or modified CDS sequence (opt4) from neuraminidase__InfluenzaB__AEA51383

SEQ ID NO: 188885 - RNA, 1401 nt, Artificial Sequence
  derived and/or modified CDS sequence (opt4) from neuraminidase__InfluenzaB__AEG20998
augcugcccagcaccauccagacccugacccuguuccugaccagcggcggcgugcugcugagccuguacgugagcgccagccugagcuaccugcuguacagcgacauccugcugaaguucagcagaaccgagaucaccgcccccauccugagacuggccugcgccaacgccagcaacgugcaggccgugaacagaagcgccaccaagggcgugacccugcugcugcccgagcccgaguggaccuaccccagacugagcugccccggcagcaccuuccagaaggcccugcugaucagcccccacagauucggcgagaccaagggcaacagcgccccccugaucaucagagagcccuucaucgccugcggccccaaggagugcaagcacuucgcccugacccacuacgccgcccagcccggcggcuacuacaacggcaccagagaggacagaaacaagcugagacaccugaucagcgugaagcugggcaagauccccaccguggagaacagcaucuuccacauggccgccuggagcggcagcgccugccacgacggcagagaguggaccuacaucggcguggacggccccgacagcaacgcccugcugaagaucaaguacggcggcgccuucaccgacaccuaccacagcuacgccaagaacauccugagcccccaggagagcgccugcaacugcaucggcggcgacugcuaccugaugaucaccgacggccccgccagcggcaucagcgagugcagauuccugaagaucagagagggcagaaucaucaaggagaucuuccccaccggcagagugaagcacaccgaggagugcaccugcggcuucgccagcaacaagaccaucgagugcgccugcagagacaacagcuacaccgccaagagacccuucgugaagcugaacguggagaccgacaccgccgagaucagacugaugugcaccgagaccuaccuggacacccccagacccaacgacggcagcaucaccggccccugcgagagcaacggcgacaagggcagcggcggcaucaagggcggcuucgugcaccagagaauggccagcaagaucggcagaugguacagcagaaccaugagcaagaccaagagaaugggcaugggccuguacgugaaguacgacggcgaccccuggaccgacagcgaggcccuggcccugagcggcgugauggugagcauggaggagcccggcugguacagcuucggcuucgagaucaaggacaagaagugcgacgugcccugcaucggcaucgagauggugcacgacggcggcaagaccaccuggcacagcgccgccaccgccaucuacugccugaugggcagcggccagcugcugugggacaccgugaccggcgugaacaugacccuguga

SEQ ID NO: 188886 - RNA, 1401 nt, Artificial Sequence
  derived and/or modified CDS sequence (opt4) from neuraminidase__InfluenzaB__AEG20999
augcugcccagcaccauccagacccugacccuguuccugaccagcggcggcgugcugcugagccugagcgugagcgccagccugagcuaccugcuguacagcgacauccugcugaaguucagcagaaccgagaucaccgcccccaucaugccccuggacugcgccaacgccagcaacgugcaggccgugaacagaagcgccaccaagggcgugacccugcugcugcccgagcccgaguggaccuaccccagacugagcugccccggcagcaccuuccagaaggcccugcugaucagcccccacagauucggcgagaccaagggcaacagcgccccccugaucaucagagagcccuucaucgccugcggccccaaggagugcaagcacuucgcccugacccacuacgccgcccagcccggcggcuacuacaacggcaccagagaggacagaaacaagcugagacaccugaucagcgugaagcugggcaagauccccaccguggagaacagcaucuuccacauggccgccuggagcggcagcgccugccacgacggcagagaguggaccuacaucggcguggacggccccgacagcaacgcccugcugaagaucaaguacggcggcgccuucaccgacaccuaccacagcuacgccaagaacauccugagcccccaggagagcgccugcaacugcaucggcggcgacugcuaccugaugaucaccgacggccccgccagcggcaucagcgagugcagauuccugaagaucagagagggcagaaucaucaaggagaucuuccccaccggcagagugaagcacaccgaggagugcaccugcggcuucgccagcaacaagaccaucgagugcgccugcagagacaacagcuacaccgccaagagacccuucgugaagcugaacguggagaccgacaccgccgagaucagacugaugugcaccgagaccuaccuggacacccccagacccaacgacggcagcaucaccggccccugcgagagcaacggcgacaagggcagcggcggcaucaagggcggcuucgugcaccagagaauggccagcaagaucggcagaugguacagcagaaccaugagcaagaccaagagaaugggcaugggccuguacgugaaguacgacggcgaccccuggaccgacagcgaggcccuggcccugagcggcgugauggugagcauggaggagcccggcugguacagcuucggcuucgagaucaaggacaagaagugcgacgugcccugcaucggcaucgagauggugcacgacggcggcaagaccaccuggcacagcgccgccaccgccaucuacugccugaugggcagcggccagcugcugugggacaccgugaccggcgugaacaugacccuguga

SEQ ID NO: 188887 - RNA, 1401 nt, Artificial Sequence
  derived and/or modified CDS sequence (opt4) from neuraminidase__InfluenzaB__AEG21000
augcugcccagcaccauccagacccugacccuguuccugaccagcggcggcgugcugcugagccuguacgugagcgccagccugagcuaccugcuguacagcgacauccugcugaaguucagcagaaccgagaucaccgccgccauccugauccuggacugcgccaacgccagcaacgugcaggccgugaacagaagcgccaccaagggcgugacccugcugcugcccgagcccgaguggaccuaccccagacugagcugccccggcagcaccuuccagaaggcccugcugaucagcccccacagauucggcgagaccaagggcaacagcgccccccugaucaucagagagcccuucaucgccugcggccccaaggagugcaagcacuucgcccugacccacuacgccgcccagcccggcggcuacuacaacggcaccagagaggacagaaacaagcugagacaccugaucagcgugaagcugggcaagauccccaccguggagaacagcaucuuccacauggccgccuggagcggcagcgccugccacgacggcagagaguggaccuacaucggcguggacggccccgacagcaacgcccugcugaagaucaaguacggcggcgccuucaccgacaccuaccacagcuacgccaagaacauccugagcccccaggagagcgccugcaacugcaucggcggcgacugcuaccugaugaucaccgacggccccgccagcggcaucagcgagugcagauuccugaagaucagagagggcagaaucaucaaggagaucuuccccaccggcagagugaagcacaccgaggagugcaccugcggcuucgccagcaacaagaccaucgagugcgccugcagagacaacagcuacaccgccaagagacccuucgugaagcugaacguggagaccgacaccgccgagaucagacugaugugcaccgagaccuaccuggacacccccagacccaacgacggcagcaucaccggccccugcgagagcaacggcgacaagggcagcggcggcaucaagggcggcuucgugcaccagagaauggccagcaagaucggcagaugguacagcagaaccaugagcaagaccaagagaaugggcaugggccuguacgugaaguacgacggcgaccccuggaccgacagcgaggcccuggcccugagcggcgugauggugagcauggaggagcccggcugguacagcuucggcuucgagaucaaggacaagaagugcgacgugcccugcaucggcaucgagauggugcacgacggcggcaagaccaccuggcacagcgccgccaccgccaucuacugccugaugggcagcggccagcugcugugggacaccgugaccggcgugaacaugacccuguga

SEQ ID NO: 188888 - RNA, 1401 nt, Artificial Sequence
  derived and/or modified CDS sequence (opt4) from neuraminidase__InfluenzaB__AEG21002
augcugcccagcaccauccagacccugacccuguuccugaccagcggcggcgugcugcugagccuguacgugagcgccagccugagcuaccugcuguacagcgacauccugcugaaguucagcagaaccgagaucaccgcccccaucaugccccuggacugcgccaacgccagcaacgugcaggccgugaacagaagcgccaccaagggcgugacccugcugcugcccgagcccgaguggaccuaccccagacugagcugccccggcagcaccuuccagaaggcccugcugaucagcccccacagauucggcgagaccaagggcaacagcgccccccugaucaucagagagcccuucaucgccugcggccccaaggagugcaagcacuucgcccugacccacuacgccgcccagcccggcggcuacuacaacggcaccagagaggacagaaacaagcugagacaccugaucagcgugaagcugggcaagauccccaccguggagaacagcaucuuccacauggccgccuggagcggcagcgccugccacgacggcagagaguggaccuacaucggcguggacggccccgacagcaacgcccugcugaagaucaaguacggcgaggccuacaccgacaccuaccacagcuacgccaagaacauccugagaacccaggagagcgccugcaacugcaucggcggcgacugcuaccugaugaucaccgacggccccgccagcggcaucagcgagugcagauuccugaagaucagagagggcagaaucaucaaggagaucuuccccaccggcagagugagacacaccgaggagugcaccugcggcuucgccagcaacaagaccaucgagugcgccugcagagacaacagcuacaccgccaagagacccuucgugaagcugaacguggagaccgacaccgccgagaucagacugaugugcaccgagaccuaccuggacacccccagacccaacgacggcagcaucaccggccccugcgagagcaacggcgacaagggcagcggcggcaucaagggcggcuucgugcaccagagaauggccagcaagaucggcagaugguacagcagaaccaugagcaagaccaagagaaugggcaugggccuguacgugaaguacgacggcgaccccuggaccgacagcgaggcccuggcccugagcggcgugauggugagcauggaggagcccggcugguacagcuucggcuucgagaucaaggacaagaagugcgacgugcccugcaucggcaucgagauggugcacgacggcggcaagaccaccuggcacagcgccgccaccgccaucuacugccugaugggcagcggccagcugcugugggacaccgugaccggcgugaacaugacccuguga

SEQ ID NO: 188889 - RNA, 1401 nt, Artificial Sequence
  derived and/or modified CDS sequence (opt4) from neuraminidase__InfluenzaB__AEG21003
augcugcccagcaccauccagacccugacccuguuccugaccagcggcggcgugcugcugagccuguacgugagcgccagccugagcuaccugcuguacagcgacauccugcugaaguucagcagaaccgagaucaccgcccccaucaugccccuggacugcgccaacgccagcaacgugcaggccgugaacagaagcgccaccaagggcgugacccugcugcugcccgagcccgaguggaccuaccccagacugagcugccccggcagcaccuuccagaaggcccugcugaucagcccccacagauucggcgagaccaagggcaacagcgccccccugaucaucagagagcccuucaucgccugcggccccaaggagugcaagcacuucgcccugacccacuacgccgcccagcccggcggcuacuacaacggcaccagagaggacagaaacaagcugagacaccugaucagcgugaagcugggcaagauccccaccguggagaacagcaucuuccacauggccgccuggagcggcagcgccugccacgacggcagagaguggaccuacaucggcguggacggccccgacagcaacgcccugcugaagaucaaguacggcgaggccuacaccgacaccuaccacagcuacgccaagaacauccugagaacccaggagagcgccugcaacugcaucggcggcgacugcuaccugaugaucaccgacggccccgccagcggcaucagcgagugcagauuccugaagaucagagagggcagaaucaucaaggagaucuuccccaccggcagagugaagcacaccgaggagugcaccugcggcuucgccagcaacaagaccaucgagugcgccugcagagacaacagcuacaccgccaagagacccuucgugaagcugaacguggagaccgacaccgccgagaucagacugaugugcaccgagaccuaccuggacacccccagacccaacgacggcagcaucaccggccccugcgagagcgacggcgacaagggcagcggcggcaucaagggcggcuucgugcaccagagaauggccagcaagaucggcagaugguacagcagaaccaugagcaagaccaagagaaugggcaugggccuguacgugaaguacgacggcgaccccuggaccgacagcgaggcccuggcccugagcggcgugauggugagcauggaggagcccggcugguacagcuucggcuucgagaucaaggacaagaagugcgacgugcccugcaucggcaucgagauggugcacgacggcggcaagaccaccuggcacagcgccgccaccgccaucuacugccugaugggcagcggccagcugcugugggacaccgugaccggcgugaacaugacccuguga

SEQ ID NO: 188890 - RNA, 1401 nt, Artificial Sequence
  derived and/or modified CDS sequence (opt4) from neuraminidase__InfluenzaB__AEG21004
augcugcccagcaccauccagacccugacccuguuccugaccagcggcggcgugcugcugagccuguacgugagcgccagccugagcuaccugcuguacagcgacauccugcugaaguucagccccaccgagaucaccgcccccaccaugccccuggacugcgccaacgccagcaacgugcaggccgugaacagaagcgccaccaagggcgugacccugcugcugcccgagcccgaguggaccuaccccagacugagcugccccggcagcaccuuccagaaggcccugcugaucagcccccacagauucggcgagaccaagggcaacagcgccccccugaucaucagagagcccuucaucgccugcggccccaacgagugcaagcacuucgcccugacccacuacgccgcccagcccggcggcuacuacaacggcaccagaggcgacagaaacaagcugagacaccugaucagcgugaagcugggcaagauccccaccguggagaacagcaucuuccacauggccgccuggagcggcagcgccugccacgacggcaaggaguggaccuacaucggcguggacggccccgacaacaacgcccugcugaaggugaaguacggcgaggccuacaccgacaccuaccacagcuacgccaacaagauccugagaacccaggagagcgccugcaacugcaucggcggcaacugcuaccugaugaucaccgacggcagcgccagcggcgugagcgagugcagauuccugaagaucagagagggcagaaucaucaaggagaucuuccccaccggcagagugaagcacaccgaggagugcaccugcggcuucgccagcaacaagaccaucgagugcgccugcagagacaacagcuacaccgccaagagacccuucgugaagcugaacguggagaccgacaccgccgagaucagacugaugugcaccgacaccuaccuggacacccccagacccgacgacggcagcaucaccggccccugcgagagcaacggcgacaagggcggcggcggcaucaagggcggcuucgugcaccagagaauggagagcaagaucggcagaugguacagcagaaccaugagcaagaccgagagaaugggcaugggccuguacgugaaguacgacggcgaccccugggccgacagcgacgcccuggccuucagcggcgugauggugagcaugaaggagcccggcugguacagcuucggcuucgagaucaaggacaagaagugcgacgugcccugcaucggcaucgagauggugcacgacggcggcaaggagaccuggcacagcgccgccaccgccaucuacugccugaugggcagcggccagcugcugugggacaccgugaccggcguggacauggcccuguga

SEQ ID NO: 188891 - RNA, 1401 nt, Artificial Sequence
  derived and/or modified CDS sequence (opt4) from neuraminidase__InfluenzaB__AEG21005
augcugcccagcaccauccagacccugacccuguuccugaccagcggcggcgugcugcugagccuguacgugagcgccagccugagcuaccugcuguacagcgacauccugcugaaguucagccccaccgagaucaccgcccccaccaugccccuggacugcgccaacgccagcaacgugcaggccgugaacagaagcgccaccaagggcgugacccugcugcugcccgagcccgaguggaccuaccccagacugagcugccccggcagcaccuuccagaaggcccugcugaucagcccccacagauucggcgagaccaagggcaacagcgccccccugaucaucagagagcccuucaucgccugcggccccaacgagugcaagcacuucgcccugacccacuacgccgcccagcccggcggcuacuacaacggcaccagaggcgacagaaacaagcugagacaccugaucagcgugaagcugggcaagauccccaccguggagaacagcaucuuccacauggccgccuggagcggcagcgccugccacgacggcaaggaguggaccuacaucggcguggacggccccgacaacaacgcccugcugaaggugaaguacggcgaggccuacaccgacaccuaccacagcuacgccaacaagauccugagaacccaggagagcgccugcaacugcaucggcggcaacugcuaccugaugaucaccgacggcagcgccagcggcgugagcgagugcagauuccugaagaucagagagggcagaaucaucaaggagaucuuccccaccggcagagugaagcacaccgaggagugcaccugcggcuucgccagcaacaagaccaucgagugcgccugcagagacaacagcuacaccgccaagagacccuucgugaagcugaacguggagaccgacaccgccgagaucagacugaugugcaccgacaccuaccuggacacccccagacccgacgacggcagcaucaccggccccugcgagagcaacggcgacaagggcggcggcggcaucaagggcggcuucgugcaccagagaauggagagcaagaucggcagaugguacagcagaaccaugagcaagaccgagagaaugggcaugggccuguacgugaaguacgacggcgaccccugggccgacagcgacgcccuggccuucagcggcgugauggugagcaugaaggagcccggcugguacagcuucggcuucgagaucaaggacaagaagugcgacgugcccugcaucggcaucgagauggugcacgacggcggcaaggagaccuggcacagcgccgccaccgccaucuacugccugaugggcagcggccagcugcugugggacaccgugaccggcgugaacaugacccuguga

SEQ ID NO: 188892 - RNA, 1401 nt, Artificial Sequence; identical to SEQ ID NO: 188877
  derived and/or modified CDS sequence (opt4) from neuraminidase__InfluenzaB__AEG21006

SEQ ID NO: 188893 - RNA, 1401 nt, Artificial Sequence; identical to SEQ ID NO: 188881
  derived and/or modified CDS sequence (opt4) from neuraminidase__InfluenzaB__AEG21007

SEQ ID NO: 188894 - RNA, 1401 nt, Artificial Sequence
  derived and/or modified CDS sequence (opt4) from neuraminidase__InfluenzaB__AEG21008
augcugcccagcaccauccagacccugacccuguuccugaccagcggcggcgugcugcugagccuguacgugagcgccagccugagcuaccugcuguacagcgacauccugcugaaguucagccccaccgagaucaccgcccccaccaugccccuggacugcgccaacgccagcaacgugcaggccgugaacagaagcgccaccaagggcgugacccugcugcugcccgagcccgaguggaccuaccccagacugagcugccccggcagcaccuuccagaaggcccugcugaucagcccccacagauucggcgagaccaagggcaacagcgccccccugaucaucagagagcccuucaucgccugcggccccaacgagugcaagcacuucgcccugacccacuacgccgcccagcccggcggcuacuacaacggcaccagaggcgacagaaacaagcugagacaccugaucagcgugaagcugggcaagauccccaccguggagaacagcaucuuccacauggccgccuggagcggcagcgccugccacgacggcaaggaguggaccuacaucggcguggacggccccgacaacaacgcccugcugaaggugaaguacggcgaggccuacaccgacaccuaccacagcuacgccaacaagauccugagaacccaggagagcgccugcaacugcaucggcggcaacugcuaccugaugaucaccgacggcagcgccagcggcgugagcgagugcagauuccugaagaucagagagggcagaaucaucaaggagaucuuccccaccggcagagugaagcacaccgaggagugcaccugcggcuucgccagcaacaagaccaucgagugcgccugcagagacaacagcuacaccgccaagagacccuucgugaagcugaacguggagaccgacaccgccgagaucagacugaugugcaccgacaccuaccuggacacccccagacccgacgacggcagcaucaccggccccugcgagagcaacggcgacaagggcagcggcggcaucaagggcggcuucgugcaccagagaauggccagcaagaucggcagaugguacagcagaaccaugagcaagaccaagagaaugggcaugggccuguacgugaaguacgacggcgaccccugggccgacagcgacgcccuggccuucagcggcgugauggugagcaugaaggagcccggcugguacagcuucggcuucgagaucaaggacaagaagugcgacgugcccugcaucggcaucgagauggugcacgacggcggcaaggagaccuggcacagcgccgccaccgccaucuacugccugaugggcagcggccagcugcugugggacaccgugaccggcguggacauggcccuguga

SEQ ID NO: 188895 - RNA, 1401 nt, Artificial Sequence; identical to SEQ ID NO: 188881
  derived and/or modified CDS sequence (opt4) from neuraminidase__InfluenzaB__AEG21009

SEQ ID NO: 188896 - RNA, 1401 nt, Artificial Sequence; identical to SEQ ID NO: 188881
  derived and/or modified CDS sequence (opt4) from neuraminidase__InfluenzaB__AEG21010

SEQ ID NO: 188897 - RNA, 1401 nt, Artificial Sequence; identical to SEQ ID NO: 188881
  derived and/or modified CDS sequence (opt4) from neuraminidase__InfluenzaB__AEG21011

SEQ ID NO: 188898 - RNA, 1401 nt, Artificial Sequence; identical to SEQ ID NO: 188881
  derived and/or modified CDS sequence (opt4) from neuraminidase__InfluenzaB__AEG21012

SEQ ID NO: 188899 - RNA, 1401 nt, Artificial Sequence
  derived and/or modified CDS sequence (opt4) from neuraminidase__InfluenzaB__AEG21013
augcugcccagcaccauccagacccugacccuguuccugaccagcggcggcgugcugcugagccuguacgugagcgccagccugagcuaccugcuguacagcgacauccugcugaaguucagccccaccgagaucaccgcccccaccaugccccuggacugcgccaacgccagcaacgugcaggccgugaacagaagcgccaccaagggcgugacccugcugcugcccgagcccgaguggaccuaccccagacugagcugccccggcagcaccuuccagaaggcccugcugaucagcccccacagauucggcgagaccaagggcaacagcgccccccugaucaucagagagcccuucaucgccugcggccccaacgagugcaagcacuucgcccugacccacuacgccgcccagcccggcggcuacuacaacggcaccagaggcgacagaaacaagcugagacaccugaucagcgugaagcugggcaagauccccaccguggagaacagcaucuuccacauggccgccuggagcggcagcgccugccacgacggcaaggaguggaccuacaucggcguggacggccccgacaacaacgcccugcugaaggugaaguacggcgaggccuacaccgacaccuaccacagcuacgccaacaagauccugagaacccaggagagcgccugcaacugcaucggcggcaacugcuaccugaugaucaccgacggcagcgccagcggcgugagcgagugcagauuccugaagaucagagagggcagaaucaucaaggagaucuuccccaccggcagagugaagcacaccgaggagugcaccugcggcuucgccagcaacaagaccaucgagugcgccugcagagacaacagcuacaccgccaagagacccuucgugaagcugaacguggagaccgacaccgccgagaucagacugaugugcaccgacaccuaccuggacacccccagacccaacgacggcagcaucaccggccccugcgagagcgacggcgacaagggcagcggcggcaucaagggcggcuucgugcaccagagaaugaagagcaagaucggcagaugguacagcagaaccaugagcaagaccgagagaaugggcaugggccuguacgugaaguacgacggcgaccccugggccgacagcgacgcccuggccuucagcggcgugauggugagcaugaaggagcccggcugguacagcuucggcuucgagaucaaggacaagaagugcgacgugcccugcaucggcaucgagauggugcacgacggcggcaaggagaccuggcacagcgccgccaccgccaucuacugccugaugggcagcggccagcugcugugggacaccgugaccggcguggacauggcccuguga

SEQ ID NO: 188900 - RNA, 1401 nt, Artificial Sequence
  derived and/or modified CDS sequence (opt4) from neuraminidase__InfluenzaB__AEN68957
augcugcccagcaccauccagacccugacccuguuccugaccagcggcggcgugcugcugagccuguacgugagcgccagccugagcuaccugcuguacagcgacauccugcugaaguucagcagaaccgagauccccgcccccaucaugccccuggacugcgccaacgccagcaacgugcaggccgugaacagaagcgccaccaagggcgugacccugcugcugcccgagcccgaguggaccuaccccagacugagcugccccggcagcaccuuccagaaggcccugcugaucagcccccacagauucggcgagaccaagggcaacagcgccccccugaucaucagagagcccuucaucgccugcggccccaaggagugcaagcacuucgcccugacccacuacgccgcccagcccggcggcuacuacaacggcaccagagaggacagaaacaagaugagacaccugaucagcgugaagcugggcaagauccccaccguggagaacagcaucuuccacauggccgccuggagcggcagcgccugccacgacggcagagaguggaccuacaucggcguggacggccccgacagcaacgcccugcugaagaucaaguacggcgaggccuacaccgacaccuaccacagcuacgccaagaacauccugagaacccaggagagcgccugcaacugcaucggcggcgacugcuaccugaugaucaccgacggccccgccagcggcaucagcgagugcagauuccugaagaucagagagggcagaaucaucaaggagaucuuccccaccggcagagugaaguacaccgaggagugcaccugcggcuucgccagcaacaagaccaucggcugcgccugcagagacaacagcuacaccgccaagagacccuucgugaagcugaacguggagaccgacaccgccgagaucagacugaugugcaccgagaccuaccuggacacccccagacccaacgacggcagcaucaccggccccugcgagagcaacggcgacaagggcagcggcggcaucaagggcggcuucgugcaccagagaauggccagcaagaucggcagaugguacagcagaaccaugagcaagaccaagagaaugggcaugggccuguacgugaaguacgacggcgaccccuggaccgacagcgaggcccuggcccugagcggcgugauggugagcauggaggagcccggcugguacagcuucggcuucgagaucaaggacaagaagugcgacgugcccugcaucggcaucgagauggugcacgacggcggcaagaccaccuggcacagcgccgccaccgccaucuacugccugaugggcagcggccagcugaugugggacaccgugaccggcgugaacaugacccuguga

SEQ ID NO: 188901 - RNA, 1401 nt, Artificial Sequence
  derived and/or modified CDS sequence (opt4) from neuraminidase__InfluenzaB__AEO80071
augcugcccagcaccauccagacccugacccuguuccugaccagcggcggcgugcugcugagccuguacgugagcgccagccugagcuaccugcuguacagcgacauccugcugaaguucagccccaccgagaucaccgcccccaccaugccccuggacugcgccaacgccagcaacgugcacgccgugaacagaagcgccaccaagggcgugacccugcugcugcccgagcccgaguggaccuaccccagacugagcugccccggcagcaccuuccagaaggcccugcugaucagcccccacagauucggcgagaccaagggcaacagcgccccccugaucaucagagagcccuucaucgccugcggccccaacgagugcaagcacuucgcccugacccacuacgccgcccagcccggcggcuacuacaacggcaccagaggcgacagaaacaagcugagacaccugaucagcgugaagcugggcaagauccccaccguggagaacagcaucuuccacauggccgccuggagcggcagcgccugccacgacggcaaggaguggaccuacaucggcguggacggccccgacaacaacgcccugcugaagaucaaguacggcgaggccuacaccgacaccuaccacagcuacgccaacaacauccugagaacccaggagagcgccugcaacugcaucggcggcaacugcuaccugaugaucaccgacggcagcgccagcggcgugagcgagugcagauuccugaagaucagagagggcagaaucaucaaggagaucuuccccaccggcagagugaagcacaccgaggagugcaccugcggcuucgccagcaacaagaccaucgagugcgccugcagagacaacagcuacaccgccaagagacccuucgugaagcugaacguggagaccgacaccgccgagaucagacugaugugcaccgacaccuaccuggacacccccagacccgacgacggcagcaucaccggccccugcgagagcaacggcgacaagggcagcggcggcaucaagggcggcuucgugcaccagagaauggccagcaagaucggcagaugguacagcagaaccaugagcaagaccgagagaaugggcaugggccuguacgugaaguacgacggcgaccccugggccgacagcgacgcccuggccuucagcggcgugauggugagcaugaaggagcccggcugguacagcuucggcuucgagaucaaggacaagaagugcgacgugcccugcaucggcaucgagauggugcacgacggcggcaaggagaccuggcacagcgccgccaccgccaucuacugccugaugggcagcggccagcugcugugggacaccgugaccggcguggacauggcccuguga

SEQ ID NO: 188902 - RNA, 1401 nt, Artificial Sequence
  derived and/or modified CDS sequence (opt4) from neuraminidase__InfluenzaB__AEO80082
augcugcccagcaccauccagacccugacccuguuccugaccagcggcggcgugcugcugagccuguacgugagcgccagccugagcuaccugcuguacagcgacauccugcugaaguucagccagaccggcaucaccgcccccaucaugccccuggacugcgccaacgccagcaacgugcaggccgugaacagaagcgccaccaagggcgugacccugcugcugcccgagcccgaguggaccuaccccagacugagcugccccggcagcaccuuccagaaggcccugcugaucagcccccacagauucggcgagaccaagggcaacagcgccccccugaucaucagagagcccuucaucgccugcggccccaccgagugcaaguacuucgcccugacccacuacgccgcccagcccggcggcuacuacaacggcaccagagaggacagaaacaagcugagacaccugaucagcgugaagcugggcaagauccccaccguggagaacagcaucuuccacauggccgccuggagcggcagcgccugccacgacggcaaggaguggaccuacaucggcguggacggccccgacagcaacgcccugcugaagaucaaguacggcgaggccuacaccgacaccuaccacagcuacgccaagaacauccugagaacccaggagagcgccugcaacugcaucggcggcgacugcuaccugaugaucaccgacggccccgccagcggcaucagcgagugcagauuccugaagaucagagagggcagaaucaucaaggagaucuuccccaccggcagagugaagcacaccgaggagugcaccugcggcuucgccagcaacaagaccaucgagugcgccugcagagacaacagcuacaccgccaagagacccuucgugaagcugaacguggagaccgacaccgccgagaucagacugaugugcaccgagaccuaccuggacacccccagacccaacgacggcagcaucaccggccccugcgagagcgacggcgacaagggcagcggcggcaucaagggcggcuucgugcaccagagaauggccagcaagaucggcagaugguacagcagaaccaugagcaagaccaagagaaugggcaugggccuguacgugaaguacgacggcgaccccuggaccgacagcgaggcccuggcccugagcggcgugauggugagcauggaggagcccggcugguacagcuucggcuucgagaucaaggacaagaagugcgacgugcccugcaucggcaucgagauggugcacgacggcggcaagaccaccuggcacagcgccgccaccgccaucuacugccugaugggcagcggccagcugcugugggacaccgugaccggcguggacauggcccuguga

SEQ ID NO: 188903 - RNA, 1401 nt, Artificial Sequence; identical to SEQ ID NO: 188742
  derived and/or modified CDS sequence (opt4) from neuraminidase__InfluenzaB__AEO80090

SEQ ID NO: 188904 - RNA, 1401 nt, Artificial Sequence; identical to SEQ ID NO: 188687
  derived and/or modified CDS sequence (opt4) from neuraminidase__InfluenzaB__AEO80101

SEQ ID NO: 188905 - RNA, 1401 nt, Artificial Sequence; identical to SEQ ID NO: 188783
  derived and/or modified CDS sequence (opt4) from neuraminidase__InfluenzaB__AEO80149

SEQ ID NO: 188906 - RNA, 1401 nt, Artificial Sequence; identical to SEQ ID NO: 188695
  derived and/or modified CDS sequence (opt4) from neuraminidase__InfluenzaB__AEO80158

SEQ ID NO: 188907 - RNA, 1401 nt, Artificial Sequence; identical to SEQ ID NO: 188695
  derived and/or modified CDS sequence (opt4) from neuraminidase__InfluenzaB__AEO80167

SEQ ID NO: 188908 - RNA, 1401 nt, Artificial Sequence; identical to SEQ ID NO: 188783
  derived and/or modified CDS sequence (opt4) from neuraminidase__InfluenzaB__AEO80176

SEQ ID NO: 188909 - RNA, 1401 nt, Artificial Sequence
  derived and/or modified CDS sequence (opt4) from neuraminidase__InfluenzaB__AEO80187
augcugcccagcaccauccagacccugacccuguuccugaccagcggcggcgugcugcugagccuguacgugagcgccagccugagcuaccugcuguacagcgacauccugcugaaguucagccccaccgagaucaccgcccccaccaugccccugggcugcgccaacgccagcaacgugcaggccgugaacagaagcgccaccaagggcgugacccugcugcugcccgagcccgaguggaccuaccccagacugagcugccccggcagcaccuuccagaaggcccugcugaucagcccccacagauucggcgagaccaagggcaacagcgccccccugaucaucagagagcccuucaucgccugcggccccaacgagugcaagcacuucgcccugacccacuacgccgcccagcccggcggcuacuacaacggcaccagaggcgacagaaacaagcugagacaccugaucagcgugaagcugggcaagauccccaccguggagaacagcaucuuccacauggccgccuggagcggcagcgccugccacgacggcaaggaguggaccuacaucggcguggacggccccgacaacaacgcccugcugaagaucaaguacggcgaggccuacaccgacaccuaccacagcuacgccaacaagauccugagaacccaggagagcgccugcaacugcaucggcggcaacugcuaccugaugaucaccgacggcagcgccagcggcgugagcgagugcagauuccugaagaucagagagggcagaaucaucaaggagaucuuccccaccggcagagugaagcacaccgaggagugcaccugcggcuucgccagcaacaagaccaucgagugcgccugcagagacaacagcuacaccgccaagagacccuucgugaagcugaacguggagaccgacaccgccgagaucagacugaugugcaccgacaccuaccuggacacccccagacccgacgacggcagcaucaccggccccugcgagagcaacggcgacagaggcagcggcggcaucaagggcggcuucgugcaccagagaauggccagcaagaucggcagaugguacagcagaaccaugagcaagaccgagagaaugggcaugggccuguacgugaaguacgacggcgaccccugggccgacagcgacgcccuggccuucagcggcgugauggugagcaugaaggagcccggcugguacagcuucggcuucgagaucaaggacaagaagugcgacgugcccugcaucggcaucgagauggugcacgacggcggcaaggagaccuggcacagcgccgccaccgccaucuacugccugaugggcagcggccagcugcugugggacaccgugaccggcguggacauggcccuguga

SEQ ID NO: 188910 - RNA, 1401 nt, Artificial Sequence
  derived and/or modified CDS sequence (opt4) from neuraminidase__InfluenzaB__AEO80198
augcugcccagcaccauccagacccugacccuguuccugaccagcggcggcgugcugcugagccuguacgugagcgccagccugagcuaccugcuguacagcgacauccugcugaaguucagccccaccgagaucaccgcccccaccaugccccuggacugcgccaacgccagcaacgugcaggccgugaacagaagcgccaccaagggcgugacccugcugcugcccgagcccgaguggaccuaccccagacugagcugccccggcagcaccuuccagaaggcccugcugaucagcccccacagauucggcgagaccaagggcaacagcgccccccugaucaucagagagcccuucaucgccugcggccccaacgagugcaagcacuucgcccugacccacuacgccgcccagcccggcggcuacuacaacggcaccagaggcgacagaaacaagcugagacaccugaucagcgugaagcugggcaagauccccaccguggagaacagcaucuuccacauggccgccuggagcggcagcgccugccacgacggcaaggaguggaccuacaucggcguggacggccccgacaacaacgcccugcugaagaucaaguacggcgaggccuacaccgacaccuaccacagcuacgccaacaagauccugagaacccaggagagcgccugcaacugcaucggcggcaacugcuaccugaugaucaccgacggcagcgccagcggcgugagcgagugcagauuccugaagaucagagagggcagaaucaucaaggagaucuuccccaccggcagagugaagcacaccgaggagugcaccugcggcuucgccagcaacaagaccaucgagugcgccugcagagacaacagcuacaccgccaagagacccuucgugaagcugaacguggagaccgacaccgccgagaucagacugaugugcaccgacaccuaccuggacacccccagacccgacgacggcagcaucaccggccccugcgagagcaacggcgacagaggcagcggcggcaucaagggcggcuucgugcaccagagaauggccagcaagaucggcagaugguacagcagaaccaugagcaagaccgagagaaugggcaugggccuguacgugaaguacgacggcgaccccugggccgacagcgacgcccuggccuucagaggcgugauggugagcaugaaggagcccggcugguacagcuucggcuucgagaucaaggacaagaagugcgacgugcccugcaucggcaucgagauggugcacgacggcggcaaggagaccuggcacagcgccgccaccgccaucuacugccugaugggcagcggccagcugcugugggacaccgugaccggcguggacauggcccuguga

SEQ ID NO: 188911 - RNA, 1401 nt, Artificial Sequence; identical to SEQ ID NO: 188851
  derived and/or modified CDS sequence (opt4) from neuraminidase__InfluenzaB__AEO80209

SEQ ID NO: 188912 - RNA, 1401 nt, Artificial Sequence
  derived and/or modified CDS sequence (opt4) from neuraminidase__InfluenzaB__AEO80220
augcugcccagcaccauccagacccugacccuguuccugaccagcggcggcgugcugcugagccuguacgugagcgccagccugagcuaccugcuguacagcgacauccugcugaaguucagccccaccgagaucaccgcccccaccaugccccuggacugcgccaacgccagcaacgugcaggccgugaacagaagcgccaccaagggccugacccugcugcugcccgagcccgaguggaccuaccccagacugagcugccccggcagcaccuuccagaaggcccugcugaucagcccccacagauucggcgagaccaagggcaacagcgccccccugaucaucagagagcccuucaucgccugcggccccaacgagugcaagcacuucgcccugacccacuacgccgcccagcccggcggcuacuacaacggcaccagaggcgacagaaacaagcugagacaccugaucagcgugaagcugggcaagauccccaccguggagaccagcaucuuccacauggccgccuggagcggcagcgccugccacgacggcaaggaguggaccuacaucggcguggacggccccgacaacaacgcccugcugaagaucaaguacggcgaggccuacaccgacaccuaccacagcuacgccaacaagauccugagaacccaggagagcgccugcaacugcaucggcggcaacugcuaccugaugaucaccgacggcagcgccagcggcgugagcgagugcagauuccugaagaucagagagggcagaaucaucaaggagaucuuccccaccggcagagugaagcacaccgaggagugcaccugcggcuucgccagcaacaagaccaucgagugcgccugcagagacaacagcuacaccgccaagagacccuucgugaagcugaacguggagaccgacaccgccgagaucagacugaugugcaccgacaccuaccuggacacccccagacccgacgacggcagcaucaccggccccugcgagagcaacggcgacagaggcagcggcggcaucaagggcggcuucgugcaccagagaauggccagcaagaucggcagaugguacagcagaaccaugagcaagaccgagagaaugggcaugggccuguacgugaaguacgacggcgaccccugggccgacagcgacgcccuggccuucagcggcgugauggugagcaugaaggagcccggcugguacagcuucggcuucgagaucaaggacaagaagugcgacgugcccugcaucggcaucgagauggugcacgacggcggcaaggagaccuggcacagcgccgccaccgccaucuacugccugaugggcagcggccagcugcugugggacaccgugaccggcguggacauggcccuguga

SEQ ID NO: 188913 - RNA, 1401 nt, Artificial Sequence; identical to SEQ ID NO: 188848
  derived and/or modified CDS sequence (opt4) from neuraminidase__InfluenzaB__AEO80231

SEQ ID NO: 188914 - RNA, 1401 nt, Artificial Sequence; identical to SEQ ID NO: 188851
  derived and/or modified CDS sequence (opt4) from neuraminidase__InfluenzaB__AEO80242

SEQ ID NO: 188915 - RNA, 1401 nt, Artificial Sequence; identical to SEQ ID NO: 188695
  derived and/or modified CDS sequence (opt4) from neuraminidase__InfluenzaB__AEP20182

SEQ ID NO: 188916 - RNA, 1401 nt, Artificial Sequence
  derived and/or modified CDS sequence (opt4) from neuraminidase__InfluenzaB__AEP20193
augcugcccagcaccauccagacccugacccuguuccugaccagcggcggcgugcugcugagccuguacgugagcgccagccugagcuaccugcuguacagcgacauccugcugaaguucagccccaccgagaucaccgcccccaccaugccccuggacugcgccaacgccagcaacgugcacgccgugaacagaagcgccaccaagggcgugacccugcugcugcccgagcccgaguggaccuaccccagacugagcugccccggcagcaccuuccagaaggcccugcugaucagcccccacagauucggcgagaccaagggcaacagcgccccccugaucaucagagagcccuucaucgccugcggccccaacgagugcaagcacuucgcccugacccacuacgccgcccagcccggcggcuacuacaacggcaccagaggcgacagaaacaagcugagacaccugaucagcgugaagcugggcaagauccccaccguggagaacagcaucuuccacauggccgccuggagcggcagcgccugccacgacggcaaggaguggaccuacaucggcguggacggccccgacaacaacgcccugcugaagaucaaguacggcgaggccuacaccgacaccuaccacagcuacgccaacaacauccugagaacccaggagagcgccugcaacugcaucggcggcaacugcuaccugaugaucaccgacggcagcgccagcggcgugagcgagugcagauuccugaagaucagagagggcagaaucaucaaggagaucuuccccaccggcagagugaagcacaccgaggagugcaccugcggcuucgccagcaacaagaccaucgagugcgccugcagagacaacagcuacaccgccaagagacccuucgugaagcugaacguggagaccgacaccgccgagaucagacugaugugcaccgacaccuaccuggacacccccagacccgacgacggcagcaucaccggccccugcgagagcaacggcgacaagggcagcggcggcaucaagggcggcuucgugcaccagagaauggccagcaagaucggcagaugguacagcagaaccaugagcaagaccgagagaaugggcaugggccuguacgugaaguacgacggcgaccccugggccgacagcgacgcccuggccuucagcggcgugauggugagcgugaaggagcccggcugguacagcuucggcuucgagaucaaggacaagaagugcgacgugcccugcaucggcaucgagauggugcacgacggcggcaaggagaccuggcacagcgccgccaccgccaucuacugccugaugggcagcggccagcugcugugggacaccgugaccggcguggacauggcccuguga

SEQ ID NO: 188917 - RNA, 1401 nt, Artificial Sequence
  derived and/or modified CDS sequence (opt4) from neuraminidase__InfluenzaB__AEP20204
augcugcccagcaccauccagacccugacccuguuccugaccagcggcggcgugcugcugagccuguacgugagcgccagccugagcuaccugcuguacagcgacauccugcugaaguucagccccaccgagaucaccgcccccaccaugccccuggacugcgccaacgccagcaacgugcaggccgugaacagaagcgccaccaagggcgugacccugcugcugcccgagcccgaguggaccuaccccagacugagcugccccggcagcaccuuccagaaggcccugcugaucagcccccacagauucggcgagaccaagggcaacagcgccccccugaucaucagagagcccuucaucgccugcggccccaacgagugcaagcacuucgcccugacccacuacgccgcccagcccggcggcuacuacaacggcaccagaggcgacagaaacaagcugagacaccugaucagcgugaagcugggcaagauccccaccguggagaacagcaucuuccacauggccgccuggagcggcagcgccugccacgacggcaaggaguggaccuacaucggcguggacggccccgacaacaacgcccugcugaagaucaaguacggcgaggccuacaccgacaccuaccacagcuacgccaacaagauccugagaacccaggagagcgccugcaacugcaucggcggcaacugcuaccugaugaucaccgacggcagcgccagcggcgugagcgagugcagauuccugaagaucagagagggcagaaucaucaaggagaucuuccccaccggcagagugaagcacaccgaggagugcaccugcggcuucgccagcaacaagaccaucgagugcgccugcagagacaacagcuacaccgccaagagacccuucgugaagcugaacguggagaccgacaccgccgagaucagacugaugugcaccgacaccuaccuggacacccccagacccgacgacggcagcaucaccggccccugcgagagcaacggcgacaagggcagcggcggcaucaagggcggcuucgugcaccagagaauggccagcaagaucggcagaugguacagcagaaccaugagcaagaccgagagaaugggcaugggccuguacgugaaguacgacggcgaccccugggccgacagcgacgcccuggccuucagcggcgugauggugagcaucaaggagcccggcugguacagcuucggcuucgagaucaaggacaagaagugcgacgugcccugcaucggcaucgagauggugcacgacggcggcaaggagaccuggcacagcgccgccaccgccaucuacugccugaugggcagcggccagcugcugugggacaccgugaccggcguggacauggcccuguga

SEQ ID NO: 188918 - RNA, 1401 nt, Artificial Sequence; identical to SEQ ID NO: 188747
  derived and/or modified CDS sequence (opt4) from neuraminidase__InfluenzaB__AEP20215

SEQ ID NO: 188919 - RNA, 1401 nt, Artificial Sequence
  derived and/or modified CDS sequence (opt4) from neuraminidase__InfluenzaB__AEP20237
augcugcccagcaccauccagacccugacccuguuccugaccagcggcggcgugcugcugagccuguacgugagcgccagccugagcuaccugcuguacagcgacauccugcugaaguucagccccaccgagaucaccgcccccaccaugccccuggacugcgccaacgccagcaacgugcaggccgugaacagaagcgccaccaagggcgugacccugcugcugcccgagcccgaguggaccuaccccagacugagcugccccggcagcaccuuccagaaggcccugcugaucagcccccacagauucggcgagaccaagggcaacagcgccccccugaucaucagagagcccuucaucgccugcggccccaaggagugcaagcacuucgcccugacccacuacgccgcccagcccggcggcuacuacaacggcaccagaggcgacagaaacaagcugagacaccugaucagcgugaagcugggcaagauccccaccguggagaacagcaucuuccacauggccgccuggagcggcagcgccugccacgacggcaaggaguggaccuacaucggcguggacggccccgacagcaacgcccugcugaagaucaaguacggcgaggccuacaccgacaccuaccacagcuacgccaacaacauccugagaacccaggagagcgccugcaacugcaucggcggcaacugcuaccugaugaucaccgacggcagcgccagcggcaucagcgagugcagauuccugaagaucagagagggcagaaucaucaaggagaucuuccccaccggcagagugaagcacaccgaggagugcaccugcggcuucgccagcaacaagaccaucgagugcgccugcagagacaacagcuacaccgccaagagacccuucgugaagcugaacguggagaccgacgccgccgagaucagacugaugugcaccgagaccuaccuggacacccccagacccgacgacggcagcaucaccggccccugcgagagcaacggcgacaagggcagcggcggcaucaagggcggcuucgugcaccagagaauggccagcaagaucggcagaugguacagcagaaccaugagcaagaccaagagaaugggcaugggccuguacgugaaguacgacggcgaccccuggaccgacagcgacgcccuggcccugagcggcgugauggugagcauggaggagcccggcugguacagcuucggcuucgagaucaaggacaagaagugcgacgugcccugcaucggcaucgagauggugcacgacggcggcaaggagaccuggcacagcgccgccaccgccaucuacugccugaugggcagcggccagcugcugugggacaccgugaccggcguggacauggcccuguga

SEQ ID NO: 188920 - RNA, 1401 nt, Artificial Sequence; identical to SEQ ID NO: 188747
  derived and/or modified CDS sequence (opt4) from neuraminidase__InfluenzaB__AEP20248

SEQ ID NO: 188921 - RNA, 1401 nt, Artificial Sequence
  derived and/or modified CDS sequence (opt4) from neuraminidase__InfluenzaB__AEP20259
augcugcccagcaccauccagacccugacccuguuccugaccagcggcggcgugcugcugagccuguacgugagcgccagccugagcuaccugcuguacagcgacauccugcugaaguucagccccaccgagaucaccgcccccaccaugccccuggacugcgccaacgccagcaacgugcaggccgugaacagaagcgccaccaagggcgugacccugcugcugcccgagcccgaguggaccuaccccagacugagcugccccggcagcaccuuccagaaggcccugcugaucagcccccacagauucggcgagaccaagggcaacagcgccccccugaucaucagagagcccuucaucgccugcggccccaacgagugcaagcacuucgcccugacccacuacgccgcccagcccggcggcuacuacaacggcaccagaggcgacagaaacaagcugagacaccugaucagcgugaagcugggcaagauccccaccguggagaacagcaucuuccacauggccgccuggagcggcagcgccugccacgacggcaaggaguggaccuacaucggcguggacggccccgacaacaacgcccugcugaagaucaaguacggcgaggccuacaccgacaccuaccacagcuacgccaacaacauccugagaacccaggagagcgccugcaacugcaucggcggcaacugcuaccugaugaucaccgacggcagcgccagcggcgugagcgagugcagauuccugaagaucagagagggcagaaucaucaaggagaucuuccccaccggcagagugaagcacaccgaggagugcaccugcggcuucgccagcaacaagaucaucgagugcgccugcagagacaacagcuacaccgccaagagacccuucgugaagcugaacguggagaccgacaccgccgagaucagacugaugugcaccgagaccuaccuggacacccccagacccgacgacggcagcaucaccggccccugcgagagcaacggcgacaagggcagcggcggcaucaagggcggcuucgugcaccagagaauggccagcaagaucggcagaugguacagcagaaccaugagcaagaccgagagaaugggcaugggccuguacgugaaguacgacggcgaccccugggccgacagcgacgcccuggcccugagcggcgugauggugagcauggaggagcccggcugguacagcuucggcuucgagaucaaggacaagaagugcgacgugcccugcaucggcaucgagauggugcacgacggcggcaaggagaccuggcacagcgccgccaccgccaucuacugccugaugggcagcggccagcugcugugggacaccgugaccggcguggacauggcccuguga

SEQ ID NO: 188922 - RNA, 1401 nt, Artificial Sequence
  derived and/or modified CDS sequence (opt4) from neuraminidase__InfluenzaB__AEP20281
augcugcccagcaccauccagacccugacccuguuccugaccagcggcggcgugcugcugagccuguacgugagcgccagccugagcuaccugcuguacagcgacauccugcugaaguucagccccaccgagaucaccgcccccaccaugccccuggacugcgccaacgccagcaacgugcaggccgugaacagaagcaccaccaagggcgugacccugcugcugcccgagcccgaguggaccuaccccagacugagcugccccggcagcaccuuccagaaggcccugcugaucagcccccacagauucggcgagaccaagggcaacagcgccccccugaucaucagagagcccuucaucgccugcggccccaacgagugcaagcacuucgcccugacccacuacgccgcccagcccggcggcuacuacaacggcaccagaggcgacagaaacaagcugagacaccugaucagcgugaagcugggcaagauccccaccguggagaacagcaucuuccacauggccgccuggagcggcagcgccugccacgacggcaaggaguggaccuacaucggcguggacggccccgacaacaacgcccugcugaagaucaaguacggcgaggccuacaccgacaccuaccacagcuacgccaacaacauccugagaacccaggagagcgccugcaacugcaucggcggcaacugcuaccugaugaucaccgacggcagcgccagcggcgugagcgagugcagauuccugaagaucagagagggcagaaucaucaaggagaucuuccccaccggcagagugaagcacaccgaggagugcaccugcggcuucgccagcaacaagaccaucgagugcgccugcagagacaacagcuacaccgccaagagacccuucgugaagcugaacguggagaccgacaccgccgagaucagacugaugugcaccgagaccuaccuggacacccccagacccgacgacggcagcaucaccggccccugcgagagcaacggcgacaagggcagcggcggcaucaagggcggcuucgugcaccagagaauggccagcaagaucggcagaugguacagcagaaccaugagcaagaccgagagaaugggcaugggccuguacgugaaguacgacggcgaccccugggccgacagcgacgcccuggcccugagcggcgugauggugagcauggaggagcccggcugguacagcuucggcuucgagaucaaggacaagaagugcgacgugcccugcaucggcaucgagauggugcacgacggcggcaaggagaccuggcacagcgccgccaccgccaucuacugccugaugggcagcggccagcugcugugggacaccgugaccggcguggacauggcccuguga

SEQ ID NO: 188923 - RNA, 1401 nt, Artificial Sequence; identical to SEQ ID NO: 188695
  derived and/or modified CDS sequence (opt4) from neuraminidase__InfluenzaB__AEP20292

SEQ ID NO: 188924 - RNA, 1401 nt, Artificial Sequence; identical to SEQ ID NO: 188687
  derived and/or modified CDS sequence (opt4) from neuraminidase__InfluenzaB__AEP20303

SEQ ID NO: 188925 - RNA, 1401 nt, Artificial Sequence
  derived and/or modified CDS sequence (opt4) from neuraminidase__InfluenzaB__AEP20314
augcugcccagcaccauccagacccugacccuguuccugaccagcggcggcgugcugcugagccuguacgugagcgccagccugagcuaccugcuguacagcgacauccugcugaaguucagccagaccggcaucaccgcccccaucaugccccuggacugcgccaacgccagcaacgugcaggccgugaacagaagcgccaccaagggcgugacccugcugcugcccgagcccgaguggaccuaccccagacugagcugccccggcagcaccuuccagaaggcccugcugaucagcccccacagauucggcgagaccaagggcaacagcgccccccugaucaucagagagcccuucaucgccugcggccccaaggagugcaagcacuucgcccugacccacuacgccgcccagcccggcggcuacuacaacggcaccagagaggacagaaacaagcugagacaccugaucagcgugaagcugggcaagauccccaccguggagaacagcaucuuccacauggccgccuggagcggcagcgccugccacgacggcagagaguggaccuacaucggcguggacggccccgacagcaacgcccugcugaagaucaaguacggcgaggccuacaccgacaccuaccacagcuacgccaagaacauccugagaacccaggagagcgccugcaacugcaucggcggcgacugcuaccugaugaucaccgacggccccgccagcggcaucagcgagugcagauuccugaagaucagagagggcagaaucaucaaggagaucuuccccaccggcagagugaagcacaccgaggagugcaccugcggcuucgccagcaacaagaccaucgagugcgccugcagagacaacagcuacaccgccaagagacccuucgugaagcugaacguggagaccgacaccgccgagaucagacugaugugcaccgagaccuaccuggacacccccagacccaacgacggcagcaucaccggccccugcgagagcaacggcgacaagggcagcggcggcaucaagggcggcuucgugcaccagagaauggccagcaagaucggcagaugguacagcagaaccaugagcaagaccaagagaaugggcaugggccuguacgugaaguacgacggcgaccccuggaccgacagcgaggcccuggcccugagcggcgugaugaucagcauggaggagcccggcugguacagcuucggcuucgagaucaaggacaagaagugcgacgugcccugcaucggcaucgagauggugcacgacggcggcaagaccaccuggcacagcgccgccaccgccaucuacugccugaugggcagcggccagcugcugugggacaccgugaccggcguggacauggcccuguga

SEQ ID NO: 188926 - RNA, 1401 nt, Artificial Sequence
  derived and/or modified CDS sequence (opt4) from neuraminidase__InfluenzaB__AEP20336
augcugcccagcaccauccagacccugacccuguuccugaccagcggcggcgugcugcugagccuguacgugagcgccagccugagcuaccugcuguacagcgacauccugcugaaguucagccccaccgagaucaccgcccccaccaugccccuggacugcgccaacgccagcaacgugcaggccgugaacagaagcgccaccaagggcgugacccugcugcugcccgagcccgaguggaccuaccccagacugagcugccccggcagcaccuuccagaaggcccugcugaucagcccccacagauucggcgagaccaagggcaacagcgccccccugaucaucagagagcccuucaucgccugcggccccaacgagugcaagcacuucgcccugacccacuacgccgcccagcccggcggcuacuacaacggcaccagaggcgacagaaacaagcugagacaccugaucagcgugaagcugggcaagauccccaccguggagaacagcaucuuccacauggccgccuggagcggcagcgccugccacgacggcaaggaguggaccuacaucggcguggacggccccgacaacaacgcccugcugaagaucaaguacggcgaggccuacaccgacaccuaccacagcuacgccaacaacauccugagaacccaggagagcgccugcaacugcaucggcggcaacugcuaccugaugaucaccgacggcagcgccagcggcgugagcgagugcagauuccugaagaucagagagggcagaaucaucaaggagaucuuccccaccggcagagugaagcacaccgaggagugcaccugcggcuucgccagcaacaagaccaucgagugcgccugcagagacaacagcuacaccgccaagagacccuucgugaagcugaacguggagaccgacaccgccgagaucagacugaugugcaccgagaccuaccuggacacccccagacccgacgacggcagcaucaccggccccugcgagagcaacggcgacaagggcagcggcggcaucaagggcggcuucgugcaccagagaauggccagcaagaucggcagaugguacagcagaaccaugagcaagaccgagagaaugggcaugggccuguacgugaaguacgacggcgaccccugggccgacagcgacgcccugacccugagcggcgugauggugagcauggaggagcccggcugguacagcuucggcuucgagaucaaggacaagaagugcgacgugcccugcaucggcaucgagauggugcacgacggcggcaaggagaccuggcacagcgccgccaccagcaucuacugccugaugggcagcggccagcugcugugggacaccgugaccggcguggacauggcccuguga

SEQ ID NO: 188927 - RNA, 1401 nt, Artificial Sequence
  derived and/or modified CDS sequence (opt4) from neuraminidase__InfluenzaB__AEP20347
augcugcccagcaccauccagacccugacccuguuccugaccagcggcggcgugcugcugagccuguacgugagcgccagccugagcuaccugcuguacagcgacauccugcugaaguucagccagaccgagaucaccgcccccaucaugccccuggacugcgccaacgccagcaacgugcaggccgugaacagaagcgccaccaagggcgugacccugcugcugcccgagcccgaguggaccuaccccagacugagcugccccggcagcaccuuccagaaggcccugcugaucagcccccacagauucggcgagaccaagggcaacagcgccccccugaucaucagagagcccuucaucgccugcggccccaccgagugcaagcacuucgcccugacccacuacgccgcccagcccggcggcuacuacaacggcaccagagaggacagaaacaagcugagacaccugaucagcgugaagcugggcaagauccccaccguggagaacagcaucuuccacauggccgccuggagcggcagcgccugccacgacggcaaggaguggaccuacaucggcguggacggccccgacagcaacgcccugcugaagaucaaguacggcgaggccuacaccgacaccuaccacagcuacgccaagaacauccugagaacccaggagagcgccugcaacugcaucggcggcgacugcuaccugaugaucaccgacggccccgccagcggcaucagcgagugcagauuccugaagaucagagagggcagaaucaucaaggagaucuuccccaccggcagagugaagcacaccgaggagugcaccugcggcuucgccagcaacaagaccaucgagugcgccugcagagacaacagcuacaccgccaagagacccuucgugaagcugaacguggagaccgacaccgccgagaucagacugaugugcaccgagaccuaccuggacacccccagacccaacgacggcagcaucaccggccccugcgagagcgacggcgacaagggcagcggcggcaucaagggcggcuucgugcaccagagaauggccagcaagaucggcagaugguacagcagaaccaugagcaagaccaagagaaugggcaugggccuguacgugaaguacgacggcgaccccuggaccgacagcgaggcccuggcccugagcggcgugauggugcccauggaggagcccggcugguacagcuucggcuucgagaucaaggacaagaagugcgacgugcccugcaucggcaucgagauggugcacgacggcggcaagaccaccuggcacagcgccgccaccgccaucuacugccugaugggcagcggccagcugcugugggacaccgugaccggcguggacauggcccuguga

SEQ ID NO: 188928 - RNA, 1401 nt, Artificial Sequence; identical to SEQ ID NO: 188927
  derived and/or modified CDS sequence (opt4) from neuraminidase__InfluenzaB__AEP20358

SEQ ID NO: 188929 - RNA, 1401 nt, Artificial Sequence; identical to SEQ ID NO: 188927
  derived and/or modified CDS sequence (opt4) from neuraminidase__InfluenzaB__AEP20369

SEQ ID NO: 188930 - RNA, 1401 nt, Artificial Sequence; identical to SEQ ID NO: 188927
  derived and/or modified CDS sequence (opt4) from neuraminidase__InfluenzaB__AEP20380

SEQ ID NO: 188931 - RNA, 1401 nt, Artificial Sequence
  derived and/or modified CDS sequence (opt4) from neuraminidase__InfluenzaB__AEP20391
augcugcccagcaccauccagacccugacccuguuccugaccagcggcggcgugcugcugagccuguacgugagcgccagccugagcuaccugcuguacagcgacauccugcugaaguucagccccaccgagaucaccgcccccaccaugccccuggacugcgccaacgccagcaacgugcaggccgugaacagaagcgccaccaagggcgugacccugcugcugcccgagcccgaguggaccuaccccagacugagcugccccggcagcaccuuccagaaggcccugcugaucagcccccacagauucggcgagaccaagggcaacagcgccccccugaucaucagagagcccuucaucgccugcggccccaacgagugcaagcacuucgcccugacccacuacgccgcccagcccggcggcuacuacaacggcaccagaggcgacagaaacagacugagacaccugaucagcgugaagcugggcaagauccccaccguggagaacagcaucuuccacauggccgccuggagcggcagcgccugccacgacggcaaggaguggaccuacaucggcguggacggccccgacaacaacgcccugcugaagaucaaguacggcgaggccuacaccgacaccuaccacagcuacgccaacaacauccugagaacccaggagagcgccugcaacugcaucggcggcaacugcuaccugaugaucaccgacggcagcgccagcggcgugagcgagugcagauuccugaagaucagagagggcagaaucaucaaggagaucuuccccaccggcagagugaagcacaccgaggagugcaccugcggcuucgccagcaacaagaccaucgagugcgccugcagagacaacagcuacaccgccaagagacccuucgugaagcugaacguggagaccgacaccgccgagaucagacugaugugcaccgacaccuaccuggacacccccagacccgacgacggcagcaucaccggccccugcgagagcaacggcgacaagggcagcggcggcaucaagggcggcuucgugcaccagagaauggccagcaaggugggcagaugguacagcagaaccaugagcaagaccgagagaaugggcaugggccuguacgugaaguacgacggcgaccccugggccgacagcgacgcccuggccuucagcggcgugauggugagcaugaaggagcccggcugguacagcuucggcuucgagaucaaggacaagaagugcgacgugcccugcaucggcaucgagauggugcacgacggcggcaaggagaccuggcacagcgccgccaccgccaucuacugccugaugggcagcggccagcugcugugggacaccgugaccggcguggacauggcccuguga

SEQ ID NO: 188932 - RNA, 1401 nt, Artificial Sequence
  derived and/or modified CDS sequence (opt4) from neuraminidase__InfluenzaB__AEP20413
augcugcccagcaccauccagacccugacccuguuccugaccagcggcggcgugcugcugagccuguacgugagcgcccugcugagcuaccugcuguacagcgacauccugcugaaguucagccccaccgagaucaucgcccccaccaugagccuggacugcgccaacgccagcaacgugcaggccgugaacagaagcgccaccaagggcgugaccuuccugcugcccgagcccgaguggaccuaccccagacugagcugccccggcagcaccuuccagaaggcccugcugaucagcccccacagauucggcgagaccaagggcaacagcgccccccugaucaucagagagcccuucaucgccugcggccccaacgagugcaagcacuucgcccugacccacuacgccgcccagcccggcggcuacuacaacggcaccagaggcgacagaaacaagcugagacaccugaucagcgugaagcugggcaagauccccaccguggagaacagcaucuuccacauggccgccuggagcggcagcgccugccacgacggcaaggaguggaccuacaucggcguggacggccccgacaacgacgcccugcugaaggugaaguacggcgaggccuacaccgacaccuaccacagcuacgccaacaagauccugagaacccaggagagcgccugcaacugcaucggcggcaacugcuaccugaugaucaccgacggcagcgccagcggcgugagcgagugcagauuccugaagaucagagagggcagaaucaucaaggagaucuuccccaccggcagagugaagcacaccgaggagugcaccugcggcuucgccagcaacaagaccaucgagugcgccugcagagacaacagcuacaccgccaagagacccuucgugaagcugaacguggagaccgacaccgccgagaucagacugaugugcaccgacaccuaccuggacacccccagacccgacgacggcagcaucaccggccccugcgagagcaacggcgacaagggcagcggcggcaucaagggcggcuucgugcaccagagaauggagagcaagaucggcagaugguacagcagaaccaugagcaagaccgagagaaugggcaugggccuguacgugaaguacaacggcgaccccugggccgacagcgacgcccuggccuucagcggcgugauggugagcaugaaggagcccggcugguacagcuucggcuucgagaucaaggacaagaagugcgacgugcccugcaucggcaucgagauggugcacgacggcggcaaggagaccuggcacagcgccgccaccgccaucuacugccugaugggcagcggccagcugcugugggacaccgugaccggcguggacauggcccuguga

SEQ ID NO: 188933 - RNA, 1401 nt, Artificial Sequence; identical to SEQ ID NO: 188932
  derived and/or modified CDS sequence (opt4) from neuraminidase__InfluenzaB__AEP20435

SEQ ID NO: 188934 - RNA, 1401 nt, Artificial Sequence; identical to SEQ ID NO: 188927
  derived and/or modified CDS sequence (opt4) from neuraminidase__InfluenzaB__AEQ39031

SEQ ID NO: 188935 - RNA, 1401 nt, Artificial Sequence
  derived and/or modified CDS sequence (opt4) from neuraminidase__InfluenzaB__AEQ39275
augcugcccagcaccauccagacccugacccuguuccugaccagcggcggcgugcugcugagccuguacgugagcgccagccugagcuaccugcuguacagcgacauccugcugaaguucagccccaaggagaucaccgcccccaccaugccccuggacugcgccaacgccagcaacgugcaggccgugaaccacagcgccaccaagggcgugacccugcugcugcccgagcccgaguggaccuaccccagacugagcugccccggcagcaccuuccagaaggcccugcugaucagcccccacagauucggcgagaccaagggcaacagcgccccccugaucaucagagagcccuucaucgccugcggccccaacgagugcaagcacuucgcccugacccacuacgccgcccagcccggcggcuacuacaacggcaccagaggcgacagaaacaagcugagacaccugaucagcgugaagcugggcaagauccccaccguggagaacagcaucuuccacauggccgccuggagcggcagcgccugccacgacggcaaggaguggaccuacaucggcguggacggccccgacaacaacgcccugcugaaggugaaguacggcgaggccuacaccgacaccuaccacagcuacgccaacaagauccugagaacccaggagagcgccugcaacugcaucggcggcaacugcuaccugaugaucaccgacggcagcgccagcggcgugagcgagugcagauuccugaagaucagagagggcagaaucaucaaggagaucuuccccaccggcagagugaagcacaccgaggagugcaccugcggcuucgccagcaacaagaccaucgagugcgccugcagagacaacagcuacaccgccaagagacccuucgugaagcugaacguggagaccgacaccgccgagaucagacugaugugcaccgacaccuaccuggacacccccagacccgacgacggcagcaucaccggccccugcgagagcaacggcgacaagggcagcggcggcaucaagggcggcuucgugcaccagagaauggagagcaagaucggcagaugguacagcagaaccaugagcaagaccgagagaaugggcaugggccuguacgugaaguacgacggcgaccccugggccgacagcgacgcccuggccuucagcggcgugauggugagcaugaaggagcccggcugguacagcuucggcuucgagaucaaggacaagaagugcgacgugcccugcaucggcaucgagauggugcacgacggcggcaaggagaccuggcacagcgccgccaccgccaucuacugccugaugggcagcggccagcugcugugggacaccgugaccggcguggacauggcccuguga

SEQ ID NO: 188936 - RNA, 1401 nt, Artificial Sequence; identical to SEQ ID NO: 188935
  derived and/or modified CDS sequence (opt4) from neuraminidase__InfluenzaB__AEQ39286

SEQ ID NO: 188937 - RNA, 1401 nt, Artificial Sequence; identical to SEQ ID NO: 188935
  derived and/or modified CDS sequence (opt4) from neuraminidase__InfluenzaB__AEQ39297

SEQ ID NO: 188938 - RNA, 1401 nt, Artificial Sequence; identical to SEQ ID NO: 188935
  derived and/or modified CDS sequence (opt4) from neuraminidase__InfluenzaB__AEQ39308

SEQ ID NO: 188939 - RNA, 1401 nt, Artificial Sequence; identical to SEQ ID NO: 188935
  derived and/or modified CDS sequence (opt4) from neuraminidase__InfluenzaB__AEQ39319

SEQ ID NO: 188940 - RNA, 1401 nt, Artificial Sequence
  derived and/or modified CDS sequence (opt4) from neuraminidase__InfluenzaB__AEQ39330
augcugcccagcaccauccagacccugacccuguuccugaccagcggcggcgugcugcugagccuguacgugagcgccagccugagcuaccugcuguacagcgacauccugcugaaguucagccccaaggagaucaccgcccccaccaugccccuggacugcgccaacgccagcaacgugcaggccgugaaccacagcgccaccaagggcgugacccugcugcugcccgagcccgaguggaccuaccccagacugagcugccccggcagcaccuuccagaaggcccugcugaucagcccccacagauucggcgagaccaagggcaacagcgccccccugaucaucagagagcccuucaucgccugcggccccaacgagugcaagcacuucgcccugacccacuacgccgcccagcccggcggcuacuacaacggcaccagaggcgacagaaacaagcugagacaccugaucagcgugaagcugggcaagauccccaccguggagaacagcaucuuccacauggccgccuggagcggcagcgccugccacgacggcaaggaguggaccuacaucggcguggacggccccgacaacaacgcccugcugaaggugaaguacggcgaggccuacaccgacaccuaccacagcuacgccaacaagauccugagaacccaggagagcgccugcaacugcaucggcggcaacugcuaccugaugaucaccgacggcagcgccagcggcgugagcgagugcagauuccugaagaucagagagggcagaaucaucaaggagaucuuccccaccggcagagugaagcacaccgaggagugcaccugcggcuucgccagcaacaagaccaucgagugcgccugcagagacaacagcuacaccgccaagagacccuucgugaagcugaacguggagaccgacaccgccgagaucagacugaugugcaccgacaccuaccuggacacccccagacccgacgacggcagcaucaccggccccugcgagagcaacggcgacaagggcagcggcggcaucaagggcggcuucgugcaccagagaauggagagcaagaucggcagaugguacagcagaaccaugagcaagaccgagagaaugggcaugggccuguacgugaaguacgacggcgaccccugggccgacagcgacgcccuggccuucagcggcgugauggugagcaugaaggagcccggcugguacagcuucggcuucgagaucaaggacaagaagugcgacgugcccugcaucggcaucgagauggugcacgacggcggcaaggagaccuggcacagcgccgccaccgccaucuacugccugaugggcagcggccagcugcugugggacaccgugaccggcguggacaucgcccuguga

SEQ ID NO: 188941 - RNA, 1401 nt, Artificial Sequence; identical to SEQ ID NO: 188935
  derived and/or modified CDS sequence (opt4) from neuraminidase__InfluenzaB__AEQ39341

SEQ ID NO: 188942 - RNA, 1401 nt, Artificial Sequence; identical to SEQ ID NO: 188935
  derived and/or modified CDS sequence (opt4) from neuraminidase__InfluenzaB__AEQ39352

SEQ ID NO: 188943 - RNA, 1401 nt, Artificial Sequence; identical to SEQ ID NO: 188935
  derived and/or modified CDS sequence (opt4) from neuraminidase__InfluenzaB__AEQ39363

SEQ ID NO: 188944 - RNA, 1401 nt, Artificial Sequence; identical to SEQ ID NO: 188901
  derived and/or modified CDS sequence (opt4) from neuraminidase__InfluenzaB__AEQ39374

SEQ ID NO: 188945 - RNA, 1401 nt, Artificial Sequence
  derived and/or modified CDS sequence (opt4) from neuraminidase__InfluenzaB__AEQ39385
augcugcccagcaccauccagacccugacccuguuccugaccagcggcggcgugcugcugagccuguacgugagcgccagccugagcuaccugcuguacagcgacauccugcugaaguucagccccaccgagaucaccgcccccaccaugccccuggacugcgccaacgccagcaacgugcaggccgugaacagaagcgccaccaagggcgugacccugcugcugcccgagcccgaguggaccuaccccagacugagcugccccggcagcaccuuccagaaggcccugcugaucagcccccacagauucggcgagaccaagggcaacagcgccccccugaucaucagagagcccuucaucgccugcggccccaaggagugcaagcacuucgcccugacccacuacgccgcccagcccggcggcuacuacaacggcaccagaggcgacagaaacaagcugagacaccugaucagcgugaagcugggcaagauccccaccguggagaacagcaucuuccacauggccgccuggagcggcagcgccugccacgacggcaaggaguggaccuacaucggcguggacggccccgacagcaacgcccugcugaagaucaaguacggcgaggccuacaccgacaccuaccacagcuacgccaacaacauccugagaacccaggagagcgccugcaacugcaucggcggcaacugcuaccugaugaucaccgacggcagcgccagcggcaucagcgagugcagauuccugaagaucagagagggcagaaucaucaaggagaucuuccccaccggcagagugaagcacaccgaggagugcaccugcggcuucgccagcaacaagaccaucgagugcgccugcagagacaacagcuacaccgccaagagacccuucgugaagcugaacguggagaccgacaccgccgagaucagacugaugugcaccgagaccuaccuggacacccccagacccgacgacggcagcaucaccggccccugcgagagcaacggcgacaagggcagcggcggcaucaagggcggcuucgugcaccagagaaugaccagcaagaucggcagaugguacagcagaaccaugagcaagaccaagagaaugggcaugggccuguacgugaaguacgacggcgaccccuggaccgacagcgacgcccuggcccugagcggcgugauggugagcauggaggagcccggcugguacagcuucggcuucgagaucaaggacaagaagugcgacgugcccugcaucggcaucgagauggugcacgacggcggcaaggagaccuggcacagcgccgccaccgccaucuacugccugaugggcagcggccagcugcugugggacaccgugaccggcguggacauggcccuguga

SEQ ID NO: 188946 - RNA, 1401 nt, Artificial Sequence
  derived and/or modified CDS sequence (opt4) from neuraminidase__InfluenzaB__AEQ39444
augcugcccagcaccauccagacccugacccuguuccugaccagcggcggcgugcugcugagccuguacgugagcgccagccugagcuaccugcuguacagcgacauccugcugaaguucagccagaccgagaucaucgcccccaucaugccccuggacugcgccaacgccagcaacgugcaggccgugaacagaagcgccaccaagggcgugacccugcugcugcccgagcccgaguggaccuaccccagacugagcugccccggcagcaccuuccagaaggcccugcugaucagcccccacagauucggcgagaccaagggcaacagcgccccccugaucaucagagagcccuucaucgccugcggccccaccgagugcaagcacuucgcccugacccacuacgccgcccagcccggcggcuacuacaacggcaccagagaggacagaaacaagcugagacaccugaucagcgugaagcugggcaagauccccaccguggagaacagcaucuuccacauggccgccuggagcggcagcgccugccacgacggcaaggaguggaccuacaucggcguggacggccccgacagcaacgcccugcugaagaucaaguacggcgaggccuacaccgacaccuaccacagcuacgccaagaacauccugagaacccaggagagcgccugcaacugcaucggcggcgacugcuaccugaugaucaccgacggccccgccagcggcaucagcgagugcagauuccugaagaucagagagggcagaaucaucaaggagaucuuccccaccggcagagugaagcacaccgaggagugcaccugcggcuucgccagcaacaagaccaucgagugcgccugcagagacaacagcuacaccgccaagagacccuucgugaagcugaacguggagaccgacaccgccgagaucagacugaugugcaccgagaccuaccuggacacccccagacccaacgacggcagcaucaccggccccugcgagagcgacggcgacaagggcagcggcggcaucaagggcggcuucgugcaccagagaauggccagcaagaucggcagaugguacagcagaaccaugagcaagaccaagagaaugggcaugggccuguacgugaaguacgacggcgaccccuggaccgacagcgaggcccuggcccugagcggcgugauggugagcauggaggagcccggcugguacagcuucggcuucgagaucaaggacaagaagugcgacgugcccugcaucggcaucgagauggugcacgacggcggcaagaccaccuggcacagcgccgccaccgccaucuacugccugaugggcagcggccagcugcugugggacaccgugaccggcguggacauggcccuguga

SEQ ID NO: 188947 - RNA, 1401 nt, Artificial Sequence; identical to SEQ ID NO: 188848
  derived and/or modified CDS sequence (opt4) from neuraminidase__InfluenzaB__AEQ39455

SEQ ID NO: 188948 - RNA, 1401 nt, Artificial Sequence
  derived and/or modified CDS sequence (opt4) from neuraminidase__InfluenzaB__AEQ39466
augcugcccagcaccauccagacccugacccuguuccugaccagcggcggcgugcugcugagccuguacgugagcgccagccugagcuaccugcuguacagcgacauccugcugaaguucagccccaccgagaucaccgcccccaccaugccccuggacugcgccaacgccagcaacgugcaggccgugaacagaagcgccaccaagggcgugacccugcugcugcccgagcccgaguggaccuaccccagacugagcugccccggcagcaccuuccagaaggcccugcugaucagcccccacagauucggcgagaccaagggcaacagcgccccccugaucaucagagagcccuucaucgccugcggccccaacgagugcaagcacuucgcccugacccacuacgccgcccagcccggcggcuacuacaacggcaccagaggcgacagaaacaagcugagacaccugaucagcgugaagcugggcaagauccccaccguggagaacagcaucuuccacauggccgccuggagcggcagcgccugccacgacggcaaggaguggaccuacaucggcguggacggccccgacaacaacgcccugcugaagaucaaguacggcgaggccuacaccgacaccuaccacagcuacgccaacaacauccugagaacccaggagagcgccugcaacugcaucggcggcaacugcuaccugaugaucaccgacggcagcgccagcggcgugagcgagugcagauuccugaagaucagagagggcagaaucaucaaggagaucuuccccaccggcagagugaagcacaccgaggagugcaccugcggcuucgccagcaacaagaccaucgagugcgccugcagagacaacagcuacaccgccaagagacccuucgugaagcugaacguggagaccgacaccgccgagaucagacugaugugcaccgacaccuaccuggacacccccagacccgacgacggcagcaucaccggccccugcgagagcaacggcgacaagggcagcggcggcaucaagggcggcuucgugcaccagagaauggccagcaaggugggcagaugguacagcagaaccaugagcaagaccgagagaaugggcaugggccuguacgugaaguacgacggcgaccccugggccgacagcgacgcccuggccuucagcggcgugauggugagcaugaaggagcccggcugguacagcuucggcuucgagaucaaggacaagaagugcgacgugcccugcaucggcaucgagauggugcacgacggcggcaaggagaccuggcacagcgccgccaccgccaucuacugccugaugggcagcggccagcugcugugggacaccgugaccggcguggacauggcccuguga

SEQ ID NO: 188949 - RNA, 1401 nt, Artificial Sequence; identical to SEQ ID NO: 188935
  derived and/or modified CDS sequence (opt4) from neuraminidase__InfluenzaB__AEQ39477

SEQ ID NO: 188950 - RNA, 1401 nt, Artificial Sequence
  derived and/or modified CDS sequence (opt4) from neuraminidase__InfluenzaB__AEQ39488
augcugcccagcaccauccagacccugacccuguuccugaccagcggcggcgugcugcugagccuguacgugagcgccagccugagcuaccugcuguacagcgacauccugcugaaguucagccccaccgagaucaccgcccccaccaugccccuggacugcgccaacgccagcaacgugcaggccgugaacagaagcgccaccaagggcgugacccugcugcugcccgagcccgaguggaccuaccccagacugagcugccccggcagcaccuuccagaaggcccugcugaucagcccccacagauucggcgagaccaagggcaacagcgccccccugaucaucagagagcccuucaucgccugcggccccaacgagugcaagcacuucgcccugacccacuacgccgcccagcccggcggcuacuacaacggcaccagaggcgacagaaacaagcugagacaccugaucagcgugaagcugggcaagauccccaccguggagaacagcaucuuccacauggccgccuggagcggcagcgccugccacgacggcaaggaguggaccuacaucggcguggacggccccgacaacaacgcccugcugaaggugaaguacggcgaggccuacaccgacaccuaccacagcuacgccaacaagauccugagaacccaggagagcgccugcaacugcaucggcggcaacugcuaccugaugaucaccgacggcagcgccagcggcgugagcgagugcagauuccugaagaucagagagggcagaaucaucaaggagaucuuccccaccggcagagugaagcacaccgaggagugcaccugcggcuucgccagcaacaagaccaucgagugcgccugcagagacaacagcuacaccgccaagagacccuucgugaagcugaacguggagaccgacaccgccgagaucagacugaugugcaccgacaccuaccuggacacccccagacccaacgacggcagcaucaccggccccugcgagagcaacggcgacaagggcagcggcggcaucaagggcggcuucgugcaccagagaauggagagcagaaucggcagaugguacagcagaaccaugagcaagaccgagagaaugggcaugggccuguacgugaaguacgacggcgaccccuggaccgacagcgacgcccuggccuucagcggcgugauggugagcaugaaggagcccggcugguacagcuucggcuucgagaucaaggacaagaagugcgacgugcccugcaucggcaucgagauggugcacgacggcggcaaggagaccuggcacagcgccgccaccgccaucuacugccugaugggcagcggccagcugcugugggacaccgugaccggcguggacauggcccuguga

SEQ ID NO: 188951 - RNA, 1401 nt, Artificial Sequence; identical to SEQ ID NO: 188901
  derived and/or modified CDS sequence (opt4) from neuraminidase__InfluenzaB__AEQ39499

SEQ ID NO: 188952 - RNA, 1401 nt, Artificial Sequence; identical to SEQ ID NO: 188747
  derived and/or modified CDS sequence (opt4) from neuraminidase__InfluenzaB__AEQ39510

SEQ ID NO: 188953 - RNA, 1401 nt, Artificial Sequence
  derived and/or modified CDS sequence (opt4) from neuraminidase__InfluenzaB__AEQ49685
augcugcccagcaccauccagacccugacccuguuccugaccagcggcggcgugcugcugagccuguacgugagcgccagccugagcuaccugcuguacagcgacauccugcugaaguucagccccaccgagaucaccgcccccaccaugccccuggacugcgccaacgccagcaacgugcaggccgugaacagaagcgccaccaagggcgugacccugcugcugcccgagcccgaguggaccuaccccagacugagcugccccggcagcaccuuccagaaggcccugcugaucagcccccacagauucggcgagaccaagggcaacagcgccccccugaucaucagagagcccuucaucgccugcggccccaacgagugcaagcacuucgcccugacccacuacgccgcccagcccggcggcuacuacaacggcaccagaggcgacagaaacaagcugagacaccugaucagcgugaagcugggcaagauccccaccguggagaacagcaucuuccacauggccgccuggagcggcagcgccugccacgacggcaaggaguggaccuacaucggcguggacggccccgacaacaacgcccugcugaaggugaaguacggcgaggccuacaccgacaccuaccacagcuacgccaacaagauccugagaacccaggagagcgccugcaacugcaucggcggcaacugcuaccugaugaucaccgacggcagcgccagcggcgugagcgagugcagauuccugaagaucagagagggcagaaucaucaaggagaucuuccccaccggcagagugaagcacaccgaggagugcaccugcggcuucgccagcaacaagaccaucgagugcgccugcagagacaacagcuacaccgccaagagacccuucgugaagcugaacguggagaccgacaccgccgagaucagacugaugugcaccgacaccuaccuggacacccccagacccaacgacggcagcaucaccggccccugcgagagcgacggcgacaagggcagcggcggcaucaagggcggcuucgugcaccagagaauggagagcaagaucggcagaugguacagcagaaccaugagcaagaccgagagaaugggcaugggccuguacgugaaguacgacggcgaccccugggccgacagcgacgcccuggccuucagcggcgugauggugagcaugaaggagcccggcugguacagcuucggcuucgagaucaaggacaagaagugcgacgugcccugcaucggcaucgagauggugcacgacggcggcaaggagaccuggcacagcgccgccaccgccaucuacugccugaugggcagcggccagcugcugugggacaccgugaccggcguggacauggaccuguga

SEQ ID NO: 188954 - RNA, 1401 nt, Artificial Sequence
  derived and/or modified CDS sequence (opt4) from neuraminidase__InfluenzaB__AEQ49686
augcugcccagcaccauccagacccugacccuguuccugaccagcggcggcgugcugcugagccuguacgugagcgccagccugagcuaccugcuguacagcgacauccugcugaaguucagccccaccgagaucaccgcccccaccaugccccuggacugcgccaacgccagcaacgugcaggccgugaacagaagcgccaccaagggcgugacccugcugcugcccgagcccgaguggaccuaccccagacugagcugccccggcagcaccuuccagaaggcccugcugaucagcccccacagauucggcgagaccaagggcaacagcgccccccugaucaucagagagcccuucaucgccugcggccccaacgagugcaagcacuucgcccugacccacuacgccgcccagcccggcggcuacuacaacggcaccagaggcgacagaaacaagcugagacaccugaucagcgugaagcugggcaagauccccaccguggagaacagcaucuuccacauggccgccuggagcggcagcgccugccacgacggcaaggaguggaccuacaucggcguggacggccccgacaacgacgcccugcugaaggugaaguacggcgaggccuacaccgacaccuaccacagcuacgccaacaagauccugagaacccaggagagcgccugcaacugcaucggcggcaacugcuaccugaugaucaccgacggcagcgccagcggcgugagcgagugcagauuccugaagaucagagagggcagaaucaucaaggagaucuuccccaccggcagagugaagcacaccgaggagugcaccugcggcuucgccagcaacaagaccaucgagugcgccugcagagacaacagcuacaccgccaagagacccuucgugaagcugaacguggagaccgacaccgccgagaucagacugaugugcaccgacaccuaccuggacacccccagacccgacgacggcagcaucaccggccccugcgagagcaacggcgacaagggcagcggcggcaucaagggcggcuucgugcaccagagaauggagagcaagaucggcagaugguacagcagaaccaugagcaagaccgagagaaugggcaugggccuguacgugaaguacgacggcgaccccugggccgacagcgacgcccuggccuucagcggcgugauggugagcaugaaggagcccggcugguacagcuucggcuucgagaucaaggacaagaagugcgacgugcccugcaucggcaucgagauggugcacgacggcggcaaggagaccuggcacagcgccgccaccgccaucuacugccugaugggcagcggccagcugcugugggacaccgugaccggcguggacauggcccuguga

SEQ ID NO: 188955 - RNA, 1401 nt, Artificial Sequence
  derived and/or modified CDS sequence (opt4) from neuraminidase__InfluenzaB__AEQ49687
augcugcccagcaccauccagacccugacccuguuccugaccagcggcggcgugcugcugagccuguacgugagcgcccugcugagcuaccugcuguacagcgacauccugcugaaguucagccccaccgagaucaccgcccccaccaugagccuggacugcgccaacgccagcaacgugcaggccgugaacagaagcgccaccaagggcgugaccuuccugcugcccgagcccgaguggaccuaccccagacugagcugccccggcagcaccuuccagaaggcccugcugaucagcccccacagauucggcgagaccaagggcaacagcgccccccugaucaucagagagcccuucaucgccugcggccccaacgagugcaagcacuucgcccugacccacuacgccgcccagcccggcggcuacuacaacggcaccagaggcgacagaaacaagcugagacaccugaucagcgugaagcugggcaagauccccaccguggagaacagcaucuuccacauggccgccuggagcggcagcgccugccacgacggcaaggaguggaccuacaucggcguggacggccccgacaacgacgcccugcugaaggugaaguacggcgaggccuacaccgacaccuaccacagcuacgccaacaagauccugagaacccaggagagcgccugcaacugcaucggcggcaacugcuaccugaugaucaccgacggcagcgccagcggcgugagcgagugcagauuccugaagaucagagagggcagaaucaucaaggagaucuuccccaccggcagagugaagcacaccgaggagugcaccugcggcuucgccagcaacaagaccaucgagugcgccugcagagacaacagcuacaccgccaagagacccuucgugaagcugaacguggagaccgacaccgccgagaucagacugaugugcaccgacaccuaccuggacacccccagacccgacgacggcagcaucaccggccccugcgagagcaacggcgacaagggcagcggcggcaucaagggcggcuucgugcaccagagaauggagagcaagaucggcagaugguacagcagaaccaugagcaagaccgagagaaugggcaugggccuguacgugaaguacgacggcgaccccugggccgacagcgacgcccuggccuucagcggcgugauggugagcaugaaggagcccggcugguacagcuucggcuucgagaucaaggacaagaagugcgacgugcccugcaucggcaucgagauggugcacgacggcggcaaggagaccuggcacagcgccgccaccgccaucuacugccugaugggcagcggccagcugcugugggacaccgugaccggcguggacauggcccuguga

SEQ ID NO: 188956 - RNA, 1401 nt, Artificial Sequence
  derived and/or modified CDS sequence (opt4) from neuraminidase__InfluenzaB__AEQ49688
augcugcccagcaccauccagacccugacccuguuccugaccagcggcggcgugcugcugagccuguacgugagcgccagccugagcuaccugcuguacagcgacauccugcugaaguucagcagaaccgagaucaccgcccccaucaugccccugggcugcgccaacgccagcaacgugcaggccgugaacagaagcgccaccaagggcgugacccugcugcugcccgagcccgaguggaccuaccccagacugagcugccccggcagcaccuuccagaaggcccugcugaucagcccccacagauucggcgagaccaagggcaacagcgccccccugaucaucagagagcccuucaucgccugcggccccaaggagugcaagcacuucgcccugacccacuacgccgcccagcccggcggcuacuacaacggcaccagagaggacagaaacaagcugagacaccugaucagcgugaagcugggcaagauccccaccguggagaacagcaucuuccacauggccgccuggagcggcagcgccugccacgacggcagagaguggaccuacaucggcguggacggccccgacagcaacgcccugcugaagaucaaguacggcgaggccuacaccgacaccuaccacagcuacgccaagaacauccugagaacccaggagagcgccugcaacugcaucggcggcgacugcuaccugaugaucaccgacggccccgccagcggcaucagcgagugcagauuccugaagaucagagagggcagaaucaucaaggagaucuuccccaccggcagagugaagcacaccgaggagugcaccugcggcuucgccagcaacaagaccaucgagugcgccugcagagacaacagcuacaccgccaagagacccuucgugaagcugaacguggagaccgacaccgccgagaucagacugaugugcaccgagaccuaccuggacacccccagacccaacgacggcagcaucaccggccccugcgagagcaacggcgacaagggcagcggcggcaucaagggcggcuucgugcaccagagaauggccagcaagaucggcagaugguacagcagaaccaugagcaagaccaagagaaugggcaugggccuguacgugaaguacgacggcgaccccuggaccgacagcgaggcccuggcccugagcggcgugauggugagcauggaggagcccggcugguacagcuucggcuucgagaucaaggacaagaagugcgacgugcccugcaucggcaucgagauggugcacgacggcggcaagaccaccuggcacagcgccgccaccgccaucuacugccugaugggcagcggccagcugcugugggacaccgugaccggcgugaacaugacccuguga

SEQ ID NO: 188957 - RNA, 1401 nt, Artificial Sequence
  derived and/or modified CDS sequence (opt4) from neuraminidase__InfluenzaB__AEQ49691
augcugcccagcaccauccagacccugacccuguuccugaccagcggcggcgugcugcugagccuguacgugagcgcccugcugagcuaccugcuguacagcgacauccugcugaaguucagccccaccgagaucaccgcccccaccaugagccuggacugcgccaacgccagcaacgugcaggccgugaacagaagcgccaccaagggcgugaccuuccugcugcccgagcccgaguggaccuaccccagacugagcugccccggcagcaccuuccagaaggcccugcugaucagcccccacagauucggcgagaccaagggcaacagcgccccccugaucaucagagagcccuucaucgccugcggccccaacgagugcaagcacuucgcccugacccacuacgccgcccagcccggcggcuacuacaacggcaccagaggcgacagaaacaagcugagacaccugaucagcgugaagcugggcaagauccccaccguggagaacagcaucuuccacauggccgccuggagcggcagcgccugccacgacggcaaggaguggaccuacaucggcguggacggccccgacaacgacgcccugcugaaggugaaguacggcgaggccuacaccgacaccuaccacagcuacgccaacaagauccugagaacccaggagagcgccugcaacugcaucggcggcaacugcuaccugaugaucaccgacggcagcgccagcggcgugagcgagugcagauuccugaagaucagagagggcagaaucaucaaggagaucuuccccaccggcagagugaagcacaccgaggagugcaccugcggcuucgccagcaacaagaccaucgagugcgccugcagagacaacagcuacaccgccaagagacccuucgugaagcugaacguggagaccgacaccgccgagaucagacugaugugcaccgacaccuaccuggacacccccagacccgacgacggcagcaucaccggccccugcgagagcaacggcgacagaggcagcggcggcaucaagggcggcuucgugcaccagagaauggagagcaagaucggcagaugguacagcagaaccaugagcaagaccgagagaaugggcaugggccuguacgugaaguacgacggcgaccccugggccgacagcgacgcccuggccuucagcggcgugauggugagcaugaaggagcccggcugguacagcuucggcuucgagaucaaggacaagaagugcgacgugcccugcaucggcaucgagauggugcacgacggcggcaaggagaccuggcacagcgccgccaccgccaucuacugccugaugggcagcggccagcugcugugggacaccgugaccggcguggacauggcccuguga

SEQ ID NO: 188958 - RNA, 1401 nt, Artificial Sequence
  derived and/or modified CDS sequence (opt4) from neuraminidase__InfluenzaB__AEQ49692
augcugcccagcaccauccagacccugacccuguuccugaccagcggcggcgugcugcugagccuguacgugagcgccagccugagcuaccugcuguacagcgacauccugcugaaguucagccccaccgagaccaccgcccccaccaugagccuggacugcgccaacgccagcaacgugcaggccgugaacagaagcgccaccaagggcgugaccuuccugcugcccgagcccgaguggaccuaccccagacugagcugccccggcagcaccuuccagaaggcccugcugaucagcccccacagauucggcgagaccaagggcaacagcgccccccugaucaucagagagcccuucaucgccugcggccccaacgagugcaagcacuucgcccugacccacuacgccgcccagcccggcggcuacuacaacggcaccagaggcgacagaaacaagcugagacaccugaucagcgugaagcugggcaagauccccaccguggagaacagcaucuuccacauggccgccuggagcggcagcgccugccacgacggcaaggaguggaccuacaucggcguggacggccccgacaacgacgcccugcugaaggugaaguacggcgaggccuacaccgacaccuaccacagcuacgccaacaagauccugagaacccaggagagcgccugcaacugcaucggcggcaacugcuaccugaugaucaccgacggcagcgccagcggcgugagcgagugcagauuccugaagaucagagagggcagaaucaucaaggagaucuuccccaccggcagagugaagcacaccgaggagugcaccugcggcuucgccagcaacaagaccaucgagugcgccugcagagacaacagcuacaccgccaagagacccuucgugaagcugaacguggagaccgacaccgccgagaucagacugaugugcaccgacaccuaccuggacacccccagacccgacgacggcagcaucaccggccccugcgagagcaacggcgacaagggcagcggcggcaucaagggcggcuucgugcaccagagaauggagagcaagaucggcagaugguacagcagaaccaugagcaagaccgagagaaugggcaugggccuguacgugaaguacgacggcgaccccugggccgacagcgacgcccuggccuucagcggcgugauggugagcaugaaggagcccggcugguacagcuucggcuucgagaucaaggacaagaagugcgacgugcccugcaucggcaucgagauggugcacgacggcggcaaggagaccuggcacagcgccgccaccgccaucuacugccugaugggcagcggccagcugcugugggacaccgugaccggcguggacauggcccuguga

SEQ ID NO: 188959 - RNA, 1401 nt, Artificial Sequence
  derived and/or modified CDS sequence (opt4) from neuraminidase__InfluenzaB__AEQ49693
augcugcccagcaccauccagacccugacccuguuccugaccagcggcggcgugcugcugagccuguacgugagcgccagccugagcuaccugcuguacagcgacauccugcugaaguucagccccaccgagaucaccgcccccaccaugccccuggacugcgccaacgccagcaacgugcaggccgugaacagaagcgccaccaagggcgugacccugcugcugcccgagcccgaguggaccuaccccagacugagcugccccggcagcaccuuccagaaggcccugcugaucagcccccacagauucggcgagaccaagggcaacagcgccccccugaucaucagagagcccuucaucgccugcggccccaacgagugcaagcacuucgcccugacccacuacgccgcccagcccggcggcuacuacaacggcaccagaggcgacagaaacaagcugagacaccugaucagcgugaagcugggcaagauccccaccguggagaacagcaucuuccacauggccgccuggagcggcagcgccugccacgacggcaaggaguggaccuacaucggcguggacggccccgacaacaacgcccugcugaaggugaaguacggcgaggccuacaccgacaccuaccacagcuacgccaacaagauccugagaacccaggagagcgccugcaacugcaucggcggcaacugcuaccugaugaucaccgacggcagcgccagcggcgugagcgagugcagauuccugaagaucagagagggcagaaucaucaaggagaucuuccccaccggcagagugaagcacaccgaggagugcaccugcggcuucgccagcaacagaaccaucgagugcgccugcagagacaacagcuacaccgccaagagacccuucgugaagcugaacguggagaccgacaccgccgagaucagacugaugugcaccgacaccuaccuggacacccccagacccaacgacggcagcaucaccggccccugcgagagcgacggcgacaagggcagcggcggcaucaagggcggcuucgugcaccagagaauggagagcaagaucggcagaugguacagcagaaccaugagcaagaccgagagaaugggcaugggccuguacgugaaguacgacggcgaccccugggccgacagcgacgcccuggccuucagcggcgugauggugagcaugaaggagcccggcugguacagcuucggcuucgagaucaaggacaagaagugcgacgugcccugcaucggcaucgagauggugcacgacggcggcaaggagaccuggcacagcgccgccaccgccaucuacugccugaugggcagcggccagcugcugugggacaccgugaccggcguggacauggcccuguga

SEQ ID NO: 188960 - RNA, 1401 nt, Artificial Sequence
  derived and/or modified CDS sequence (opt4) from neuraminidase__InfluenzaB__AEQ49695
augcugcccagcaccauccagacccugacccuguuccugaccagcggcggcgugcugcugagccuguacgugagcgccagccugagcuaccugcuguacagcgacauccugcugaaguucagccccaccgagaucaccgcccccaccaugccccuggacugcgccaacgccagcaacgugcaggccgugaacagaagcgccaccaagggcgugacccugcugcugcccgagcccgaguggaccuaccccagacugagcugccccggcagcaccuuccagaaggcccugcugaucagcccccacagauucggcgagaccaagggcaacagcgccccccugaucaucagagagcccuucaucgccugcggccccaacgagugcaagcacuucgcccugacccacuacgccgcccagcccggcggcuacuacaacggcaccagaggcgacagaaacaagcugagacaccugaucagcgugaagcugggcaagauccccaccguggagaacagcaucuuccacauggccgccuggagcggcagcgccugccacgacggcaaggaguggaccuacaucggcguggacggccccgacaacaacgcccugcugaaggugaaguacggcgaggccuacaccgacaccuaccacagcuacgccaacaagauccugagaacccaggagagcgccugcaacugcaucggcggcaacugcuaccugaugaucaccgacggcagcgccagcggcgugagcgagugcagauuccugaagaucagagagggcagaaucaucaaggagaucuuccccaccggcagagugaagcacaccgaggagugcaccugcggcuucgccagcaacaagaccaucgagugcgccugcagagacaacagcuacaccgccaagagacccuucgugaagcugaacguggagaccgacaccgccgagaucagacugaugugcaccgacaccuaccuggacacccccagacccaacgacggcagcaucaccggccccugcgagagcgacggcgacaagggcagcggcggcaucaagggcggcuucgugcaccagagaauggagagcaagaucggcagaugguacagcagaaccaugagcaagaccgagagaaugggcaugggccuguacgugaaguacgacggcgaccccugggccgacagcgacgcccuggccuucagcggcgugauggugagcaugaaggagcccggcugguacagcuucggcuucgagaucaaggacaagaagugcgacgugcccugcaucggcaucgagauggugcacgacggcggcaaggagaccuggcacagcgccgccaccgccaucuacugccugaugggcagcggccagcugcugugggacaccgugaccggcguggacauggcccuguga

SEQ ID NO: 188961 - RNA, 1401 nt, Artificial Sequence
  derived and/or modified CDS sequence (opt4) from neuraminidase__InfluenzaB__AEQ49697
augcugcccagcaccauccagacccugacccuguuccugaccagcggcggcgugcugcugagccuguacgugagcgccagccugagcuaccugcuguacagcgacauccugcugaaguucagccccaccgagaucaccgcccccaccaugagccuggacugcgccaacgccagcaacgugcaggccgugaacagaagcgccaccaagggcgugaccuuccugcugcccgagcccgaguggaccuaccccagacugagcugccccggcagcaccuuccagaaggcccugcugaucagcccccacagauucggcgagaccaagggcaacagcgccccccugaucaucagagagcccuucaucgccugcggccccaacgagugcaagcacuucgcccugacccacuacgccgcccagcccggcggcuacuacaacggcaccagaggcgacagaaacaagcugagacaccugaucagcgugaagcugggcaagauccccaccguggagaacagcaucuuccacauggccgccuggagcggcagcgccugccacgacggcaaggaguggaccuacaucggcguggacggccccgacaacgacgcccugcugaaggugaaguacggcgaggccuacaccgacaccuaccacagcuacgccaacaagauccugagaacccaggagagcgccugcaacugcaucggcggcaacugcuaccugaugaucaccgacggcagcgccagcggcgugagcgagugcagauuccugaagaucagagagggcagaaucaucaaggagaucuuccccaccggcagagugaagcacaccgaggagugcaccugcggcuucgccagcaacaagaccaucgagugcgccugcagagacaacagcuacaccgccaagagacccuucgugaagcugaacguggagaccgacaccgccgagaucagacugaugugcaccgacaccuaccuggacacccccagacccgacgacggcagcaucaccggccccugcgagagcaacggcgacaagggcagcggcggcaucaagggcggcuucgugcaccagagaauggagagcaagaucggcagaugguacagcagaaccaugagcaagaccgagagaaugggcaugggccuguacgugaaguacgacggcgaccccugggccgacagcgacgcccuggccuucagcggcgugauggugagcaugaaggagcccggcugguacagcuucggcuucgagaucaaggacaagaagugcgacgugcccugcaucggcaucgagauggugcacgacggcggcaaggagaccuggcacagcgccgccaccgccaucuacugccugaugggcagcggccagcugcugugggacaccgugaccggcguggacauggcccuguga

SEQ ID NO: 188962 - RNA, 1401 nt, Artificial Sequence; identical to SEQ ID NO: 188961
  derived and/or modified CDS sequence (opt4) from neuraminidase__InfluenzaB__AEQ49698

SEQ ID NO: 188963 - RNA, 1401 nt, Artificial Sequence; identical to SEQ ID NO: 188961
  derived and/or modified CDS sequence (opt4) from neuraminidase__InfluenzaB__AEQ49699

SEQ ID NO: 188964 - RNA, 1401 nt, Artificial Sequence; identical to SEQ ID NO: 188961
  derived and/or modified CDS sequence (opt4) from neuraminidase__InfluenzaB__AEQ49700

SEQ ID NO: 188965 - RNA, 1401 nt, Artificial Sequence; identical to SEQ ID NO: 188958
  derived and/or modified CDS sequence (opt4) from neuraminidase__InfluenzaB__AEQ49701

SEQ ID NO: 188966 - RNA, 1401 nt, Artificial Sequence; identical to SEQ ID NO: 188961
  derived and/or modified CDS sequence (opt4) from neuraminidase__InfluenzaB__AEQ49702

SEQ ID NO: 188967 - RNA, 1401 nt, Artificial Sequence; identical to SEQ ID NO: 188958
  derived and/or modified CDS sequence (opt4) from neuraminidase__InfluenzaB__AEQ49703

SEQ ID NO: 188968 - RNA, 1401 nt, Artificial Sequence; identical to SEQ ID NO: 188961
  derived and/or modified CDS sequence (opt4) from neuraminidase__InfluenzaB__AEQ49705

SEQ ID NO: 188969 - RNA, 1401 nt, Artificial Sequence
  derived and/or modified CDS sequence (opt4) from neuraminidase__InfluenzaB__AEQ49706
augcugcccagcaccauccagaugcugacccuguuccugacccugggcggcgugcugcugagccuguacgugagcgccagccugagcuaccugcuguaccuggacauccugcugaaguucccccccaccgagaucaccgcccccaccaugccccuggacugcgccaacgccagcaacgugcaggccgugaacagaagcgccaccaagggcgugaccuuccugcugcccgagcccgaguggaccuaccccagacugagcugccccggcagcaccuuccagaaggcccugcugaucagcccccacagauucggcgagaccaagggcaacagcgccccccugaucaucagagagcccuucaucgccugcggccccaaggagugcaagcacuucgcccugacccacuacgccgcccagcccggcggcuacuacaacggcaccagaggcgacagaaacaagcugagacaccugaucagcgugaagcugggcaagauccccaccguggagaacagcaucuuccacauggccgccuggagcggcagcgccugccacgacggcaaggaguggaccuacaucggcguggacggccccgacaacaacgcccugcugaagaucaaguacggcgaggccuucaccgacaccuaccacagcuacgccaacaacauccugagaacccaggagagcgccugcaacugcaucggcggcaacugcuaccugaugaucaccgacggcagcgccagcggcgugagcgagugcagauuccugaagaucagagagggcagaaucaucaaggagaucuuccccaccggcagagugaagcacaccgaggagugcaccugcggcuucgccagcaacaagaccaucgagugcgccugcagagacaacagcuacaccgccaagagacccuucgugaagcugaacguggagaccgacaccgccgagaucagacugaugugcaccgacaccuaccuggacacccccagacccgacgacggcagcaucaccggccccugcgagagcaacggcgacaagggcagcggcggcaucaagggcggcuucgugcaccagagaauggccagcaagaucggcagaugguacagcagaaccaugagcaagaccgagagaaugggcaugggccuguacgugaaguacgacggcgaccccugggccgacagcgacgcccuggccuucagcggcgugauggugagcaugaaggagcccggcugguacagcuucggcuucgagaucaaggacaagaagugcgacgugcccugcaucggcaucgagauggugcacgacggcggcaaggagaccuggcacagcgccgccaccgccaucuacugccugaugggcagcggccagcugcugugggacaccgugaccggcgugaacauggcccuguga

SEQ ID NO: 188970 - RNA, 1401 nt, Artificial Sequence; identical to SEQ ID NO: 188961
  derived and/or modified CDS sequence (opt4) from neuraminidase__InfluenzaB__AEQ49707

SEQ ID NO: 188971 - RNA, 1401 nt, Artificial Sequence; identical to SEQ ID NO: 188961
  derived and/or modified CDS sequence (opt4) from neuraminidase__InfluenzaB__AEQ49708

SEQ ID NO: 188972 - RNA, 1401 nt, Artificial Sequence
  derived and/or modified CDS sequence (opt4) from neuraminidase__InfluenzaB__AEQ49709
augcugcccagcaccauccagacccugacccuguuccugaccagcggcggcgugcugcugagccuguacgugagcgcccugcugagcuaccugcuguacagcgacauccugcugaaguucagccccaccgagaucaccgcccccaccaugagccuggacugcgccaacgccagcaacgugcaggccgugaacagaagcgccaccaagggcgugaccuuccugcugcccgagcccgaguggaccuaccccagacugagcugccccggcagcaccuuccagaaggcccugcugaucagcccccacagauucggcgagaccaagggcaacagcgccccccugaucaucagagagcccuucaucgccugcggccccaacgagugcaagcacuucgcccugacccacuacgccgcccagcccggcggcuacuacaacggcaccagaggcgacagaaacaagcugagacaccugaucagcgugaagcugggcaagauccccaccguggagaacagcaucuuccacauggccgccuggagcggcagcgccugccacgacggcaaggaguggaccuacaucggcguggacggccccgacaacgacgcccugcugaaggugaaguacggcgaggccuacaccgacaccuaccacagcuacgccaacaagauccugagaacccaggagagcgccugcaacugcaucggcggcaacugcuaccugaugaucaccgacggcagcgccagcggcgugagcgagugcagauuccugaagaucagagagggcagaaucaucaaggagaucuuccccaccggcagagugaagcacaccgaggagugcaccugcggcuucgccagcaacaagaccaucgagugcgccugcagagacaacagcuacaccgccaagagacccuucgugaagcugaacguggagaccgacaccgccgagaucagacugaugugcaccgacaccuaccuggacacccccagacccgacgacggcagcaucaccggccccugcgagagcaacggcgacaagggcagcggcggcaucaagggcggcuucgugcaccagagaauggagagcaagaucggcagaugguacagcagaaccaugagcaagaccgagagaaugggcaugggccuguacgugaaguacgacggcgaccccugggccgacagcgacgcccuggccuucagcggcgugauggugagcaugaaggagcccggcugguacagcuucggcuucgagaucaaggacaagaagugcgacgugcccugcaucggcaucgagauggugcacgacggcggcaaggagaccuggcacagcgccgccaccgccaucuacugccugaugggcagcggccaccugcugugggacaccgugaccggcguggacauggcccuguga

SEQ ID NO: 188973 - RNA, 1401 nt, Artificial Sequence; identical to SEQ ID NO: 188935
  derived and/or modified CDS sequence (opt4) from neuraminidase__InfluenzaB__AEQ49710

SEQ ID NO: 188974 - RNA, 1401 nt, Artificial Sequence; identical to SEQ ID NO: 188932
  derived and/or modified CDS sequence (opt4) from neuraminidase__InfluenzaB__AER27042

SEQ ID NO: 188975 - RNA, 1401 nt, Artificial Sequence; identical to SEQ ID NO: 188960
  derived and/or modified CDS sequence (opt4) from neuraminidase__InfluenzaB__AER27053

SEQ ID NO: 188976 - RNA, 1401 nt, Artificial Sequence; identical to SEQ ID NO: 188932
  derived and/or modified CDS sequence (opt4) from neuraminidase__InfluenzaB__AER27064

SEQ ID NO: 188977 - RNA, 1401 nt, Artificial Sequence; identical to SEQ ID NO: 188935
  derived and/or modified CDS sequence (opt4) from neuraminidase__InfluenzaB__AET43128

SEQ ID NO: 188978 - RNA, 1401 nt, Artificial Sequence; identical to SEQ ID NO: 188935
  derived and/or modified CDS sequence (opt4) from neuraminidase__InfluenzaB__AET43139

SEQ ID NO: 188979 - RNA, 1401 nt, Artificial Sequence
  derived and/or modified CDS sequence (opt4) from neuraminidase__InfluenzaB__AET43150
augcugcccagcaccauccagacccugacccuguuccugaccagcggcggcgugcugcugagccuguacgugagcgccagccugagcuaccugcuguacagcgacauccugcugaaguucagccccaaggagaucaccgcccccaccaugccccuggacugcgccaacgccagcaacgugcaggccgugaaccacagcgccaccaagggcgugacccugcugcugcccgagcccgaguggaccuaccccagacugagcugccccggcagcaccuuccagaaggcccugcugaucagcccccacagauucggcgagaccaagggcaacagcgccccccugaucaucagagagcccuucaucgccugcggccccaacgagugcaagcacuucgcccugacccacuacgccgcccagcccggcggcuacuacaacggcaccagaggcgacagaaacaagcugagacaccugaucagcgugaagcugggcaagauccccaccguggagaacagcaucuuccacauggccgccuggagcggcagcgccugccacgacggcaaggaguggaccuacaucggcguggacggccccgacaacaacgcccugcugaaggugaaguacggcgaggccuacaccgacaccuaccacagcuacgccaacaagauccugagaacccaggagagcgccugcaacugcaucggcggcaacugcuaccugaugaucaccgacggcagcgccagcggcgugagcgagugcagauuccugaagaucagagagggcagaaucaucaaggagaucuuccccaccggcagagugaagcacaccgaggagugcaccugcggcuucgccagcaacaagaccaucgagugcgccugcagagacaacagcuacaccgccaagagacccuucgugaagcugaacguggagaccgacaccgccgagaucagacugaugugcaccgacaccuaccuggacacccccagacccgacgacggcagcaucaccggccccugcgagagcaacggcgacaagggcagcggcggcaucaagggcggcuucgugcaccagagaauggagagcaagaucggcagaugguacagcagaaccaugagcaagaccgagagaaugggcaugggccuguacgugaaguacgacggcgaccccugggccgacagcgacgcccugaccuucagcggcgugauggugagcaugaaggagcccggcugguacagcuucggcuucgagaucaaggacaagaagugcgacgugcccugcaucggcaucgagauggugcacgacggcggcaaggagaccuggcacagcgccgccaccgccaucuacugccugaugggcagcggccagcugcugugggacaccgugaccggcguggacauggcccuguga

SEQ ID NO: 188980 - RNA, 1401 nt, Artificial Sequence; identical to SEQ ID NO: 188935
  derived and/or modified CDS sequence (opt4) from neuraminidase__InfluenzaB__AET43161

SEQ ID NO: 188981 - RNA, 1401 nt, Artificial Sequence; identical to SEQ ID NO: 188935
  derived and/or modified CDS sequence (opt4) from neuraminidase__InfluenzaB__AET43172

SEQ ID NO: 188982 - RNA, 1401 nt, Artificial Sequence; identical to SEQ ID NO: 188935
  derived and/or modified CDS sequence (opt4) from neuraminidase__InfluenzaB__AET43183

SEQ ID NO: 188983 - RNA, 1401 nt, Artificial Sequence; identical to SEQ ID NO: 188935
  derived and/or modified CDS sequence (opt4) from neuraminidase__InfluenzaB__AET43194

SEQ ID NO: 188984 - RNA, 1401 nt, Artificial Sequence; identical to SEQ ID NO: 188935
  derived and/or modified CDS sequence (opt4) from neuraminidase__InfluenzaB__AET43216

SEQ ID NO: 188985 - RNA, 1401 nt, Artificial Sequence; identical to SEQ ID NO: 188935
  derived and/or modified CDS sequence (opt4) from neuraminidase__InfluenzaB__AET43227

SEQ ID NO: 188986 - RNA, 1401 nt, Artificial Sequence
  derived and/or modified CDS sequence (opt4) from neuraminidase__InfluenzaB__AET50947
augcugcccagcaccauccagacccugacccuguuccugaccagcggcggcgugcugcugagccuguacgugagcgccagccugagcuaccugcuguacagcgacauccugcugaaguucagccccaaggagaucaccgcccccaccaugccccuggacugcgccaacgccagcaacgugcaggccgugaaccacagcgccaccaagggcgugacccugcugcugcccgagcccgaguggaccuaccccagacugagcugccccggcagcaccuuccagaaggcccugcugaucagcccccacagauucggcgagaccaagggcaacagcgccccccugaucaucagagagcccuucaucgccugcggccccaacgagugcaagcacuucgcccugacccacuacgccgcccagcccggcggcuacuacaacggcaccagaggcgacagaaacaagcugagacaccugaucagcgugaagcugggcaagauccccaccguggagaacagcaucuuccacauggccgccuggagcggcagcgccugccacgacggcaaggaguggaccuacaucggcguggacggccccgacaacaacgcccugcugaaggugaaguacggcgaggccuacaccgacaccuaccacagcuacgccaacaagauccugagaacccaggagagcgccugcaacugcaucggcggcaacugcuaccugaugaucaccgacggcagcgccagcggcgugagcgagugcagauuccugaagaucagagagggcagaaucaucaaggagaucuuccccaccggcagagugaagcacaccgaggagugcaccugcggcuucgccagcaacaagaccaucgagugcgccugcagagacaacagcuacaccgccaagagacccuucgugaagcugaacguggagaccgacaccgccgagaucagacugaugugcaccgacaccuaccuggacacccccagacccgacgacggcagcaucaccggccccugcgagagcaacggcgacaagggcagcggcggcaucaagggcggcuucgugcaccagagaauggagagcaagaucggcagaugguacagcagaaccaugagcaagaccgagagaaugggcaugggccuguacgugaaguacgacggcgaccccugggccgacagcgacgcccuggccuucagcggcgugaugaucagcaugaaggagcccggcugguacagcuucggcuucgagaucaaggacaagaagugcgacgugcccugcaucggcaucgagauggugcacgacggcggcaaggagaccuggcacagcgccgccaccgccaucuacugccugaugggcagcggccagcugcugugggacaccgugaccggcguggacauggcccuguga

SEQ ID NO: 188987 - RNA, 1401 nt, Artificial Sequence
  derived and/or modified CDS sequence (opt4) from neuraminidase__InfluenzaB__AET50958
augcugcccagcaccauccagacccugacccuguuccugaccagcggcggcgugcugcugagccuguacgugagcgccagccugagcuaccugcuguacagcgacauccugcugaaguucagccccaaggagaucaccgcccccaccaugccccuggacugcgccaacgccagcaacgugcaggccgugaaccacagcgccaccaagggcgugacccugcugcugcccgagcuggaguggaccuaccccagacugagcugccccggcagcaccuuccagaaggcccugcugaucagcccccacagauucggcgagaccaagggcaacagcgccccccugaucaucagagagcccuucaucgccugcggccccaacgagugcaagcacuucgcccugacccacuacgccgcccagcccggcggcuacuacaacggcaccagaggcgacagaaacaagcugagacaccugaucagcgugaagcugggcaagauccccaccguggagaacagcaucuuccacauggccgccuggagcggcagcgccugccacgacggcaaggaguggaccuacaucggcguggacggccccgacaacaacgcccugcugaaggugaaguacggcgaggccuacaccgacaccuaccacagcuacgccaacaagauccugagaacccaggagagcgccugcaacugcaucggcggcaacugcuaccugaugaucaccgacggcagcgccagcggcgugagcgagugcagauuccugaagaucagagagggcagaaucaucaaggagaucuuccccaccggcagagugaagcacaccgaggagugcaccugcggcuucgccagcaacaagaccaucgagugcgccugcagagacaacagcuacaccgccaagagacccuucgugaagcugaacguggagaccgacaccgccgagaucagacugaugugcaccgacaccuaccuggacacccccagacccgacgacggcagcaucaccggccccugcgagagcaacggcgacaagggcagcggcggcaucaagggcggcuucgugcaccagagaauggagagcaagaucggcagaugguacagcagaaccaugagcaagaccgagagaaugggcaugggccuguacgugaaguacgacggcgaccccugggccgacagcgacgcccuggccuucagcggcgugauggugagcaugaaggagcccggcugguacagcuucggcuucgagaucaaggacaagaagugcgacgugcccugcaucggcaucgagauggugcacgacggcggcaaggagaccuggcacagcgccgccaccgccaucuacugccugaugggcagcggccagcugcugugggacaccgugaccggcguggacauggcccuguga

SEQ ID NO: 188988 - RNA, 1401 nt, Artificial Sequence; identical to SEQ ID NO: 188935
  derived and/or modified CDS sequence (opt4) from neuraminidase__InfluenzaB__AET50969

SEQ ID NO: 188989 - RNA, 1401 nt, Artificial Sequence; identical to SEQ ID NO: 188935
  derived and/or modified CDS sequence (opt4) from neuraminidase__InfluenzaB__AET50980

SEQ ID NO: 188990 - RNA, 1401 nt, Artificial Sequence; identical to SEQ ID NO: 188935
  derived and/or modified CDS sequence (opt4) from neuraminidase__InfluenzaB__AET74259

SEQ ID NO: 188991 - RNA, 1401 nt, Artificial Sequence; identical to SEQ ID NO: 188935
  derived and/or modified CDS sequence (opt4) from neuraminidase__InfluenzaB__AET74270

SEQ ID NO: 188992 - RNA, 1401 nt, Artificial Sequence; identical to SEQ ID NO: 188986
  derived and/or modified CDS sequence (opt4) from neuraminidase__InfluenzaB__AET74281

SEQ ID NO: 188993 - RNA, 1401 nt, Artificial Sequence; identical to SEQ ID NO: 188935
  derived and/or modified CDS sequence (opt4) from neuraminidase__InfluenzaB__AET74292

SEQ ID NO: 188994 - RNA, 1401 nt, Artificial Sequence; identical to SEQ ID NO: 188935
  derived and/or modified CDS sequence (opt4) from neuraminidase__InfluenzaB__AET74303

SEQ ID NO: 188995 - RNA, 1401 nt, Artificial Sequence; identical to SEQ ID NO: 188935
  derived and/or modified CDS sequence (opt4) from neuraminidase__InfluenzaB__AET74314

SEQ ID NO: 188996 - RNA, 1401 nt, Artificial Sequence; identical to SEQ ID NO: 188935
  derived and/or modified CDS sequence (opt4) from neuraminidase__InfluenzaB__AET74333

SEQ ID NO: 188997 - RNA, 1401 nt, Artificial Sequence
  derived and/or modified CDS sequence (opt4) from neuraminidase__InfluenzaB__AET74344
augcugcccagcaccauccagacccugacccuguuccugaccagcggcggcgugcugcugagccuguacgugagcgccagccugagcuaccugcuguacagcgacauccugcugaaguucagccccaaggagaucaccgcccccaccaugccccuggacugcgccaacgccagcaacgugcaggccgugaaccacagcgccaccaagggcgugacccugcugcugcccgagcccgaguggaccuaccccagacugagcugccccggcagcaccuuccagaaggcccugcugaucagcccccacagauucggcgagaccaagggcaacagcgccccccugaucaucagagagcccuucaucgccugcggccccaacgagugcaagcacuucgcccugacccacuacgccgcccagcccggcggcuacuacaacggcaccagaggcgacagaaacaagcugagacaccugaucagcgugaagcugggcaagauccccaccguggagaacagcaucuuccacauggccgccuggagcggcagcgccugccacgacggcaaggaguggaccuacaucggcguggacggccccgacaacaacgcccugcugaaggugaaguacggcgaggccuacaccgacaccuaccacagcuacgccaacaagauccugagaacccaggagagcgccugcaacugcaucggcggcaacugcuaccugaugaucaccgacggcagcgccagcggcgugagcgagugcagauuccugaagaucagagagggcagaaucaucaaggagaucuuccccaccggcagagugaagcacaccgaggagugcaccugcggcuucgccagcaacaagaccaucgagugcgccugcagagacaacagcuacaccgccaagagacccuucgugaagcugaacguggaggccgacaccgccgagaucagacugaugugcaccgacaccuaccuggacacccccagacccgacgacggcagcaucaccggccccugcgagagcaacggcgacaagggcagcggcggcaucaagggcggcuucgugcaccagagaauggagagcaagaucggcagaugguacagcagaaccaugagcaagaccgagagaaugggcaugggccuguacgugaaguacgacggcgaccccugggccgacagcgacgcccuggccuucagcggcgugauggugagcaugaaggagcccggcugguacagcuucggcuucgagaucaaggacaagaagugcgacgugcccugcaucggcaucgagauggugcacgacggcggcaaggagaccuggcacagcgccgccaccgccaucuacugccugaugggcagcggccagcugcugugggacaccgugaccggcguggacauggcccuguga

SEQ ID NO: 188998 - RNA, 1401 nt, Artificial Sequence; identical to SEQ ID NO: 188935
  derived and/or modified CDS sequence (opt4) from neuraminidase__InfluenzaB__AET74355

SEQ ID NO: 188999 - RNA, 1404 nt, Artificial Sequence
  derived and/or modified CDS sequence (opt4) from neuraminidase__InfluenzaB__AEY75594
augcugcccagcaccauccagaugcugacccuguuccugaccagcggcggcgugcugcugagccuguacgugagcgccagccugagcuaccugcuguacagcgacauccugcugaaguucagccccaccgagaucaccgcccccaccaugccccuggacugcgccaacgccagcaacgugcacgccgugaacagaagcgccaccaagggcgugaccuuccugcugcugcccgagcccgaguggaccuaccccagacugagcugccccggcagcaccuuccagaaggcccugcugaucagcccccacagauucggcgagaccaagggcaacagcgccccccugaucaucagagagcccuucaucgccugcggccccaacgagugcaagcacuucgcccugacccacuacgccgcccagcccggcggcuacuacaacggcaccagaggcgacagaaacaagcugagacaccugaucagcgugaagcugggcaagauccccaccguggagaacagcaucuuccacauggccgccuggagcggcagcgccugccacgacggcaaggaguggaccuacaucggcguggacggccccgacaacaacgcccugcugaagaucaaguacggcgaggccuacaccgacaccuaccacagcuacgccaacaacauccugagaacccaggagagcgccugcaacugcaucggcggcaacugcuaccugaugaucaccgacggcagcgccagcggcgugagcgagugcagauuccugaagaucagagagggcagaaucaucaaggagaucuuccccaccggcagagugaagcacaccgaggagugcaccugcggcuucgccagcaacaagaccaucgagugcgccugcagagacaacagcuacaccgccaagagacccuucgugaagcugaacguggagaccgacaccgccgagaucagacugaugugcaccgacaccuaccuggacacccccagacccgacgacggcagcaucaccggccccugcgagagcaacggcgacaagggcagcggcggcaccaagggcggcuucgugcaccagagaauggccagcaagaucggcagaugguacagcagaaccaugagcaagaccgagagaaagggcaugggccuguacgugaaguacgacggcgaccccuggaccgacagcgacgcccuggccuucagaggcgugauggugagcaugaaggagcccggcugguacagcuucggcuucgagaucaaggacaagaagugcgacgugcccugcaucggcaucgagauggugcacgacggcggcaaggagaccuggcacagcgccgccaccgccaucuacugccugaugggcagcggccagcugcugugggacaccgugaccggcguggacauggcccuguga

SEQ ID NO: 189000 - RNA, 1401 nt, Artificial Sequence
  derived and/or modified CDS sequence (opt4) from neuraminidase__InfluenzaB__AFA45223
augcugcccagcaccauccagacccugacccuguuccugaccagcggcggcgugcugcugagccuguacgugagcgcccugcugagcuaccugcuguacagcgacauccugcccaaguucagccccaccgagaucaccgcccccaccaugagccuggacugcgccaacgccagcaacgugcaggccgugaacagaagcgccaccaagggcgugaccuuccugcugagcgagcccgaguggaccuaccccagacugagcugccccggcagcaccuuccagaaggcccugcugaucagcccccacagauucggcgagaccaagggcaacagcgccccccugaucaucagagagcccuucaucgccugcggccccaacgagugcaagcacuucgcccugacccacuacgccgcccagcccggcggcuacuacaacggcaccagaggcgacagaaacaagcugagacaccugaucagcgugaagcugggcaagauccccaccguggagaacagcaucuuccacauggccgccuggagcggcagcgccugccacgacggcaaggaguggaccuacaucggcguggacggccccgacaacgacgcccugcugaaggugaaguacggcgaggccuacaccgacaccuaccacagcuacgccaacaagauccugagaacccaggagagcgccugcaacugcaucggcggcaacugcuaccugaugaucaccgacggcagcgccagcggcgugagcgagugcagauuccugaagaucagagagggcagaaucaucaaggagaucuuccccaccggcagagugaagcacaccgaggagugcaccugcggcuucgccagcaacaagaccaucgagugcgccugcagagacaacagcuacaccgccaagagacccuucgugaagcugaacguggagaccgacaccgccgagaucagacugaugugcaccgacaccuaccuggacacccccagacccgacgacggcagcaucaccggccccugcgagagcaacggcgacaagggcagcggcggcaucaagggcggcuucgugcaccagagaauggagagcaagaucggcagaugguacagcagaaccaugagcaagaccgagagaaugggcaugggccuguacgugaaguacgacggcgaccccugggccgacagcgacgcccuggccuucagcggcgugauggugagcaugaaggagcccggcugguacagcuucggcuucgagaucaaggacaagaagugcgacgugcccugcaucggcaucgagauggugcacgacggcggcaaggagaccuggcacagcgccgccaccgccaucuacugccugaugggcagcggccagcugcugugggacaccgugaccggcguggacauggcccuguga

SEQ ID NO: 189001 - RNA, 1401 nt, Artificial Sequence
  derived and/or modified CDS sequence (opt4) from neuraminidase__InfluenzaB__AFA45226
augcugcccagcaccauccagacccugacccuguuccugaccagcggcggcgugcugcugagccuguacgugagcgccagccugagcuaccugcuguacagcgacauccugcugaaguucagccccaccgagaccaccgcccccaccaugagccuggacugcgccaacgccagcaacgugcaggccgugaacagaagcgccaccaagggcgugaccuuccugcugcccgagcccgaguggaccuaccccagacugagcugccccggcagcaccuuccagaaggcccugcugaucagcccccacagauucggcgagaccaagggcaacagcgccccccugaucaucagagagcccuucaucgccugcggccccaacgagugcaagcacuucgcccugacccacuacgccgcccagcccggcggcuacuacaacggcaccagaggcgacagaaacaagcugagacaccugaucagcgugaagcugggcaaggugcccaccguggagaacagcaucuuccacauggccgccuggagcggcagcgccugccacgacggcaaggaguggaccuacaucggcguggacggccccgacaacgacgcccugcugaaggugaaguacggcgaggccuacaccgacaccuaccacagcuacgccaacaagauccugagaacccaggagagcgccugcaacugcaucggcggcaacugcuaccugaugaucaccgacggcagcgccagcggcgugagcgagugcagauuccugaagaucagagagggcagaaucaucaaggagaucuuccccaccggcagagugaagcacaccgaggagugcaccugcggcuucgccagcaacaagaccaucgagugcgccugcagagacaacagcuacaccgccaagagacccuucgugaagcugaacguggagaccgacaccgccgagaucagacugaugugcaccgacaccuaccuggacacccccagacccgacgacggcagcaucaccggccccugcgagagcaacggcgacaagggcagcggcggcaucaagggcggcuucgugcaccagagaauggagagcaagaucggcagaugguacagcagaaccaugagcaagaccgagagaaugggcaugggccuguacgugaaguacgacggcgaccccugggccgacagcgacgcccuggccuucagcggcgugauggugagcaugaaggagcccggcugguacagcuucggcuucgagaucaaggacaagaagugcgacgugcccugcaucggcaucgagauggugcacgacggcggcaagggcaccuggcacagcgccgccaccgccaucuacugccugaugggcagcggccagcugcugugggacaccgugaccggcguggacauggcccuguga

SEQ ID NO: 189002 - RNA, 1401 nt, Artificial Sequence
  derived and/or modified CDS sequence (opt4) from neuraminidase__InfluenzaB__AFA45229
augcugcccagcaccauccagacccugacccuguuccugaccagcggcggcgugcugcugagccuguacgugagcgcccugcugagcuaccugcuguacagcgacauccugcugaaguucagccccaccgagaucaccgcccccaccaugccccuggacugcgccaacgccagcaacgugcaggccgugaacagaagcgccaccaagggcgugaccuuccugcugcccgagcccgaguggaccuaccccagacugagcugccccggcagcaccuuccagaaggcccugcugaucagcccccacagauucggcgagaccaagggcaacagcgccccccugaucaucagagagcccuucaucgccugcggccccaacgagugcaagcacuucgcccugacccacuacgccgcccagcccggcggcuacuacaacggcaccagaggcgacagaaacaagcugagacaccugaucagcgugaagcugggcaagauccccaccguggagaacagcaucuuccacauggccgccuggagcggcagcgccugccacgacggcaaggaguggaccuacaucggcguggacggccccgacaacgacgcccugcugaaggugaaguacggcgaggccuacaccgacaccuaccacagcuacgccaacaagauccugagaacccaggagagcgccugcaacugcaucggcggcaacugcuaccugaugaucaccgacggcagcgccagcggcgugagcgagugcagauuccugaagaucagagagggcagaaucaucaaggagaucuuccccaccggcagagugaagcacaccgaggagugcaccugcggcuucgccagcaacaagaccaucgagugcgccugcagagacaacagcuacaccgccaagagacccuucgugaagcugaacguggagaccgacaccgccgagaucagacugaugugcaccgacaccuaccuggacacccccagacccgacgacggcagcaucaccggccccugcgagagcaacggcgacaagggcagcggcggcaucaagggcggcuucgugcaccagagaauggagagcaagaucggcagaugguacagcagaaccaugagcaagaccgagagaaugggcaugggccuguacgugaaguacgacggcgaccccugggccgacagcgacgcccuggccuucagcggcgugauggugagcaugaaggagcccggcugguacagcuucggcuucgagaucaaggacaagaagugcgacgugcccugcaucggcaucgagauggugcacgacggcggcaaggagaccuggcacagcgccgccaccgccaucuacugccugaugggcagcggccagcugcugugggacaccgugaccggcguggacauggcccuguga

SEQ ID NO: 189003 - RNA, 1401 nt, Artificial Sequence; identical to SEQ ID NO: 188955
  derived and/or modified CDS sequence (opt4) from neuraminidase__InfluenzaB__AFA45235

SEQ ID NO: 189004 - RNA, 1401 nt, Artificial Sequence
  derived and/or modified CDS sequence (opt4) from neuraminidase__InfluenzaB__AFA45238
augcugcccagcaccauccagacccugacccuguuccugaccagcggcggcgugcugcugagccuguacgugagcgccagccugagcuaccugcuguacagcgacauccugcugaaguucagccccaccaagaccaccgcccccaccaugagccuggacugcgccaacgccagcaacgugcaggccgugaacagaagcgccaccaagggcgugaccuuccugcugcccgagcccgaguggaccuaccccagacugagcugccccggcagcaccuuccagaaggcccugcugaucagcccccacagauucggcgagaccaagggcaacagcgccccccugaucaucagagagcccuucaucgccugcggccccaacgagugcaagcacuucgcccugacccacuacgccgcccagcccggcggcuacuacaacggcaccagaggcgacagaaacaagcugagacaccugaucagcgugaagcugggcaagauccccaccguggagaacagcaucuuccacauggccgccuggagcggcagcgccugccacgacggcaaggaguggaccuacaucggcguggacggccccgacaacgacgcccugcugaaggugaaguacggcgaggccuacaccgacaccuaccacagcuacgccaacaagauccugagaacccaggagagcgccugcaacugcaucggcggcaacugcuaccugaugaucaccgacggcagcgccagcggcgugagcgagugcagauuccugaagaucagagagggcagaaucaucaaggagaucuuccccaccggcagagugaagcacaccgaggagugcaccugcggcuucgccagcaacaagaccaucgagugcgccugcagagacaacagcuacaccgccaagagacccuucgugaagcugaacguggagaccgacaccgccgagaucagacugaugugcaccgacaccuaccuggacacccccagacccgacgacggcagcaucaccggccccugcgagagcaacggcgacaagggcagcggcggcaucaagggcggcuucgugcaccagagaauggagagcaagaucggcagaugguacagcagaaccaugagcaagaccgagagaaugggcaugggccuguacgugaaguacgacggcgaccccugggccgacagcgacgcccuggccuucagcggcgugauggugagcaugaaggagcccggcugguacagcuucggcuucgagaucaaggacaagaagugcgacgugcccugcaucggcaucgagauggugcacgacggcggcaaggagaccuggcacagcgccgccaccgccaucuacugccugaugggcagcggccagcugcugugggacaccgugaccggcguggacauggcccuguga

SEQ ID NO: 189005 - RNA, 1401 nt, Artificial Sequence
  derived and/or modified CDS sequence (opt4) from neuraminidase__InfluenzaB__AFA45241
augcugcccagcaccauccagacccugacccuguuccugaccagcggcggcgugcugcugagccuguacgugagcgccagccugagcuaccugcuguacagcgacauccugcugaaguucagccccaccgagaucaccgcccccaccaugccccuggacugcgccaacgccagcaacgugcaggccgugaacagaagcgccaccaagggcgugaucuuccugcugcccgagcccgaguggaccuaccccagacugagcugccccggcagcaccuuccagaaggcccugcugaucagcccccacagauucggcgagaccaagggcaacagcgccccccugaucaucagagagcccuucaucgccugcggccccaacgagugcaagcacuucgcccugacccacuacgccgcccagcccggcggcuacuacaacggcaccagaggcgacagaaacaagcugagacaccugaucagcgugaagcugggcaagauccccaccguggagaacagcaucuuccacauggccgccuggagcggcagcgccugccacgacggcaaggaguggaccuacaucggcguggacggccccgacaacaacgcccugcugaaggugaaguacggcgaggccuacaccgacaccuaccacagcuacgccaacaagauccugagaacccaggagagcgccugcaacugcaucggcggcaacugcuaccugaugaucaccgacggcagcgccagcggcgugagcgagugcagauuccugaagaucagagagggcagaaucaucaaggagaucuuccccaccggcagagugaagcacaccgaggagugcaccugcggcuucgccagcaacaagaccaucgagugcgccugcagagacaacagcuacaccgccaagagacccuucgugaagcugaacguggagaccgacaccgccgagaucagacugaugugcaccgacaccuaccuggacacccccagacccgacgacggcagcaucaccggccccugcgagagcaacggcgacaagggcagcggcggcaucaagggcggcuucgugcaccagagaauggagagcaagaucggcagaugguacagcagaaccaugagcaagaccgagagaaugggcaugggccuguacgugaaguacgacggcgaccccugggccgacagcgacgcccugaccuucagcggcgugauggugagcaugaaggagcccggcugguacagcuucggcuucgagaucaaggacaagaagugcgacgugcccugcaucggcaucgagauggugcacgacggcggcaaggagaccuggcacagcgccgccaccgccaucuacugccugaugggcagcggccagcugcugugggacaccgugaccggcguggacauggcccuguga

SEQ ID NO: 189006 - RNA, 1401 nt, Artificial Sequence
  derived and/or modified CDS sequence (opt4) from neuraminidase__InfluenzaB__AFA45244
augcugcccagcaccauccagacccugacccuguuccugaccagcggcggcgugcugcugagccuguacgugagcgccagccugagcuaccugcuguacagcgacauccugcugaaguucagccccaccgagaccaccgcccccaccaugagccuggacugcgccaacgccagcaacgugcaggccgugaacagaagcgccaccaagggcgugaccuuccugcugcccgagcccgaguggaccuaccccagacugagcugccccggcagcaccuuccagaaggcccugcugaucagcccccacagauucggcgagaccaagggcaacagcgccccccugaucaucagagagcccuucaucgccugcggccccaacgagugcaagcacuucgcccugacccacuacgccgcccagcccggcggcuacuacaacggcaccagaggcgacagaaacaagcugagacaccugaucagcgugaagcugggcaagauccccaccguggagaacagcaucuuccacauggccgccuggagcggcagcgccugccacgacggcaaggaguggaccuacaucggcguggacggccccgacaacgacgcccugcugaaggugaaguacggcgaggccuacaccgacaccuaccacagcuacgccaacaagauccugagaacccaggagagcgccugcaacugcaucggcggcaacugcuaccugaugaucaccgacggcagcgccagcggcgugagcgagugcagauuccugaagaucagagagggcagaaucaucaaggagaucuuccccaccggcagagugaagcacaccgaggagugcaccugcggcuucgccagcaacaagaccaucgagugcgccugcagagacaacagcuacaccgccaagagacccuucgugaagcugaacguggagaccgacaccgccgagaucagacugaugugcaccgacaccuaccuggacacccccagacccgacgacggcagcaucaccggccccugcgagagcaacggcgacaagggcagcggcggcaucaagggcggcuucgugcaccagagaauggagagcaagaucggcagaugguacagcagaaccaugagcaagaccgagagaaugggcaugggccuguacgugaaguacgacggcgaccccugggccgacagcgacgcccuggccuucagcggcgugauggugagcaugaaggagcccggcugguacagcuucggcuucgagaucaaggacaagaagugcgacgugcccugcaucggcaucgagauggugcacgacggcggcaagaagaccuggcacagcgccgccaccgccaucuacugccugaugggcagcggccagcugcugugggacaccgugaccggcguggacauggcccuguga

SEQ ID NO: 189007 - RNA, 1401 nt, Artificial Sequence
  derived and/or modified CDS sequence (opt4) from neuraminidase__InfluenzaB__AFA45247
augcugcccagcaccauccagacccugacccuguuccugaccagcggcggcgugcugcugagccuguacgugagcgccagccugagcuaccugcuguacagcgacauccugcugaaguucagcaccaccgagaucaccgcccccaccaugccccuggacugcgccaacgccagcaacgugcaggccgugaacagaagcgccaccaagggcgugacccugcugcugcccgagcccgaguggaccuaccccagacugagcugccccggcagcaccuuccagaaggcccugcugaucagcccccacagauucggcgagaccaagggcaacagcgccccccugaucaucagagagcccuucaucgccugcggccccaacgagugcaagcacuucgcccugacccacuacgccgcccagcccggcggcuacuacaacggcaccagaggcgacagaaacaagcugagacaccugaucagcgugaagcugggcaagauccccaccguggagaacagcaucuuccacauggccgccuggagcggcagcgccugccacgacggcaaggaguggaccuacaucggcguggacggccccgacaacaacgcccugcugaaggugaaguacggcgaggccuacaccgacaccuaccacagcuacgccaacaagauccugagaacccaggagagcgccugcaacugcaucggcggcaacugcuaccugauggugaccgacggcagcgccagcggcgugagcgagugcagauuccugaagaucagagagggcagaaucaucaaggagaucuuccccaccggcagagugaagcacaccgaggagugcaccugcggcuucgccagcaacaagaccaucgagugcgccugcagagacaacagcuacaccgccaagagacccuucgugaagcugaacguggagaccgacaccgccgagaucagacugaugugcaccgacaccuaccuggacacccccagacccgacgacggcagcaucaccggccccugcgagagcaacggcgacaagggcagcggcggcaucaagggcggcuucgugcaccagagaauggagagcaagaucggcagaugguacagcagaaccaugagcaagaccgagagaaugggcaugggccuguacgugaaguacgacggcgaccccugggccgacagcgacgcccugguguucagcggcgugauggugagcaugaaggagcccggcugguacagcuucggcuucgagaucaaggacaagaagugcgacgugcccugcaucggcaucgagauggugcacgacggcggcaaggagaccuggcacagcgccgccaccgccaucuacugccugaugggcagcggccagcugcugugggacaccgugaccggcguggacauggcccuguga

SEQ ID NO: 189008 - RNA, 1401 nt, Artificial Sequence; identical to SEQ ID NO: 188958
  derived and/or modified CDS sequence (opt4) from neuraminidase__InfluenzaB__AFA45250

SEQ ID NO: 189009 - RNA, 1401 nt, Artificial Sequence
  derived and/or modified CDS sequence (opt4) from neuraminidase__InfluenzaB__AFA45253
augcugcccagcaccauccagacccugacccuguuccugaccagcggcggcgugcugcugagccuguacgugagcgcccugcugagcuaccugcuguacagcgacauccugcugaaguucagccccaccgagaucaccgcccccaccaugagccuggacugcgccaacgccagcaacgugcaggccgugaacagaagcgccaccaagggcgugaccuuccugcugcccgagcccgaguggaccuaccccagacugagcugccccggcagcaccuuccagaaggcccugcugaucagcccccacagauucggcgagaccaagggcaacagcgccccccugaucaucagagagcccuucaucgccugcggccccaacgagugcaagcacuucgcccugacccacuacgccgcccagcccggcggcuacuacaacggcaccagaggcgacagaaacaagcugagacaccugaucagcgugaagcugggcaagauccccaccguggagaacagcaucuuccacauggccgccuggagcggcagcgccugccacgacggcaaggaguggaccuacaucggcguggacggccccgacaacgacgcccugcugaaggugaaguacggcgaggccuacaccgacaccuaccacagcuacgccaacaagauccugagaacccaggagagcgccugcaacugcaucggcggcaacugcuaccugaugaucaccgacggcagcgccagcggcgugagcgagugcagauuccugaagaucagagagggcagaaucaucaaggagaucuuccccaccggcagagugaagcacaccgaggagugcaccugcggcuucgccagcaacaagaccaucgagugcgugugcagagacaacagcuacaccgccaagagacccuucgugaagcugaacguggagaccgacaccgccgagaucagacugaugugcaccgacaccuaccuggacacccccagacccgacgacggcagcaucaccggccccugcgagagcaacggcgacaagggcagcggcggcaucaagggcggcuucgugcaccagagaauggagagcaagaucggcagaugguacagcagaaccaugagcaagaccgagagaaugggcaugggccuguacgugaaguacgacggcgaccccugggccgacagcgacgcccuggccuucagcggcgugauggugagcaugaaggagcccggcugguacagcuucggcuucgagaucaaggacaagaagugcgacgugcccugcaucggcaucgagauggugcacgacggcggcaaggagaccuggcacagcgccgccaccgccaucuacugccugaugggcagcggccagcugcugugggacaccgugaccggcguggacauggcccuguga

SEQ ID NO: 189010 - RNA, 1401 nt, Artificial Sequence
  derived and/or modified CDS sequence (opt4) from neuraminidase__InfluenzaB__AFB77645
augcugcccagcaccauccagacccugacccuguuccugaccagcggcggcgugcugcugagccuguacgugagcgccagccugagcuaccugcuguacagcgacauccugcugaaguucagccccaccgagaucaccgcccccgccaugccccuggacugcgccaacgccagcaacgugcaggccgugaacagaagcgccaccaagggcgugacccugcugcugcccgagcccgaguggaccuaccccagacugagcugccccggcagcaccuuccagaaggcccugcugaucagcccccacagauucggcgagaccaagggcaacagcgccccccugaucaucagagagcccuucaucgccugcggccccaacgagugcaagcacuucgcccugacccacuacgccgcccagcccggcggcuacuacaacggcaccagaggcgacagaaacaagcugagacaccugaucagcgugaagcugggcaagauccccaccguggagaacagcaucuuccacauggccgccuggagcggcagcgccugccacgacggcaaggaguggaccuacaucggcguggacggccccgacaacaacgcccugcugaaggugaaguacggcgaggccuacaccgacaccuaccacagcuacgccaacaagauccugagaacccaggagagcgccugcaacugcaucggcggcaacugcuaccugaugaucaccgacggcagcgccagcggcgugagcgagugcagauuccugaagaucagagagggcagaaucaucaaggagaucuuccccaccggcagagugaagcacaccgaggagugcaccugcggcuucgccagcaacaagaccaucgagugcgccugcagagacaacagcuacaccgccaagagacccuucgugaagcugaacguggagaccgacaccgccgagaucagacugaugugcaccgacaccuaccuggacacccccagacccaacgacggcagcaucaccggccccugcgagagcgacggcgacaagggcagcggcggcaucaagggcggcuucgugcaccagagaauggagagcaagaucggcagaugguacagcagaaccaugagcaagaccgagagaaugggcaugggccuguacgugaaguacgacggcgaccccugggccgacagcgacgcccugguguucagcggcgugauggugagcaugaaggagcccggcugguacagcuucggcuucgagaucaaggacaagaagugcgacgugcccugcaucggcaucgagauggugcacgacggcggcaaggagaccuggcacagcgccgccaccgccaucuacugccugaugggcagcggccagcugcugugggacaccgugaccggcguggacauggcccuguga

SEQ ID NO: 189011 - RNA, 1401 nt, Artificial Sequence
  derived and/or modified CDS sequence (opt4) from neuraminidase__InfluenzaB__AFB77647
augcugcccagcaccauccagacccugacccuguuccugaccagcggcggcgugcugcugagccuguacgugagcgccagccugagcuaccugcuguacagcgacauccugcugaaguucagccccaccgagaucaccgcccccgccaucccccuggacugcgccaacgccagcaacgugcaggccgugaacagaagcgccaccaagggcgugacccugcugcugcccgagcccgaguggaccuaccccagacugagcugccccggcagcaccuuccagaaggcccugcugaucagcccccacagauucggcgagaccaagggcaacagcgccccccugaucaucagagagcccuucaucgccugcggccccaacgagugcaagcacuucgcccugacccacuacgccgcccagcccggcggcuacuacaacggcaccagaggcgacagaaacaagcugagacaccugaucagcgugaagcugggcaagauccccaccguggagaacagcaucuuccacauggccgccuggagcggcagcgccugccacgacggcaaggaguggaccuacaucggcguggacggccccgacaacaacgcccugcugaaggugaaguacggcgaggccuacaccgacaccuaccacagcuacgccaacaagauccugagaacccaggagagcgccugcaacugcaucggcggcaacugcuaccugaugaucaccgacggcagcgccagcggcgugagcgagugcagauuccugaagaucagagagggcagaaucaucaaggagaucuuccccaccggcagagugaagcacaccgaggagugcaccugcggcuucgccagcaacaagaccaucgagugcgccugcagagacaacagcuacaccgccaagagacccuucgugaagcugaacguggagaccgacaccgccgagaucagacugaugugcaccgacaccuaccuggacacccccagacccaacgacggcagcaucaccggccccugcgagagcgacggcgacaagggcagcggcggcaucaagggcggcuucgugcaccagagaauggagagcaagaucggcagaugguacagcagaaccaugagcaagaccgagagaaugggcaugggccuguacgugaaguacgacggcgaccccugggccgacagcgacgcccuggccuucagcggcgugauggugagcaugaaggagcccggcugguacagcuucggcuucgagaucaaggacaagaagugcgacgugcccugcaucggcaucgagauggugcacgacggcggcaaggagaccuggcacagcgccgccaccgccaucuacugccugaugggcagcggccagcugcugugggacaccgugaccggcguggacauggcccuguga

SEQ ID NO: 189012 - RNA, 1401 nt, Artificial Sequence
  derived and/or modified CDS sequence (opt4) from neuraminidase__InfluenzaB__AFB77649
augcugcccagcaccauccagacccugacccuguuccugaccagcggcggcgugcugcugagccuguacgugagcgccagccugagcuaccugcuguacagcgacauccugcugaaguucagccccaccgagaucaccgcccccgccaugccccuggacugcgccaacgccagcaacgugcaggccgugaacagaagcgccaccaagggcgugacccugcugcugcccgagcccgaguggaccuaccccagacugagcugccccggcagcaccuuccagaaggcccugcugaucagcccccacagauucggcgagaccaagggcaacagcgccccccugaucaucagagagcccuucaucgccugcggccccaacgagugcaagcacuucgcccugacccacuacgccgcccagcccggcggcuacuacaacggcaccagaggcgacagaaacaagcugagacaccugaucagcgugaagcugggcaagauccccaccguggagaacagcaucuuccacauggccgccuggagcggcagcgccugccacgacggcaaggaguggaccuacaucggcguggacggccccgacaacaacgcccugcugaaggugaaguacggcgaggccuacaccgacaccuaccacagcuacgccaacaagauccugagaacccaggagagcgccugcaacugcaucggcggcaacugcuaccugaugaucaccgacggcagcgccagcggcgugagcgagugcagauuccugaagaucagagagggcagaaucaucaaggagaucuuccccaccggcagaaucaagcacaccgaggagugcaccugcggcuucgccagcaacaagaccaucgagugcgccugcagagacaacagcuacaccgccaagagacccuucgugaagcugaacguggagaccgacaccgccgagaucagacugaugugcaccgacaccuaccuggacacccccagacccaacgacggcagcaucaccggccccugcgagagcgacggcgacaagggcagcggcggcaucaagggcggcuucgugcaccagagaauggagagcaagaucggcagaugguacagcagaaccaugagcaagaccgagagaaugggcaugggccuguacgugaaguacgacggcgaccccugggccgacagcgacgcccuggccuucagcggcgugauggugagcaugaaggagcccggcugguacagcuucggcuucgagaucaaggacaagaagugcgacgugcccugcaucggcaucgagauggugcacgacggcggcaaggagaccuggcacagcgccgccaccgccaucuacugccugaugggcagcggccagcugcugugggacaccgugaccggcguggacauggcccuguga

SEQ ID NO: 189013 - RNA, 1401 nt, Artificial Sequence
  derived and/or modified CDS sequence (opt4) from neuraminidase__InfluenzaB__AFB77651
augcugcccagcaccauccagacccugacccuguuccugaccagcggcggcgugcugcugagccuguacgugagcgccagccugagcuaccugcuguacagcgacauccugcugaaguucagccccaccgagaucaccgcccccgccaugccccuggacugcgccaacgccagcaacgugcaggccgugaacagaagcgccaccaagggcgugacccugcugcugcccgagcccgaguggaccuaccccagacugagcugccccggcagcaccuuccagaaggcccugcugaucagcccccacagauucggcgagaccaagggcaacagcgccccccugaucaucagagagcccuucaucgccugcggccccaacgagugcaagcacuucgcccugacccacuacgccgcccagcccggcggcuacuacaacggcaccagaggcgacagaaacaagcugagacaccugaccagcgugaagcugggcaagauccccaccguggagaacagcaucuuccacauggccgccuggagcggcagcgccugccacgacggcaaggaguggaccuacaucggcguggacggccccgacaacaacgcccugcugaaggugaaguacggcgaggccuacaccgacaccuaccacagcuacgccaacaagauccugagaacccaggagagcgccugcaacugcaucggcggcaacugcuaccugaugaucaccgacggcagcgccagcggcgugagcgagugcagauuccugaagaucagagagggcagaaucaucaaggagaucuuccccaccggcagagugaagcacaccgaggagugcaccugcggcuucgccagcaacaagaccaucgagugcgccugcagagacaacagcuacaccgccaagagacccuucgugaagcugaacguggagaccgacaccgccgagaucagacugaugugcaccgacaccuaccuggacacccccagacccaacgacggcagcaucaccggccccugcgagagcgacggcgacaagggcagcggcggcaucaagggcggcuucgugcaccagagaauggagagcaagaucggcagaugguacagcagaaccaugagcaagaccgagagaaugggcaugggccuguacgugaaguacgacggcgaccccugggccgacagcgacgcccuggccuucagcggcgugauggugagcaugaaggagcccggcugguacagcuucggcuucgagaucaaggacaagaagugcgacgugcccugcaucggcaucgagauggugcacgacggcggcaaggagaccuggcacagcgccgccaccgccaucuacugccugaugggcagcggccagcugcugugggacaccgugaccggcguggacauggcccuguga

SEQ ID NO: 189014 - RNA, 1401 nt, Artificial Sequence
  derived and/or modified CDS sequence (opt4) from neuraminidase__InfluenzaB__AFE00364
augcugcccagcaccauccagaugcugacccuguuccugaccagcggcggcgugcugcugagccuguacgugagcgccagccugagcuaccugcuguacagcgacauccugcugaaguucagccccaccgagaucaccgcccccaccaugccccuggacugcgccaacgccagcaacgugcacgccgugaacagaagcgccaccaagggcgugaccuuccugcugcccgagcccgaguggaccuaccccagacugagcugccccggcagcaccuuccagaaggcccugcugaucagcccccacagauucggcgagaccaagggcaacagcgccccccugaucaucagagagcccuucaucgccugcggccccaacgagugcaagcacuucgcccugacccacuacgccgcccagcccggcggcuacuacaacggcaccagaggcgacagaaacagacugagacaccugaucagcgugaagcugggcaagauccccaccguggagaacagcaucuuccacauggccgccuggagcggcagcgccugccacgacggcaaggaguggaccuacaucggcguggacggccccgacaacaacgcccugcugaagaucaaguacggcgaggccuacaccgacaccuaccacagcuacgccaacaacauccugagaacccaggagagcgccugcaacugcaucggcggcaacugcuaccugaugaucaccgacggcagcgccagcggcgugagcgagugcagauuccugaagaucagagagggcagaaucaucaaggagaucuuccccaccggcagagugaagcacaccgaggagugcaccugcggcuucgccagcaacaagaccaucgagugcgccugcagagacaacagcuacaccgccaagagacccuucgugaagcugaacguggagaccgacaccgccgagaucagacugaugugcaccgacaccuaccuggacacccccagacccgacgacggcagcaucaccggccccugcgagagcaacggcgacaagggcagcggcggcaucaagggcggcuucgugcaccagagaauggccagcaagaucggcagaugguacagcagaaccaugagcaagaccgagagaaagggcaugggccuguacgugaaguacgacggcgaccccuggaccgacagcgacgcccuggccuucagaggcgugauggugagcaugaaggagcccggcugguacagcuucggcuucgagaucaaggacaagaagugcgacgugcccugcaucggcaucgagauggugcacgacggcggcaaggagaccuggcacagcgccgccaccgccaucuacugccugaugggcagcggccagcugcugugggacaccgugaccggcguggacauggcccuguga

SEQ ID NO: 189015 - RNA, 1401 nt, Artificial Sequence
  derived and/or modified CDS sequence (opt4) from neuraminidase__InfluenzaB__AFF18536
augcugcccagcaccauccagaugcugacccuguuccugaccagcggcggcgugcugcugagccuguacgugagcgccagccugagcuaccugcuguacagcgacauccugcugaaguucagccccaccgagaucaccgcccccaccaugccccuggacugcgccaacgccagcaacgugcacgccgugaacagaagcgccaccaagggcgugaccuuccugcugcccgagcccgaguggaccuaccccagacugagcugccccggcagcaccuuccagaaggcccugcugaucagcccccacagauucggcgagaccaagggcaacagcgccccccugaucaucagagagcccuucaucgccugcggccccaacgagugcagacacuucgcccugacccacuacgccgcccagcccggcggcuacuacaacggcaccagaggcgacagaaacaagcugagacaccugaucagcgugaagcugggcaagauccccaccguggagaacagcaucuuccacauggccgccuggagcggcagcgccugccacgacggcaaggaguggaccuacaucggcguggacggccccgacaacaacgcccugcugaagaucaaguacggcgaggccuacaccgacaccuaccacagcuacgccaacaacauccugagaacccaggagagcgccugcaacugcaucagaggcaacugcuaccugaugaucaccgacggcagcgccagcggcgugagcgagugcagauuccugaagaucagagagggcagaaucaucaaggagaucuuccccaccggcagagugaagcacaccgaggagugcaccugcggcuucgccagcaacaagaccaucgagugcgccugcagagacaacagcuacaccgccaagagacccuucgugaagcugaacguggagaccgacaccgccgagaucagacugaugugcaccgacaccuaccuggacacccccagacccgacgacggcagcaucaccggccccugcgagagcaacggcgacaagggcagcggcggcaucaagggcggcuucgugcaccagagaauggccagcaagaucggcagaugguacagcagaaccaugagcaagaccgagagaaagggcaugggccuguacgugaaguacgacggcgaccccuggaccgacagcgacgcccuggccuucagaggcgugauggugagcaugaaggagcccggcugguacagcuucggcuucgagaucaaggacaagaagugcgacgugcccugcaucggcaucgagauggugcacgacggcggcaaggagaccuggcacagcgccgccaccgccaucuacugccugaugggcagcggccagcugcugugggacaccgugaccggcguggacauggcccuguga

SEQ ID NO: 189016 - RNA, 1401 nt, Artificial Sequence
  derived and/or modified CDS sequence (opt4) from neuraminidase__InfluenzaB__AFF18545
augcugcccagcaccauccagaugcugacccuguuccugaccagcggcggcgugcugcugagccuguacgugagcgccagccugagcuaccugcuguacagcgacauccugcugaaguucagccccaccgagaucaccgcccccaccaugccccuggacugcgccaacgccagcaacgugcacgccgugaacagaagcgccaccaagggcgugaccuuccugcugcccgagcccgaguggaccuaccccagacugagcugccccggcagcaccuuccagaaggcccugcugaucagcccccacagauucggcgagaccaagggcaacagcgccccccugaucaucagagagcccuucaucgccugcggccccaacgagugcaagcacuucgcccugacccacuacgccgcccagcccggcggcuacuacaacggcaccagaggcgacagaaacaagcugagacaccugaucagcgugaagcugggcaagauccccaccguggagaacagcaucuuccacauggccgccuggagcggcagcgccugccacgacggcaaggaguggaccuacaucggcguggacggccccgacaacaacgcccugcugaagaucaaguacggcgaggccuacaccgacaccuaccacagcuacgccaacaacauccugagaacccaggagagcgccugcaacugcaucggcggcaacugcuaccugaugaucaccgacggcagcgccagcggcgugagcgagugcagauuccugaagaucagagagggcagaaucaucaaggagaucuuccccaccggcagagugaagcacaccgaggagugcaccugcggcuucgccagcaacaagaccaucgagugcgccugcagagacaacagcuacaccgccaagagacccuucgugaagcugaacguggagaccgacaccgccgagaucagacugaugugcaccgacaccuaccuggacacccccagacccgacgacggcagcaucaccggccccugcgagagcaacggcgacaagggcagcggcggcaucaagggcggcuucgugcaccagagaauggccagcaagaucggcagaugguacagcagaaccaugagcaagaccgagagaaagggcaugggccuguacgugaaguacgacggcgaccccuggaccgacagcgacgcccuggccuucagaggcgugauggugagcaugaaggagcccggcugguacagcuucggcuucgagaucaaggacaagaagugcgacgugcccugcaucggcaucgagauggugcacgacggcggcaaggagaccuggcacagcgccgccaccgccaucuacugccugaugggcagcggccagcugcugugggacaccgugaccggcguggacauggcccuguga

SEQ ID NO: 189017 - RNA, 1401 nt, Artificial Sequence; identical to SEQ ID NO: 188877
  derived and/or modified CDS sequence (opt4) from neuraminidase__InfluenzaB__AFH34933

SEQ ID NO: 189018 - RNA, 1401 nt, Artificial Sequence; identical to SEQ ID NO: 188877
  derived and/or modified CDS sequence (opt4) from neuraminidase__InfluenzaB__AFH34939

SEQ ID NO: 189019 - RNA, 1401 nt, Artificial Sequence; identical to SEQ ID NO: 188815
  derived and/or modified CDS sequence (opt4) from neuraminidase__InfluenzaB__AFH57869

SEQ ID NO: 189020 - RNA, 1401 nt, Artificial Sequence
  derived and/or modified CDS sequence (opt4) from neuraminidase__InfluenzaB__AFH57891
augcugcccagcaccauccagacccugacccuguuccugaccagcggcggcgugcugcugagccuguacgugagcgccagccugagcuaccugcuguacagcgacauccugcugaaguucagccagaccgagaucaccgcccccaucaugccccuggacuacgccaacgccagcaacgugcaggccgugaaccacagcgccgccaagggcgugacccugcugcugcccgagcccgaguggaccuaccccagacugagcugccccggcagcaccuuccagaaggcccugcugaucagcccccacagauucggcgagaccaagggcaacagcgccccccugaucaucagagagcccuucaucgccugcggccccaccgagugcaagcacuucgcccugacccacuacgccgcccagcccggcggcuacuacaacggcaccagagaggacagaaacaagcugagacaccugaucagcgugaagcugggcaagauccccaccguggagaacagcaucuuccacauggccgccuggagcggcagcgccugccacgacggcaaggaguggaccuacaucggcguggacggccccgacagcaacgcccugcugaagaucaaguacggcgaggccuacaccgacaccuaccacagcuacgccaagaacauccugagaacccaggagagcgccugcaacugcaucggcggcgacugcuaccugaugaucaccgacggccccgccagcggcaucagcgagugcagauuccugaagaucagagagggcagaaucaucaaggagaucuuccccaccggcagagugaagcacaccgaggagugcaccugcggcuucgccagcaacaagaccaucgagugcgccugcagagacaacagcuacaccgccaagagacccuucgugaagcugaacguggagaccgacaccgccgagaucagacugaugugcaccgagaccuaccuggacacccccagacccaacgacggcagcaucaccggccccugcgagagcgacggcgacaagggcagcggcggcaucaagggcggcuucgugcaccagagaauggccagcaagaucggcagaugguacagcagaaccaugagcaagaccaagagaaugggcaugggccuguacgugaaguacgacggcgaccccuggaccgacagcgaggcccuggcccugagcggcgugauggugagcauggaggagcccggcugguacagcuucggcuucgagaucaaggacaagaagugcgacgugcccugcaucggcaucgagauggugcacgacggcggcaagaccaccuggcacagcgccgccaccgccaucuacugccugaugggcagcggccagcugcugugggacaccgugaccggcguggacauggcccuguga

SEQ ID NO: 189021 - RNA, 1401 nt, Artificial Sequence
  derived and/or modified CDS sequence (opt4) from neuraminidase__InfluenzaB__AFH57913
augcugcccagcaccauccagacccugacccuguuccugaccagcggcggcgugcugcugagccuguacgugagcgccagccugagcuaccugcuguacagcgacauccugcugaaguucagccccaccgagaucaccgcccccaccaugccccuggacugcgccaacgccagcaacgugcaggccgugaacagaagcgccaccaagggcgugacccugcugcugcccgagcccgaguggaccuaccccagacugagcugccccggcagcaccuuccagaaggcccugcugaucagcccccacagauucggcgagaccaagggcaacagcgccccccugaucaucagagagcccuucaucgccugcggccccaacgagugcaagcacuucgcccugacccacuacgccgcccagcccggcggcuacuacaacggcaccagaggcgacagaaacaagcugagacaccugaucagcgugaagcugggcaagauccccaccguggagaacagcaucuuccacauggccgccuggagcggcagcgccugccacgacggcaaggaguggaccuacaucggcguggacggccccgacaacaacgcccugcugaaggugaaguacggcgaggccuacaccgacaccuaccacagcuacgccaacaagauccugagaacccaggagagcgccugcaacugcaucggcggcaacugcuaccugaugaucaccgacggcagcgccagcggcgugagcgagugcagauuccugaagaucagagagggcagaaucaucaaggagaucuuccccaccggcagagugaagcacaccgaggagugcaccugcggcuucgccagcaacaagaccaucgagugcgccugcagagacaacagcuacaccgccaagagacccuucgugaagcugaacguggagaccgacaccgccgagaucagacugaugugcaccgacaccuaccuggacacccccagacccaacgacggcagcaucaccggccccugcgagagcaacggcgacaagggcagcggcggcaucaagggcggcuucgugcaccagagaauggagagcaagaucggcagaugguacagcagaaccaugagcaagaccgagagaaugggcaugggccuguacgugaaguacgacggcgaccccugggccgacagcgacgcccuggccuucagcggcgugauggugagcaugaaggagcccggcugguacagcuucggcuucgagaucaaggacaagaagugcgacgugcccugcaucggcaucgagauggugcacgacggcggcaaggagaccuggcacagcgccgccaccgccaucuacugccugaugggcagcggccagcugcugugggacaccgugaccggcguggacauggcccuguga

SEQ ID NO: 189022 - RNA, 1401 nt, Artificial Sequence; identical to SEQ ID NO: 188877
  derived and/or modified CDS sequence (opt4) from neuraminidase__InfluenzaB__AFH57935

SEQ ID NO: 189023 - RNA, 1401 nt, Artificial Sequence; identical to SEQ ID NO: 188877
  derived and/or modified CDS sequence (opt4) from neuraminidase__InfluenzaB__AFH57946

SEQ ID NO: 189024 - RNA, 1401 nt, Artificial Sequence; identical to SEQ ID NO: 188877
  derived and/or modified CDS sequence (opt4) from neuraminidase__InfluenzaB__AFH57957

SEQ ID NO: 189025 - RNA, 1401 nt, Artificial Sequence; identical to SEQ ID NO: 188955
  derived and/or modified CDS sequence (opt4) from neuraminidase__InfluenzaB__AFH57968

SEQ ID NO: 189026 - RNA, 1401 nt, Artificial Sequence
  derived and/or modified CDS sequence (opt4) from neuraminidase__InfluenzaB__AFH57979
augcugcccagcaccauccagacccugacccuguuccugaccagcggcggcgugcugcugagccuguacgugagcgcccugcugagcuaccugcuguacagcgacauccugcugaaguucagccccaccgagaucaccgcccccaccaugagccuggacugcgccaacgccagcaacgugcaggccgugaacagaagcgccaccaagggcgugaucuuccugcugcccgagcccgaguggaccuaccccagacugagcugccccggcagcaccuuccagaaggcccugcugaucagcccccacagauucggcgagaccaagggcaacagcgccccccugaucaucagagagcccuucaucgccugcggccccaacgagugcaagcacuucgcccugacccacuacgccgcccagcccggcggcuacuacaacggcaccagaggcgacagaaacaagcugagacaccugaucagcgugaagcugggcaagauccccaccguggagaacagcaucuuccacauggccgccuggagcggcagcgccugccacgacggcaaggaguggaccuacaucggcguggacggccccgacaacgacgcccugcugaaggugaaguacggcgaggccuacaccgacaccuaccacagcuacgccaacaagauccugagaacccaggagagcgccugcaacugcaucggcggcaacugcuaccugaugaucaccgacggcagcgccagcggcgugagcgagugcagauuccugaagaucagagagggcagaaucaucaaggagaucuuccccaccggcagagugaagcacaccgaggagugcaccugcggcuucgccagcaacaagaccaucgagugcgccugcagagacaacagcuacaccgccaagagacccuucgugaagcugaacguggagaccgacaccgccgagaucagacugaugugcaccgacaccuaccuggacacccccagacccgacgacggcagcaucaccggccccugcgagagcaacggcgacaagggcagcggcggcaucaagggcggcuucgugcaccagagaauggagagcaagaucggcagaugguacagcagaaccaugagcaagaccgagagaaugggcaugggccuguacgugaaguacgacggcgaccccugggccgacagcgacgcccuggccuucagcggcgugauggugagcaugaaggagcccggcugguacagcuucggcuucgagaucaaggacaagaagugcgacgugcccugcaucggcaucgagauggugcacgacggcggcaaggagaccuggcacagcgccgccaccgccaucuacugccugaugggcagcggccagcugcugugggacaccgugaccggcguggacauggcccuguga

SEQ ID NO: 189027 - RNA, 1401 nt, Artificial Sequence; identical to SEQ ID NO: 188644
  derived and/or modified CDS sequence (opt4) from neuraminidase__InfluenzaB__AFH58253

SEQ ID NO: 189028 - RNA, 1401 nt, Artificial Sequence; identical to SEQ ID NO: 188707
  derived and/or modified CDS sequence (opt4) from neuraminidase__InfluenzaB__AFH58264

SEQ ID NO: 189029 - RNA, 1401 nt, Artificial Sequence; identical to SEQ ID NO: 188848
  derived and/or modified CDS sequence (opt4) from neuraminidase__InfluenzaB__AFH58275

SEQ ID NO: 189030 - RNA, 1401 nt, Artificial Sequence; identical to SEQ ID NO: 188848
  derived and/or modified CDS sequence (opt4) from neuraminidase__InfluenzaB__AFH58286

SEQ ID NO: 189031 - RNA, 1401 nt, Artificial Sequence; identical to SEQ ID NO: 189021
  derived and/or modified CDS sequence (opt4) from neuraminidase__InfluenzaB__AFH58297

SEQ ID NO: 189032 - RNA, 1401 nt, Artificial Sequence
  derived and/or modified CDS sequence (opt4) from neuraminidase__InfluenzaB__AFH58308
augcugcccagcaccauccagacccugacccuguuccugaccagcggcggcgugcugcugagccuguacgugagcgccagccugagcuaccugcuguacagcgacauccugcugaaguucagcagaaccgagaccaccgcccccaucaugccccuggacugcgccaacgccagcaacgugcaggccgugaacagaagcgccaccaagggcgugacccugcugcugcccgagcccgaguggaccuaccccagacugagcugccccggcagcaccuuccagaaggcccugcugaucagcccccacagauucggcgagaccaagggcaacagcgccccccugaucaucagagagcccuucaucgccugcggccccaaggagugcaagcacuucgcccugacccacuacgccgcccagcccggcggcuacuacaacggcaccagagaggacagaaacaagcugagacaccugaucagcgugaagcugggcaagauccccaccguggagaacagcaucuuccacauggccgccuggagcggcagcgccugccacgacggcagagaguggaccuacaucggcguggacggccccgacagcaacgcccugcugaagaucaaguacggcgaggccuacaccgacaccuaccacagcuacgccaagaacauccugagaacccaggagagcgccugcaacugcaucggcggcgacugcuaccugaugaucaccgacggccccgccagcggcaucagcgagugcagauuccugaagaucagagagggcagaaucaucaaggagaucuuccccaccggcagagugaagcacaccgaggagugcaccugcggcuucgccagcaacaagaccaucgagugcgccugcagagacaacagcuacaccgccaagagacccuucgugaagcugaacguggagaccgacaccgccgagaucagacugaugugcaccgagaccuaccuggacacccccagacccaacgacggcagcaucaccggccccugcgagagcaacggcgacaagggcagcggcggcaucaagggcggcuucgugcaccagagaauggccagcaagaucggcagaugguacagcagaaccaugagcaagaccaagagaaugggcaugggccuguacgugaaguacgacggcgaccccuggaccgacagcgaggcccuggcccugagcggcgugauggugagcauggaggagcccggcugguacagcuucggcuucgagaucaaggacaagaagugcgacgugcccugcaucggcaucgagauggugcacgacggcggcaagaccaccuggcacagcgccgccaccgccaucuacugccugaugggcagcggccagcugcugugggacaccgugaccggcguggacauggcccuguga

SEQ ID NO: 189033 - RNA, 1401 nt, Artificial Sequence; identical to SEQ ID NO: 189032
  derived and/or modified CDS sequence (opt4) from neuraminidase__InfluenzaB__AFH58319

SEQ ID NO: 189034 - RNA, 1401 nt, Artificial Sequence
  derived and/or modified CDS sequence (opt4) from neuraminidase__InfluenzaB__AFH58341
augcugcccagcaccauccagacccugacccuguuccugaccagcggcggcgugcugcugagccuguacgugagcgccagccugagcuaccugcuguacagcgacauccugcugaaguucagcagaaccgagaucaccgcccccaucaugccccuggacugcgccaacgccagcaacgugcaggccgugaacagaagcgccaccaagggcgugacccugcugcugcccgagcccgaguggaccuaccccagacugagcugccccggcagcaccuuccagaaggcccugcugaucagcccccacagauucggcgagaccaagggcaacagcgccccccugaucaucagagagcccuucaucgccugcggccccaaggagugcaagcacuucgcccugacccacuacgccgcccagcccggcggcuacuacaacggcaccagagaggacagaaacaagcugagacaccugaucagcgugagacugggcaagauccccaccguggagaacagcaucuuccacauggccgccuggagcggcagcgccugccacgacggcagagaguggaccuacaucggcguggacggccccgacagcaacgcccugcugaagaucaaguacggcgaggccuacaccgacaccuaccacagcuacgccaagaacauccugagaacccaggagagcgccugcaacugcaucggcggcgacugcuaccugaugaucaccgacggccccgccagcggcaucagcgagugcagauuccugaagaucagagagggcagaaucaucaaggagaucuuccccaccggcagagugaagcacaccgaggagugcaccugcggcuucgccagcaacaagaccaucgagugcgccugcagagacaacagcuacaccgccaagagacccuucgugaagcugaacguggagaccgacaccgccgagaucagacugaugugcaccgagaccuaccuggacacccccagacccaacgacggcagcaucaccggccccugcgagagcaacggcgacaagggcagcggcggcaucaagggcggcuucgugcaccagagaauggccagcaagaucggcagaugguacagcagaaccaugagcaagaccaagagaaugggcaugggccuguacgugaaguacgacggcgaccccuggaccgacagcgaggcccuggcccugagcggcgugauggugagcauggaggagcccggcugguacagcuucggcuucgagaucaaggacaagaagugcgacgugcccugcaucggcaucgagauggugcacgacggcggcaagaccaccuggcacagcgccgccaccgccaucuacugccugaugggcagcggccagcugcugugggacaccgugaccggcgugaacaugacccuguga

SEQ ID NO: 189035 - RNA, 1401 nt, Artificial Sequence
  derived and/or modified CDS sequence (opt4) from neuraminidase__InfluenzaB__AFH58363
augcugcccagcaccauccagacccugacccuguuccugaccagcggcggcgugcugcugagccuguacgugagcgccagccugagcuaccugcuguacagcgacauccugcugaaguuccccagcaccgagaucaccgcccccaccaugccccuggacugcgccaacgccagcaacgugcaggccgugaacagaagcgccaccaagggcgugaccuuccugcugcccgagcccgaguggaccuaccccagacugagcugccccggcagcaccuuccagaaggcccugcugaucagcccccacagauucggcgagaccaagggcaacagcgccccccugaucaucagagagcccuucaucgccugcggccccaaggagugcaagcacuucgcccugacccacuacgccgcccagcccggcggcuacuacaacggcaccagaggcgacagaaacaagcugagacaccugaucagcgugaagcugggcaagauccccaccguggagaacagcaucuuccacauggccgccuggagcggcagcgccugccacgacggcaaggaguggaccuacaucggcguggacggccccgacaacaacgcccugcugaagaucaaguacggcgaggccuacaccgacaccuaccacagcuacgccaacaacauccugagaacccaggagagcgccugcaacugcaucggcggcaacugcuaccugaugaucaccgacggcagcgccagcggcgugagcgagugcagauuccugaagaucagagagggcagaaucaucaaggagaucuuccccaccggcagaaucaagcacaccgaggagugcaccugcggcuucgccagcaacaagaccaucgagugcgccugcagagacaacagcuacaccgccaagagacccuucgugaagcugaacguggagaccgacaccgccgagaucagacugaugugcaccgagaccuaccuggacacccccagacccgacgacggcagcaucaccggccccugcgagagcaacggcggcaagggcagcggcggcaucaagggcggcuucgugcaccagagaauggccagcaagaucggcagaugguacagcagaaccaugagcaagaccgagagaaagggcaugggccuguacgugaaguacgacggcgaccccugggccgacagcgacgcccuggccuucagcggcgugauggugagcauggaggagcccggcugguacagcuucggcuucgagaucaaggacaagaagugcgacgugcccugcaucggcaucgagauggugcacgacggcggcaaggagaccuggcacagcgccgccaccgccaucuacugccugaugggcagcggccagcugcugugggacaccgugaccggcgugaacauggcccuguga

SEQ ID NO: 189036 - RNA, 1401 nt, Artificial Sequence; identical to SEQ ID NO: 189035
  derived and/or modified CDS sequence (opt4) from neuraminidase__InfluenzaB__AFH58374

SEQ ID NO: 189037 - RNA, 1401 nt, Artificial Sequence; identical to SEQ ID NO: 189021
  derived and/or modified CDS sequence (opt4) from neuraminidase__InfluenzaB__AFH58385

SEQ ID NO: 189038 - RNA, 1401 nt, Artificial Sequence; identical to SEQ ID NO: 189021
  derived and/or modified CDS sequence (opt4) from neuraminidase__InfluenzaB__AFH58396

SEQ ID NO: 189039 - RNA, 1401 nt, Artificial Sequence; identical to SEQ ID NO: 189021
  derived and/or modified CDS sequence (opt4) from neuraminidase__InfluenzaB__AFH58407

SEQ ID NO: 189040 - RNA, 1401 nt, Artificial Sequence; identical to SEQ ID NO: 189021
  derived and/or modified CDS sequence (opt4) from neuraminidase__InfluenzaB__AFH58418

SEQ ID NO: 189041 - RNA, 1401 nt, Artificial Sequence
  derived and/or modified CDS sequence (opt4) from neuraminidase__InfluenzaB__AFH58429
augcugcccagcaccauccagacccugacccuguuccugaccagcggcggcgugcugcugagccuguacgugagcgccagccugagcuaccugcuguacagcgacauccugcugaaguucagccccaccgagaucaccgcccccaccaugccccuggacugcgccaacgccagcaacgugcaggccgugaacagaagcgccaccaagggcgugacccugcugcugcccgagcccgaguggaccuaccccagacugagcugccccggcagcaccuuccagaaggcccugcugaucagcccccacagauucggcgagaccaagggcaacagcgccccccugaucaucagagagcccuucaucgccugcggccccaacgagugcaagcacuucgcccugacccacuacgccgcccagcccggcggcuacuacaacggcaccagaggcgacagaaacaagcugagacaccugaucagcgugaagcugggcaagauccccaccguggagaacagcaucuuccacauggccgccuggagcggcagcgccugccacgacggcaaggaguggaccuacaucggcguggacggccccgacaacaacgcccugcugaaggugaaguacggcgaggccuacaccgacaccuaccacagcuacgccaacaagauccugagaacccaggagagcgccugcaacugcaucggcggcaacugcuaccugaugaucaccgacggcagcgccagcggcgugagcgagugcagauuccugaagaucagagagggcagaaucaucaaggagaucuuccccaccggcagagugaagcacaccgaggagugcaccugcggcuucgccagcaacgagaccaucgagugcgccugcagagacaacagcuacaccgccaagagacccuucgugaagcugaacguggagaccgacaccgccgagaucagacugaugugcaccgacaccuaccuggacacccccagacccaacgacggcagcaucaccggccccugcgagagcaacggcgacaagggcagcggcggcaucaagggcggcuucgugcaccagagaauggagagcaagaucggcagaugguacagcagaaccaugagcaagaccgagagaaugggcaugggccuguacgugaaguacgacggcgaccccugggccgacagcgacgcccuggccuucagcggcgugauggugagcaugaaggagcccggcugguacagcuucggcuucgagaucaaggacaagaagugcgacgugcccugcaucggcaucgagauggugcacgacggcggcaaggagaccuggcacagcgccgccaccgccaucuacugccugaugggcagcggccagcugcugugggacaccgugaccggcguggacauggcccuguga

SEQ ID NO: 189042 - RNA, 1401 nt, Artificial Sequence
  derived and/or modified CDS sequence (opt4) from neuraminidase__InfluenzaB__AFH58440
augcugcccagcaccauccagacccugacccuguuccugaccagcggcggcgugcugcugagccuguacgugagcgccagccugagcuaccugcuguacagcgacauccugcugaaguucagccccaccgagaucaccgcccccaccaugccccuggacugcgccaacgccagcaacgugcaggccgugaacagaagcgccaccaagggcgugacccugcugcugcccgagcccgaguggaccuaccccagacugagcugccccggcagcaccuuccagaaggcccugcugaucagcccccacagauucggcgagaccaagggcaacagcgccccccugaucaucagagagcccuucaucgccugcggccccaacgagugcaagcacuucgcccugacccacuacgccgcccagcccggcggcuacuacaacggcaccagaggcgacagaaacaagcugagacaccugaucagcgugaagcugggcaagauccccaccguggagaacagcaucuuccacauggccgccuggagcggcagcgccugccacgacggcaaggaguggaccuacaucggcguggacggccccgacaacaacgcccugcugaaggugaaguacggcgaggccuacaccgacaccuaccacagcuacgccaacaagauccugagaacccaggagagcgccugcaacugcaucggcggcaacugcuaccugaugaucaccgacggcagcgccagcggcgugagcgagugcagauuccugaagauccaggagggcagaaucaucaaggagaucuuccccaccggcagagugaagcacaccgaggagugcaccugcggcuucgccagcaacaagaccaucgagugcgccugcagagacaacagcuacaccgccaagagacccuucgugaagcugaacguggagaccgacaccgccgagaucagacugaugugcaccgacaccuaccuggacacccccagacccaacgacggcagcaucaccggccccugcgagagcaacggcgacaagggcagcggcggcaucaagggcggcuucgugcaccagagaauggagagcaagaucggcagaugguacagcagaaccaugagcaagaccgagagaaugggcaugggccuguacgugaaguacgacggcgaccccugggccgacagcgacgcccuggccuucagcggcgugauggugagcaugaaggagcccggcugguacagcuucggcuucgagaucaaggacaagaagugcgacgugcccugcaucggcaucgagauggugcacgacggcggcaaggagaccuggcacagcgccgccaccgccaucuacugccugaugggcagcggccagcugcugugggacaccgugaccggcguggacauggcccuguga

SEQ ID NO: 189043 - RNA, 1401 nt, Artificial Sequence
  derived and/or modified CDS sequence (opt4) from neuraminidase__InfluenzaB__AFH58462
augcugcccagcaccauccagacccugacccuguuccugaccagcggcggcgugcugcugagccuguacgugagcgccagccugagcuaccugcuguacagcgacauccugcugaaguucagccccaccgagaucaccgcccccaccaugccccuggacugcgccaacgccagcaacgugcaggccgugaacagaagcgccaccaagggcgugaccuuccugcugcccgagcccgaguggaccuaccccagacugagcugccccggcagcaccuuccagaaggcccugcugaucagcccccacagauucggcgagaccaagggcaacagcgccccccugaucaucagagagcccuucaucgccugcggccccaacgagugcaagcacuucgcccugacccacuacgccgcccagcccggcggcuacuacaacggcaccagaggcgacagaaacaagcugagacaccugaucagcgugaagcugggcaagauccccaccguggagaacagcaucuuccacauggccgccuggagcggcagcgccugccacgacggcaaggaguggaccuacaucggcguggacggccccgacaacaacgcccugcugaaggugaaguacggcgaggccuacaccgacaccuaccacagcuacgccaacaagauccugagaacccaggagagcgccugcaacugcaucggcggcaacugcuaccugaugaucaccgacggcagcgccagcggcgugagcgagugcagauuccugaagaucagagagggcagaaucaucaaggagaucuuccccaccggcagagugaagcacaccgaggagugcaccugcggcuucgccagcaacaagaccaucgagugcgccugcagagacaacagcuacaccgccaagagacccuucgugaagcugaacguggagaccgacaccgccgagaucagacugaugugcaccgacaccuaccuggacacccccagacccgacgacggcagcaucaccggccccugcgagagcaacggcgacgagggcagcggcggcaucaagggcggcuucgugcaccagagaauggagagcaagaucggcagaugguacagcagaaccaugagcaagaccgagagaaugggcaugggccuguacgugaaguacgacggcgaccccugggccgacagcgacgcccuggccuucagcggcgugauggugagcaugaaggagcccggcugguacagcuucggcuucgagaucaaggacaagaagugcgacgugcccugcaucggcaucgagauggugcacgacggcggcaaggagaccuggcacagcgccgccaccgccaucuacugccugaugggcagcggccagcugcugugggacaccgugaccggcguggacaugacccuguga

SEQ ID NO: 189044 - RNA, 1401 nt, Artificial Sequence; identical to SEQ ID NO: 189043
  derived and/or modified CDS sequence (opt4) from neuraminidase__InfluenzaB__AFH58473

SEQ ID NO: 189045 - RNA, 1401 nt, Artificial Sequence; identical to SEQ ID NO: 188877
  derived and/or modified CDS sequence (opt4) from neuraminidase__InfluenzaB__AFH58484

SEQ ID NO: 189046 - RNA, 1401 nt, Artificial Sequence; identical to SEQ ID NO: 188877
  derived and/or modified CDS sequence (opt4) from neuraminidase__InfluenzaB__AFH58495

SEQ ID NO: 189047 - RNA, 1401 nt, Artificial Sequence; identical to SEQ ID NO: 188877
  derived and/or modified CDS sequence (opt4) from neuraminidase__InfluenzaB__AFH58506

SEQ ID NO: 189048 - RNA, 1401 nt, Artificial Sequence
  derived and/or modified CDS sequence (opt4) from neuraminidase__InfluenzaB__AFH58517
augcugcccagcaccauccagacccugacccuguuccugaccagcggcggcgugcugcugagccuguacgugagcgcccugcugagcuaccugcuguacagcgacauccugcugaaguucagccccaccgagaucaccgcccccaccaugagccuggacugcgccaacgccagcaacgugcaggccgugaacagaagcgccaccaagggcgugaccuuccugcugcccgagcccgaguggaccuaccccagacugagcugccccggcagcaccuuccagaaggcccugcugaucagcccccacagauucggcgagaccaagggcaacagcgccccccugaucaucagagagcccuucaucgccugcggccccaacgagugcaagcacuucgcccugacccacuacgccgcccagcccggcggcuacuacaacggcaccagaggcgacagaaacaagcugagacaccugaucagcgugaagcugggcaagauccccaccguggagaacagcaucuuccacauggccgccuggagcggcagcgccugccacgacggcaaggaguggaccuacaucggcguggacggccccgacaacgacgcccugcugaaggugaaguacggcgaggccuacaccgacaccuaccacagcuacgccaacaagauccugagaacccaggagagcgccugcaacugcaucggcggcaacugcuaccugaugaucaccgacggcagcgccagcggcgugagcgagugcagauuccugaagaucagagagggcagaaucaucaaggagaucuuccccaccggcagagugaagcacaccgaggagugcaccugcggcuucgccagcaacaagaccaucgagugcgccugcagagacaacagcuacaccgccaagagacccuucgugaagcugaacguggagaccgacaccgccgagaucagacugaugugcaccgacaccuaccuggacacccccagacccgacgacggcagcaucaccggccccugcgagagcaacggcgacaagggcagcggcggcaucaagggcggcuucgugcaccagagaauggagagcaagaucggcagaugguacagcagaaccaugagcaagaccgagagaaugggcaugggccuguacgugaaguacgacggcgaccccugggccgacagcgacgcccuggccuucagcggcgugauggugagcaugaaggagcccggcugguacagcuucggcuucgagaucaaggacaagaagugcgacgugcccugcaucggcaucgagauggugcacgacggcggcaaggagaccuggcacagcgccgccaccgccaucuacugccugaugggcagcggcagacugcugugggacaccgugaccggcguggacauggcccuguga

SEQ ID NO: 189049 - RNA, 1401 nt, Artificial Sequence; identical to SEQ ID NO: 188955
  derived and/or modified CDS sequence (opt4) from neuraminidase__InfluenzaB__AFH58528

SEQ ID NO: 189050 - RNA, 1401 nt, Artificial Sequence
  derived and/or modified CDS sequence (opt4) from neuraminidase__InfluenzaB__AFH58539
augcugcccagcaccgugcagacccugacccugcugcugaccagcggcggcgugcugcugagccuguacgugagcgccagccugagcuaccugcuguacagcgacgugcugcugaaguucagcagcaccaagaccaccgcccccaccaugagccuggagugcaccaacgccagcaacgcccagaccgugaaccacagcgccaccaaggagaugaccuuccccccccccgagcccgaguggaccuaccccagacugagcugccagggcagcaccuuccagaaggcccugcugaucagcccccacagauucggcgagaucaagggcaacagcgccccccugaucaucagagagcccuucguggccugcggccccaaggagugcagacacuucgcccugacccacuacgccgcccagcccggcggcuacuacaacggcaccagaaaggacagaaacaagcugagacaccuggugagcgugaagcugggcaagauccccaccguggagaacagcaucuuccacauggccgccuggagcggcagcgccugccacgacggcagagaguggaccuacaucggcguggacggccccgacaacgacgcccuggugaagaucaaguacggcgaggccuacaccgacaccuaccacagcuacgcccacaacauccugagaacccaggagagcgccugcaacugcaucggcggcgacugcuaccugaugaucaccgacggcagcgccagcggcaucagcaagugcagauuccugaagaucagagagggcagaaucaucaaggagauccugcccaccggcagaguggagcacaccgaggagugcaccugcggcuucgccagcaacaagaccaucgagugcgccugcagagacaacagcuacaccgccaagagacccuucgugaagcugaacguggagaccgacaccgccgagaucagacugaugugcaccaagaccuaccuggacacccccagacccgacgacggcagcaucgccggccccugcgagagcaacggcgacaaguggcugggcggcaucaagggcggcuucgugcaccagagaauggccagcaagaucggcagaugguacagcagaaccaugagcaagaccaacagaaugggcauggagcuguacgugaaguacgacggcgaccccuggaccgacagcgacgcccugacccugagcggcgugauggugagcaucgaggagcccggcugguacagcuucggcuucgagaucaaggacaagaagugcgacgugcccugcaucggcaucgagauggugcacgacggcggcaaggacaccuggcacagcgccgccaccgccaucuacugccugaugggcagcggccagcugcugugggacaccgccaccggcguggacauggcccuguga

SEQ ID NO: 189051 - RNA, 1401 nt, Artificial Sequence
  derived and/or modified CDS sequence (opt4) from neuraminidase__InfluenzaB__AFH58550
augcugcccagcaccauccagacccugacccuguuccugaccagcggcggcgugcugcugagccuguacgugagcgccagccugagcuaccugcuguacagcgacauccugcugaaguucagccccaccgagaucaccgcccccaccaugccccuggacugcgccaacgccagcaacgugcaggccgugaacagaagcgccaccaaggagaugacccugcugcugcccgagcccgaguggaccuaccccagacugagcugccccggcagcaccuuccagaaggcccugcugaucagcccccacagauucggcgagaccagaggcaacagcgccccccugaccaucagagagcccuucaucgccugcggccccaaggagugcaagcacuucgcccugacccacuacgccgcccagcccggcggcuacuacaacggcaccagagaggacagaaacaagcugagacaccugaucagcgugaagcugggcaagauccccaccguggagaacagcaucuuccacauggccgccuggagcggcagcgccugccacgacggcagagaguggaccuacaucggcguggacggccccgacagcaacgcccugaucaagaucaaguacggcgaggccuacaccgacaccuaccacagcuacgccaacaacauccugagaacccaggagagcgccugcaacugcaucggcggcgacugcuaccugaugaucaccgacggcagcgccagcggcaucagcaagugcagauuccugaagaucagagagggcagaaucaucaaggagaucuuccccaccggcagaguggagcacaccgaggagugcaccugcggcuucgccagcaacaagaccaucgagugcgccugcagagacaacagcuacaccgccaagagacccuucgugaagcugaacguggagaccgacaccgccgagaucagacugaugugcaccgagaccuaccuggacacccccagacccgacgacggcagcaucaccggccccugcgagagcaacggcgacaagggcagaggcggcaucaagggcggcuucgugcaccagagaauggccagcaagaucggcagaugguacagcagaaccaugagcaagaccgagagaaugggcauggagcuguacgugaaguacgacggcgaccccuggaccgacagcgaggcccuggcccccagcggcgugauggugagcauggaggagcccggcugguacagcuucggcuucgagaucaaggacaagaagugcgacgugcccugcaucggcaucgagauggugcacgacggcggcaagaagaccuggcacagcgccgccaccgccaucuacugccugaugggcagcggccagcugcugugggacaccgugaccggcguggacauggcccuguga

SEQ ID NO: 189052 - RNA, 1401 nt, Artificial Sequence; identical to SEQ ID NO: 189051
  derived and/or modified CDS sequence (opt4) from neuraminidase__InfluenzaB__AFH58561

SEQ ID NO: 189053 - RNA, 1401 nt, Artificial Sequence
  derived and/or modified CDS sequence (opt4) from neuraminidase__InfluenzaB__AFJ69969
augcugcccagcaccauccagacccugacccuguuccugaccagcggcggcgugcugcugagccuguacgugagcgccagccugagcuaccugcuguacagcgacauccugcugaaguucagccccaccgagaucaccgcccccaccaugccccuggacugcgccaacgccagcaacgugcaggccgugaacagaagcgccaccaagggcgugacccugcugcugcccgagcccgaguggaccuaccccagacugagcugccccggcagcaccuuccagaaggcccugcugaucagcccccacagauucggcgagaccaagggcaacagcgccccccugaucaucagagagcccuucaucgccugcggccccaacgagugcaagcacuucgcccugacccacuacgccgcccagcccggcggcuacuacaacggcaccagaggcgacagaaacaagcugagacaccugaucagcgugaagcugggcaagauccccaccguggagaacagcaucuuccacauggccgccuggagcggcagcgccugccacgacggcaaggaguggaccuacaucggcguggacggccccgacaacaacgcccugcugaaggugaaguacggcgaggccuacaccgacaccuaccacagcuacgccaacaagauccugagaacccaggagagcgccugcaacugcaucggcggcaacugcuaccugaugaucaccgacggcagcgccagcggcgugagcgagugcagauuccugaagaucagagagggcagaaucaucaaggagaucuuccccaccggcagagugaagcacaccgaggagugcaccugcggcuucgccagcaacaagaccaucgagugcgccugcagagacaacagcuacaccgccaagagacccuucgugaagcugaacguggagaccgacaccgccgagaucagacugaugugcaccgacaccuaccuggacacccccagacccaacgacggcagcaucaccggccccugcgagagcaacggcgacaagggcagcggcggcaucaagggcggcuucgugcaccagagaauggagagcaagaucggcagaugguacagcagaaccaugagcaagaccgagagaaugggcaugggccuguacgugaaguacgacggcgaccccuggaccgacagcgacgcccuggccuucagcggcgugauggugagcaugaaggagcccggcugguacagcuucggcuucgagaucaaggacaagaagugcgacgugcccugcaucggcaucgagauggugcacgacggcggcaaggagaccuggcacagcgccgccaccgccaucuacugccugaugggcagcggccagcugcugugggacaccgugaccggcguggacauggcccuguga

SEQ ID NO: 189054 - RNA, 1401 nt, Artificial Sequence; identical to SEQ ID NO: 189016
  derived and/or modified CDS sequence (opt4) from neuraminidase__InfluenzaB__AFJ69971

SEQ ID NO: 189055 - RNA, 1401 nt, Artificial Sequence
  derived and/or modified CDS sequence (opt4) from neuraminidase__InfluenzaB__AFJ69973
augcugcccagcaccauccagaugcugacccuguuccugaccagcggcggcgugcugcugagccuguacgugagcgccagccugagcuaccugcuguacagcgacauccugcugaaguucagccccaccgagaucaccgcccccaccaugccccuggacugcgccaacgccagcaacgugcacgccgugaacagaagcgccaccaagggcgugaccuuccugcugcccgagcccgaguggaccuaccccagacugagcugccccggcagcaccuuccagaaggcccugcugaucagcccccacagauucggcgagaccaagggcaacagcgccccccugaucaucagagagcccuucaucgccugcggccccaacgagugcaagcacuucgcccugacccacuacgccgcccagcccggcggcuacuacaacggcaccagaggcgacagaaacaagcugagacaccugaucagcgugaagcugggcaagauccccaccguggagaacagcaucuuccacauggccgccuggagcggcagcgccugccacgacggcaaggaguggaccuacaucggcguggacggccccgacaacaacgcccugcugaagaucaaguacggcgaggccuacaccgacaccuaccacagcuacgccaacaacauccugagaacccaggagagcgccugcaacugcaucggcggcaacugcuaccugaugaucaccgacggcagcgccagcggcgugagcgccugcagauuccugaagaucagagagggcagaaucaucaaggagaucuuccccaccggcagagugaagcacaccgaggagugcaccugcggcuucgccagcaacaagaccaucgagugcgccugcagagacaacagcuacaccgccaagagacccuucgugaagcugaacguggagaccgacaccgccgagaucagacugaugugcaccgacaccuaccuggacacccccagacccgacgacggcagcaucaccggccccugcgagagcaacggcgacaagggcagcggcggcaucaagggcggcuucgugcaccagagaauggccagcaagaucggcagaugguacagcagaaccaugagcaagaccgagagaaagggcaugggccuguacgugaaguacgacggcgaccccuggaccgacagcgacgcccuggccuucagaggcgugauggugagcaugaaggagcccggcugguacagcuucggcuucgagaucaaggacaagaagugcgacgugcccugcaucggcaucgagauggugcacgacggcggcaaggagaccuggcacagcgccgccaccgccaucuacugccugaugggcagcggccagcugcugugggacaccgugaccggcguggacauggcccuguga

SEQ ID NO: 189056 - RNA, 1401 nt, Artificial Sequence; identical to SEQ ID NO: 188877
  derived and/or modified CDS sequence (opt4) from neuraminidase__InfluenzaB__AFJ69975

SEQ ID NO: 189057 - RNA, 1401 nt, Artificial Sequence
  derived and/or modified CDS sequence (opt4) from neuraminidase__InfluenzaB__AFJ69979
augcugcccagcaccauccagacccugacccuguuccugaccagcggcggcgugcugcugagccuguacgugagcgccagccugagcuaccugcuguacagcgacauccugcugaaguucagccccaccgagaucaccgcccccaccaugccccuggacugcgccaacaccagcaacgugcaggccgugaaccacagcgccaccaagggcgugacccugcugcugcccgagcccgaguggaccuaccccagacugagcugccccggcagcaccuuccagaaggcccugcugaucagcccccacagauucggcgagaccaagggcaacagcgccccccugaucaucagagagcccuucaucgccugcggccccaacgagugcaagcacuucgcccugacccacuacgccgcccagcccggcggcuacuacaacggcaccagaggcgacagaaacaagcugagacaccugaucagcgugaagcugggcaagauccccaccguggagaacagcaucuuccacauggccgccuggagcggcagcgccugccacgacggcaaggaguggaccuacaucggcguggacggccccgacaacaacgcccugcugaaggugaaguacggcgaggccuacaccgacaccuaccacagcuacgccaacaagauccugagaacccaggagagcgccugcaacugcaucggcggcaacugcuaccugaugaucaccgacggcagcgccagcggcgugagcgagugcagauuccugaagaucagagagggcagaaucaucaaggagaucuuccccaccggcagagugaagcacaccgaggagugcaccugcggcuucgccagcaacaagaccaucgagugcgccugcagagacaacagcuacaccgccaagagacccuucgugaagcugaacguggagaccgacaccgccgagaucagacugaugugcaccgacaccuaccuggacacccccagacccgacgacggcagcaucaccggccccugcgagagcaacggcgacaagggcagcggcggcaucaagggcggcuucgugcaccagagaauggagagcaagaucggcagaugguacagcagaaccaugagcaagaccgagagaaugggcaugggccuguacgugaaguacgacggcgaccccugggccgacagcgacgcccuggccuucagcggcgugauggugagcaugaaggagcccggcugguacagcuucggcuucgagaucaaggacaagaagugcgacgugcccugcaucggcaucgagauggugcacgacggcggcaaggagaccuggcacagcgccgccaccgccaucuacugccugaugggcagcggccagcugcugugggacaccgugaccggcguggacauggcccuguga

SEQ ID NO: 189058 - RNA, 1401 nt, Artificial Sequence; identical to SEQ ID NO: 189016
  derived and/or modified CDS sequence (opt4) from neuraminidase__InfluenzaB__AFJ69981

SEQ ID NO: 189059 - RNA, 1401 nt, Artificial Sequence
  derived and/or modified CDS sequence (opt4) from neuraminidase__InfluenzaB__AFJ69983
augcugcccagcaccauccagaugcugacccuguuccugaccagcggcggcgugcugcugagccuguacgugagcgccagccugagcuaccugcuguacagcgacauccugcugaaguucagccccaccgagaucaccgcccccaccaugccccuggacugcgccaacgccagcaacgugcacgccgugaacagaagcgccaccaagggcgugaccuuccugcugcccgagcccgaguggaccuaccccagacugagcugccccggcagcaccuuccagaaggcccugcugaucagcccccacagauucggcgagaccaagggcaacagcgccccccugaucaucagagagcccuucaucgccugcggccccaacgagugcaagcacuucgcccugacccacuacgccgcccagcccggcggcuacuacaacggcaccagaggcgacagaaacaagcugagacaccugaucagcgugaagcugggcaagauccccaccguggagaacagcaucuuccacauggccgccuggagcggcagcgccugccacgacggcaaggaguggaccuacaucggcguggacggccccgacaacaacgcccugcugaagaucaaguacggcgaggccuacaccgacaccuaccacagcuacgccaacaacauccugagaacccaggagagcgccugcaacugcaucggcggcaacugcuaccugaugaucaccgacggcagcgccagcggcgugagcgagugcagauuccugaagaucagagagggcagaaucaucaaggagauccugcccaccggcagagugaagcacaccgaggagugcaccugcggcuucgccagcaacaagaccaucgagugcgccugcagagacaacagcuacaccgccaagagacccuucgugaagcugaacguggagaccgacaccgccgagaucagacugaugugcaccgacaccuaccuggacacccccagacccgacgacggcagcaucaccggccccugcgagagcaacggcggcaagggcagcggcggcaucaagggcggcuucgugcaccagagaauggccagcaagaucggcagaugguacagcagaaccaugagcaagaccgagagaaagggcaugggccuguacgugaaguacgacggcgaccccuggaccgacagcgacgcccuggccuucagaggcgugauggugagcaugaaggagcccggcugguacagcuucggcuucgagaucaaggacaagaagugcgacgugcccugcaucggcaucgagauggugcacgacggcggcaaggagaccuggcacagcgccgccaccgccaucuacugccugaugggcagcggccagcugcugugggacaccgugaccggcguggacauggcccuguga

SEQ ID NO: 189060 - RNA, 1401 nt, Artificial Sequence
  derived and/or modified CDS sequence (opt4) from neuraminidase__InfluenzaB__AFJ69987
augcugcccagcaccauccagacccugacccuguuccugaccagcggcggcgugcugcugagccuguacgugagcgccagccugagcuaccugcuguacagcgacauccugcugaaguucagccccaccgagaucaccgcccccaccaugccccuggacugcgccaacgccagcaacgugcaggccgugaacagaagcgccaccaagggcgugacccugcugcugcccgagcccgaguggaccuaccccagacugagcugccccggcagcaccuuccagaaggcccugcugaucagcccccacagauucggcgagaccaagggcaacagcgccccccugaucaucagagagcccuucaucgccugcggccccaacgagugcaagcacuucgcccugacccacuacgccgcccagcccggcggcuacuacaacggcaccagaggcgacagaaacaagcugagacaccugaucagcgugaagcugggcaagauccccaccguggagaacagcaucuuccacauggccgccuggagcggcagcgccugccacgacggcaaggaguggaccuacaucggcguggacggccccgacaacaacgcccugcugaaggugaaguacggcgaggccuacaccgacaccuaccacagcuacgccaacaagauccugagaacccaggagagcgccugcaacugcaucggcggcaacugcuaccugaugaucaccgacggcagcgccagcggcgugagcgagugcagauuccugaagaucagagagggcagaaucaucaaggagaucuuccccaccggcagagugaagcacaccgaggagugcaccugcggcuucgccagcaacaagaccaucgagugcgccugcagagacaacagauacaccgccaagagacccuucgugaagcugaacguggagaccgacaccgccgagaucagacugaugugcaccgacaccuaccuggacacccccagacccaacgacggcagcaucaccggccccugcgagagcgacggcgacaagggcagcggcggcaccaagggcggcuucgugcaccagagaaugaagagcaagaucggcagaugguacagcagaaccaugagcaagaccgagagaaugggcaugggccuguacgugaaguacgacggcgaccccugggccgacagcgacgcccugaccuucagcggcgugauggugagcaugaaggagcccggcugguacagcuucggcuucgagaucaaggacaagaagugcgacgugcccugcaucggcaucgagauggugcacgacggcggcaaggagaccuggcacagcgccgccaccgccaucuacugccugaugggcagcggccagcugcugugggacaccgugaccggcguggacauggcccuguga

SEQ ID NO: 189061 - RNA, 1401 nt, Artificial Sequence
  derived and/or modified CDS sequence (opt4) from neuraminidase__InfluenzaB__AFJ76228
augcugcccagcaccauccagacccugacccuguuccugaccagcggcggcgugcugcugagccuguacgugagcgccagccugagcuaccugcuguacagcggcauccugcugaaguucagccccaccgagaucaccgcccccaccaugccccugaacugcgccaacgccagcaacgugcaggccgugaacagaagcgccaccaagggcgugacccugcugcugcccgagcccgaguggaccuaccccagacugagcugccccggcagcaccuuccagaaggcccugcugaucagcccccacagauucggcgagaccaagggcaacagcgccccccugaucaucagagagcccuucaucgccugcggccccaaggagugcaagcacuucgcccugacccacuacgccgcccagcccggcggcuacuacaacggcaccagagaggacagaaacaagcugagacaccugaucagcgugaagcugggcaagauccccaccguggagaacagcaucuuccacauggccgccuggagcggcagcgccugccacgacggcagagaguggaccuacaucggcguggacggccccgacagcaacgcccugcugaagaucaaguacggcgaggccuacaccgacaccuaccacagcuacgccaacaacauccugagaacccaggagagcgccugcaacugcaucggcggcgacugcuaccugaugaucaccgacggcagcgccagcggcaucagcgagugcagauuccugaagaucagagagggcagaaucaucaaggagaucuuccccaccggcagaguggagcacaccgaggagugcaccugcggcuucgccagcaacaagaccaucgagugcgccugcagagacaacagcuacaccgccaagagacccuucgugaagcugaacguggagaccgacaccgccgagaucagacugaugugcaccgagaccuaccuggacacccccagacccgacgacggcagcaucaccggccccugcgagagcaacggcgacaagggcagcggcggcaucaagggcggcuucgugcaccagagaauggccagcaagaucggcagaugguacagcagaaccaugagcaagaccaagagaaugggcaugggccuguacgugaaguacgacggcgaccccuggaucgacagcgacgcccugacccugagcggcgugauggugagcauggaggagcccggcugguacagcuucggcuucgagaucaaggacaagaagugcgacgugcccugcaucggcaucgagauggugcacgacggcggcaagaagaccuggcacagcgccgccaccgccaucuacugccugaugggcagcggccagcugcugugggacaccgugaccggcguggacauggcccuguga

SEQ ID NO: 189062 - RNA, 1401 nt, Artificial Sequence; identical to SEQ ID NO: 188728
  derived and/or modified CDS sequence (opt4) from neuraminidase__InfluenzaB__AFJ76261

SEQ ID NO: 189063 - RNA, 1401 nt, Artificial Sequence
  derived and/or modified CDS sequence (opt4) from neuraminidase__InfluenzaB__AFJ76283
augcugcccagcaccauccagacccugacccuguuccugaccagcggcggcgugcugcugagccuguacgugagcgccagccugagcuaccugcuguacagcgacauccugcugaaguucccccccaccgagaucaccgcccccaccaugccccuggacugcgccaacgccagcaacgugcaggccgugaacagaagcgccaccaagggcgugacccugcugcugcccgagcccgaguggaccuaccccagacugagcugccccggcagcaccuuccagaaggcccugcugaucagcccccacagauucggcgagaccaagggcaacagcgccccccugaucaucagagagcccuucaucgccugcggccccaaggagugcaagcacuucgcccugacccacuacgccgcccagcccggcggcuacuacaacggcaccagaggcgacagaaacaagcugagacaccugaucagcgugaagcugggcaagauccccaccguggagaacagcaucuuccacauggccgccuggagcggcagcgccugccacgacggcaaggaguggaccuacaucggcguggacggccccgacaacaacgcccugcugaagaucaaguacggcgaggccuacaccgacaccuaccacagcuacgccaacaacauccugagaacccaggagagcgccugcaacugcaucggcggcaacugcuaccugaugaucaccgacggcagcgccagcggcgugagcgagugcagauuccugaagaucagagagggcagaaucaucaaggagaucuuccccaccggcagaaucaagcacaccgaggagugcaccugcggcuucgccagcaacaagaccaucgagugcgccugcagagacaacagcuacaccgccaagagacccuucgugaagcugaacguggagaccgacaccgccgagaucagacugaugugcaccgagaccuaccuggacacccccagacccgacgacggcagcaucaccggccccugcgagagcaacggcgacaagggcagcggcggcaucaagggcggcuucgugcaccagagaauggccagcaagaucggcagaugguacagcagaaccaugagcaagaccgagagaaugggcaugggccuguacgugaaguacgacggcgaccccugggccgacagcgacgcccugaccuucagcggcgugauggugagcauggaggagcccggcugguacagcuucggcuucgagaucaaggacaagaagugcgacgugcccugcaucggcaucgagauggugcacgacggcggcaaggagaccuggcacagcgccgccaccgccaucuacugccugaugggcagcggccagcugcugugggacaccgugaccggcgugaacauggcccuguga

SEQ ID NO: 189064 - RNA, 1401 nt, Artificial Sequence
  derived and/or modified CDS sequence (opt4) from neuraminidase__InfluenzaB__AFJ76305
augcugcccagcaccauccagacccugacccuguuccugaccagcggcggcgugcugcugagccuguacgugagcgccagccugagcuaccugcuguacagcgacauccugcugaaguuccccagcaccgagaucaccgcccccaccaugccccuggacugcgccaacgccagcaacgugcaggccgugaacagaagcgccaccaagggcgugacccugcugcugcccgagcccgaguggaccuaccccagacugagcugccccggcagcaccuuccagagagcccugcugaucagcccccacagauucggcgagaccaagggcaacagcgccccccugaucaucagagagcccuucaucgccugcggccccaaggagugcaagcacuucgcccugacccacuacgccgcccagcccggcggcuacuacaacggcaccagaggcgacagaaacaagcugagacaccugaucagcgugaagcugggcaagauccccaccguggagaacagcaucuuccacauggccgccuggagcggcagcgccugccacgacggcaaggaguggaccuacaucggcguggacggccccgacaacaacgcccugcugaagaucaaguacggcgaggccuacaccgacaccuaccacagcuacgccaacaacauccugagaacccaggagagcgccugcaacugcaucggcggcaacugcuaccugaugaucaccgacggcagcgccagcggcgugagcgagugcagauuccugaagaucagagagggcagaaucaucaaggagaucuuccccaccggcagaaucaagcacaccgaggagugcaccugcggcuucgccagcaacaagaccaucgagugcgccugcagagacaacagcuacaccgccaagagacccuucgugaagcugaacguggagaccgacaccgccgagaucagacugaugugcaccgagaccuaccuggacacccccagacccgacgacggcagcaucaccggccccugcgagagcaacggcgacaagggcagcggcggcaucaagggcggcuucgugcaccagagaauggccagcaagaucggcagaugguacagcagaaccaugagcaagaccgagagaaugggcaugggccuguacgugaaguacgacggcgaccccugggccgacagcgacgcccugaccuucagcggcgugauggugagcauggaggagcccggcugguacagcuucggcuucgagaucaaggacaagaagugcgacgugcccugcaucggcaucgagauggugcacgacggcggcaaggagaccuggcacagcgccgccaccgccaucuacugccugaugggcagcggccagcugcugugggacaccgugaccggcguggacauggcccuguga

SEQ ID NO: 189065 - RNA, 1401 nt, Artificial Sequence
  derived and/or modified CDS sequence (opt4) from neuraminidase__InfluenzaB__AFJ76316
augcugcccagcaccauccagacccugacccuguuccugaccagcggcggcgugcugcugagccuguacgugagcgccagccugagcuaccugcuguacagcgacauccugcugaaguuccccagcaccgagaucaccgcccccaccaugccccuggacugcgccaacgccagcaacgugcaggccgugaacagaagcgccaccaagggcgugacccugcugcugcccgagcccgaguggaccuaccccagacugagcugccccggcagcaccuuccagaaggcccugcugaucagcccccacagauucggcgagaccaagggcaacagcgccccccugaucaucagagagcccuucaucgccugcggccccaaggagugcaagcacuucgcccugacccacuacgccgcccagcccggcggcuacuacaacggcaccagaggcgacagaaacaagcugagacaccugaucagcgugaagcugggcaagauccccaccguggagaacagcaucuuccacauggccgccuggagcggcagcgccugccacgacggcaaggaguggaccuacaucggcguggacggccccgacaacaacgcccugcugaagaucaaguacggcgaggccuacaccgacaccuaccacagcuacgccaacaacauccugagaacccaggagagcgccugcaacugcaucggcggcaacugcuaccugaugaucaccgacggcagcgccagcggcgugagcgagugcagauuccugaagaucagagagggcagaaucaucaaggagaucuuccccaccggcagaaucaagcacaccgaggagugcaccugcggcuucgccagcaacaagaccaucgagugcgccugcagagacaacagcuacaccgccaagagacccuucgugaagcugaacguggagaccgacaccgccgagaucagacugaugugcaccgagaccuaccuggacacccccagacccgacgacggcagcaucaccggccccugcgagagcaacggcgacaagggcagcggcggcaucaagggcggcuucgugcaccagagaauggccagcaagaucggcagaugguacagcagaaccaugagcaagaccgagagaaugggcaugggccuguacgugaaguacgacggcgaccccugggccgacagcgacgcccugaccuucagcggcgugauggugagcauggaggagcccggcugguacagcuucggcuucgagaucaaggacaagaagugcgacgugcccugcaucggcaucgagauggugcacgacggcggcaaggagaccuggcacagcgccgccaccgccaucuacugccugaugggcagcggccagcugcugugggacaccgugaccggcgugaacauggcccuguga

SEQ ID NO: 189066 - RNA, 1401 nt, Artificial Sequence; identical to SEQ ID NO: 188728
  derived and/or modified CDS sequence (opt4) from neuraminidase__InfluenzaB__AFJ76338

SEQ ID NO: 189067 - RNA, 1401 nt, Artificial Sequence
  derived and/or modified CDS sequence (opt4) from neuraminidase__InfluenzaB__AFJ77331
augcugcccagcaccauccagacccugacccuguuccugaccagcggcggcgugcugcugagccuguacgugagcgccagccugagcuaccugcuguacagcgacauccugcugaaguucagccagaccgagaucaccgcccccaucaugccccuggacugcgccaacgccagcaacgugcaggccgugaaccacagcgccgccaagggcgugacccugcugcugcccgagcccgaguggaccuaccccagacugagcugccccggcagcaccuuccagaaggcccugcugaucagcccccacagauucggcgagaccaagggcaacagcgccccccugaucaucagagagcccuucaucgccugcggccccaccgagugcaagcacuucgcccugacccacuacgccgcccagcccggcggcuacuacaacggcaccagagaggacagaaacaagcugagacaccugaucagcgugaagcugggcaagauccccaccguggagaacagcaucuuccacauggccgccuggagcggcagcgccugccacgacggcaaggaguggaccuacaucggcguggacggccccgacagcaacgcccugcugaagaucaaguacggcgaggccuacaccgacaccuaccacagcuacgccaagaacauccugagaacccaggagagcgccuacaacugcaucggcggcgacugcuaccugaugaucaccgacggccccgccagcggcaucagcgagugcagauuccugaagaucagagagggcagaaucaucaaggagaucuuccccaccggcagagugaagcacaccgaggagugcaccugcggcuucgccagcaacaagaccaucgagugcgccugcagagacaacagcuacaccgccaagagacccuucgugaagcugaacguggagaccgacaccgccgagaucagacugaugugcaccgagaccuaccuggacacccccagacccaacgacggcagcaucaccggccccugcgagagcgacggcgacaagggcagcggcggcaucaagggcggcuucgugcaccagagaauggccagcaagaucggcagaugguacagcagaaccaugagcaagaccaagagaaugggcaugggccuguacgugaaguacgacggcgaccccuggaccgacagcgaggcccuggcccugagcggcgugauggugagcauggaggagcccggcugguacagcuucggcuucgagaucaaggacaagaagugcgacgugcccugcaucggcaucgagauggugcacgacggcggcaagaccaccuggcacagcgccgccaccgccaucuacugccugaugggcagcggccagcugcugugggacaccgugaccggcguggacauggcccuguga

SEQ ID NO: 189068 - RNA, 1401 nt, Artificial Sequence; identical to SEQ ID NO: 188803
  derived and/or modified CDS sequence (opt4) from neuraminidase__InfluenzaB__AFJ77351

SEQ ID NO: 189069 - RNA, 1401 nt, Artificial Sequence; identical to SEQ ID NO: 188695
  derived and/or modified CDS sequence (opt4) from neuraminidase__InfluenzaB__AFJ77362

SEQ ID NO: 189070 - RNA, 1401 nt, Artificial Sequence; identical to SEQ ID NO: 188848
  derived and/or modified CDS sequence (opt4) from neuraminidase__InfluenzaB__AFJ77384

SEQ ID NO: 189071 - RNA, 1401 nt, Artificial Sequence; identical to SEQ ID NO: 188770
  derived and/or modified CDS sequence (opt4) from neuraminidase__InfluenzaB__AFJ80132

SEQ ID NO: 189072 - RNA, 1401 nt, Artificial Sequence
  derived and/or modified CDS sequence (opt4) from neuraminidase__InfluenzaB__AFJ80143
augcugcccagcaccauccagacccugacccuguuccugaccagcggcggcgugcugcugagccuguacgugagcgccagccugagcuaccugcuguacagcgacauccugcugaaguucagccccaccgagaucaccgcccccaccaugccccuggacugcgccaacgccagcaacgugcaggccgugaacagaagcgccaccaagggcgugacccugcugcugcccgagcccgaguggaccuaccccagacugagcugccccggcagcaccuuccagaaggcccugcugaucagcccccacagauucggcgagaccaagggcaacagcgccccccugaucaucagagagcccuucaucgccugcggccccaaggagugcaagcacuucgcccugacccacuacgccgcccagcccggcggcuacuacaacggcaccagagaggacagaaacaagcugagacaccugaucagcgugaagcugggcaagauccccaccguggagaacagcaucuuccacauggccgccuggagcggcagcgccugccacgacggcagagaguggaccuacaucggcguggacggccccgacagcaacgcccugcugaagaucaaguacggcgaggccuacaccgacaccuaccacagcuacgccaacaacauccugagaacccaggagagcgccugcaacugcaucggcggcaacugcuaccugaugaucaccgacggcagcgccagcggcaucagcgagugcagauuccugaagaucagagagggcagaaucaucaaggagaucuuccccaccggcagaguggagcacaccgaggagugcaccugcggcuucgccagcaacaagaccaucgagugcgccugcagagacaacagcuacaccgccaagagacccuucgugaagcugaacguggagaccgacaccgccgagaucagacugaugugcaccgagaccuaccuggacacccccagacccgacgacggcagcaucaccggccccugcgagagcaacggcgacaagggcagcggcggcaucaagggcggcuucgugcaccagagaauggccagcaagaucggcagaugguacagcagaaccaugagcaagaccaagagaaugggcaugggccuguacgugaaguacgacggcgaccccuggaccgacagcgacgcccuggcccugagcggcgugauggugagcauggaggagcccggcugguacagcuucggcuucgagaucaaggacaagaagugcgacgugcccugcaucggcaucgagauggugcacgacggcggcaagaagaccuggcacagcgccgccaccgccaucuacugccugaugggcagcggccagcugcugugggacaccgugaccggcguggacauggcccuguga

SEQ ID NO: 189073 - RNA, 1401 nt, Artificial Sequence
  derived and/or modified CDS sequence (opt4) from neuraminidase__InfluenzaB__AFJ80154
augcugcccagcaccauccagacccugacccuguuccugaccagcggcggcgugcugcugagccuguacgugagcgccagccugagcuaccugcuguacagcgacauccugcugaaguucagccccaccgagaucaccgcccccaccaugccccuggacugcgccaacgccagcaacgugcaggccgugaacagaagcgccaccaagggcgugacccugcugcugcccgagcccgaguggaccuaccccagacugagcugccccggcagcaccuuccagaaggccauccugaucagcccccacagauucggcgagaccaagggcaacagcgccccccugaucaucagagagcccuucaucgccugcggccccaaggagugcaagcacuucgcccugacccacuacgccgcccagcccggcggcuacuacaacggcaccagagaggacagaaacaagcugagacaccugaucagcgugaagcugggcaagauccccaccguggagaacagcaucuuccacauggccgccuggagcggcagcgccugccacgacggcagagaguggaccuacaucggcguggacggccccgacagcaacgcccugcugaagaucaaguacggcgaggccuacaccgacaccuaccacagcuacgccaacaacauccugagaacccaggagagcgccugcaacugcaucggcggcaacugcuaccugaugaucaccgacggcagcgccagcggcaucagcgagugcagauuccugaagaucagagagggcagaaucaucaaggagaucuuccccaccggcagaguggagcacaccgaggagugcaccugcggcuucgccagcaacaagaccaucgagugcgccugcagagacaacagcuacaccgccaagagacccuucgugaagcugaacguggagaccgacaccgccgagaucagacugaugugcaccgagaccuaccuggacacccccagacccgacgacggcagcaucaccggccccugcgagagcaacggcgacaagggcagcggcggcaucaagggcggcuucgugcaccagagaauggccagcaagaucggcagaugguacagcagaaccaugagcaagaccaagagaaugggcaugggccuguacgugaaguacgacggcgaccccuggaccgacagcgacgcccuggcccugagcggcgugauggugagcauggaggagcccggcugguacagcuucggcuucgagaucaaggacaagaagugcgacgugcccugcaucggcaucgagauggugcacgacggcggcaagaagaccuggcacagcgccgccaccgccaucuacugccugaugggcagcggccagcugcugugggacaccgugaccggcguggacauggcccuguga

SEQ ID NO: 189074 - RNA, 1401 nt, Artificial Sequence
  derived and/or modified CDS sequence (opt4) from neuraminidase__InfluenzaB__AFJ80165
augcugcccagcaccauccagacccugacccuguuccugaccagcggcggcgugcugcugagccuguacgugagcgccagccugagcuaccugcuguacagcgacauccugcugaaguucagccccaccgagaucaccgcccccaccaucccccuggacugcgccaacgccagcaacgugcaggccgugaacagaagcgccaccaagggcgugacccugcugcugcccgagcccgaguggaccuaccccagacugagcugccccggcagcaccuuccagaaggcccugcugaucagcccccacagauucggcgagaucaagggcaacagcgccccccugaucaucagagagcccuucaucgccugcggccccaaggagugcaagcacuucgcccugacccacuacgccgcccagcccggcggcuacuacaacggcaccagagaggacagaaacaagcugagacaccugaucagcgugaagcugggcaagauccccaccguggagaacagcaucuuccacauggccgccuggagcggcagcgccugccacgacggcaaggaguggaccuacaucggcguggacggccccgacagcaacgcccugcugaagaucaaguacggcgaggccuacaccgacaccuaccacagcuacgccaacaacauccugagaacccaggagagcgccugcaacugcaucggcggcaacugcuaccugaugaucaccgacggcagcgccagcggcaucagcgagugcagauuccugaagaucagagagggcagaaucaucaaggagaucuuccccaccggcagaguggagcacaccgaggagugcaccugcggcuucgccagcaacaagaccaucgagugcgccugcagagacaacagcuacaccgccaagagacccuucgugaagcugaacguggagaccgacaccgccgagaucagacugaugugcaccgagaccuaccuggacacccccagacccgacgacggcagcaucaccggccccugcgagagcaacggcgacaagggcagcggcggcaucaagggcggcuucgugcaccagagaauggccagcaagaucggcagaugguacagcagaaccaugagcaagaccaagagaaugggcaugggccuguacgugaaguacgacggcgaccccuggaccgacagcgacgcccuggcccugagcggcgugauggugagcauggaggagcccggcugguacagcuucggcuucgagaucaaggacaagaagugcgacauccccugcaucggcaucgagauggugcacgacggcggcaaggagaccuggcacagcgccgccaccgccaucuacugccugaugggcagcggccagcugcugugggacaccgugaccggcguggacauggcccuguga

SEQ ID NO: 189075 - RNA, 1401 nt, Artificial Sequence
  derived and/or modified CDS sequence (opt4) from neuraminidase__InfluenzaB__AFJ80176
augcugcccagcaccauccagacccugacccuguuccugaccagcggcggcgugcugcugagccuguacgugagcgccagccugagcuaccugcuguacagcgacauccugcugaaguucagccccaccgagaucaccgugcccaccaugccccuggacugcgccaacgccagcaacgugcaggccgugaacagaagcgccaccaagggcgugacccugcugcugcccgagcccgaguggaccuaccccagacugagcugccccggcagcaccuuccagaaggcccugcugaucagcccccacagauucggcgagaccaagggcaacagcgccccccugaucaucagagagcccuucaucgccugcggccccaaggagugcaagcacuucgcccugacccacuacgccgcccagcccggcggcuacuacaacggcaccagagaggacagaaacaagcugagacaccugaucagcgugaagcugggcaagauccccaccguggagaacagcaucuuccacauggccgccuggagcggcagcgccugccacgacggcagagaguggaccuacaucggcguggacggccccgacagcaacgcccugcugaagaucaaguacggcgaggccuacaccgacaccuaccacagcuacgccaacaacauccugagaacccaggagagcgccugcaacugcaucggcggcaacugcuaccugaugaucaccgacggcagcgccagcggcaucagcgagugcagauuccugaagaucagagagggcagaaucaucaaggagaucuuccccaccggcagaguggagcacaccgaggagugcaccugcggcuucgccagcaacaagaccaucgagugcgccugcagagacaacagcuacaccgccaagagacccuucgugaagcugaacguggagaccgacaccgccgagaucagacugaugugcaccgagaccuaccuggacacccccagacccgacgacggcagcaucaccggccccugcgagagcaacggcgacaagggcagcggcggcaucaagggcggcuucgugcaccagagaauggccagcaagaucggcagaugguacagcagaaccaugagcaagaccaagagaaugggcaugggccuguacgugaaguacgacggcgaccccuggaccgacagcgacgcccuggcccugagcggcgugauggugagcauggaggagcccggcugguacagcuucggcuucgagaucaaggacaagaagugcgacgugcccugcaucggcaucgagauggugcacgacggcggcaagaagaccuggcacagcgccgccaccgccaucuacugccugaugggcagcggccagcugcugugggacaccgugaccggcguggacauggcccuguga

SEQ ID NO: 189076 - RNA, 1401 nt, Artificial Sequence
  derived and/or modified CDS sequence (opt4) from neuraminidase__InfluenzaB__AFJ80187
augcugcccagcaccauccagacccugacccuguuccugaccagcggcggcgugcugcugagccuguacgugagcgccagccugagcuaccugcuguacagcggcauccugcugaaguucagccccaccgagaucaccgcccccaccaugccccugaacugcgccaacgccagcaacuuccaggccgugaacagaagcgccaccaagggcgugacccugcugcugcccgagcccgaguggaccuaccccagacugagcugccccggcagcaccuuccagaaggcccugcugaucagcccccacagauucggcgagaccaagggcaacagcgccccccugaucaucagagagcccuucaucgccugcggccccaaggagugcaagcacuucgcccugacccacuacgccgcccagcccggcggcuacuacaacggcaccagagaggacagaaacaagcugagacaccugaucagcgugaagcugggcaagauccccaccguggagaacagcaucuuccacauggccgccuggagcggcagcgccugccacgacggcagagaguggaccuacaucggcguggacggccccgacagcaacgcccugcugaagaucaaguacggcgaggccuacaccgacaccuaccacagcuacgccaacaacauccugagaacccaggagagcgccugcaacugcaucggcggcgacugcuaccugaugaucaccgacggcagcgccagcggcaucagcgagugcagauuccugaagaucagagagggcagaaucaucaaggagaucuuccccaccggcagaguggagcacaccgaggagugcaccugcggcuucgccagcaacaagaccaucgagugcgccugcagagacaacagcuacaccgccaagagacccuucgugaagcugaacguggagaccgacaccgccgagaucagacugaugugcaccgagaccuaccuggacacccccagacccgacgacggcagcaucaccggccccugcgagagcaacggcgacaagggcagcggcggcaucaagggcggcuucgugcaccagagaauggccagcaagaucggcagaugguacagcagaaccaugagcaagaccaagagaaugggcaugggccuguacgugaaguacgacggcgaccccuggaucgacagcgacgcccugacccugagcggcgugauggugagcauggaggagcccggcugguacagcuucggcuucgagaucaaggacaagaagugcgacgugcccugcaucggcaucgagauggugcacgacggcggcaagaagaccuggcacagcgccgccaccgccaucuacugccugaugggcagcggccagcugcugugggacaccgugaccggcguggacauggcccuguga

SEQ ID NO: 189077 - RNA, 1401 nt, Artificial Sequence; identical to SEQ ID NO: 189072
  derived and/or modified CDS sequence (opt4) from neuraminidase__InfluenzaB__AFJ80198

SEQ ID NO: 189078 - RNA, 1401 nt, Artificial Sequence; identical to SEQ ID NO: 188700
  derived and/or modified CDS sequence (opt4) from neuraminidase__InfluenzaB__AFJ80220

SEQ ID NO: 189079 - RNA, 1401 nt, Artificial Sequence
  derived and/or modified CDS sequence (opt4) from neuraminidase__InfluenzaB__AFJ80231
augcugcccagcaccauccagacccugacccuguuccugaccagcggcggcgugcugcugagccuguacgugagcgccagccugagcuaccugcuguacagcggcauccugcugaaguucagccugaccgagaucaccgcccccaccaugccccugaacugcgccaacgccagcaacgugcaggccgugaacagaagcgccaccaagggcgugacccuguuccugcccgagcccgaguggaccuaccccagacugagcugccccggcagcaccuuccagaaggcccugcugaucagcccccacagauucggcgagaccaagggcaacagcgccccccugaucaucagagagcccuucaucgccugcggccccaaggagugcaagcacuucgcccugacccacuacgccgcccagcccggcggcuacuacaacggcaccagagaggacagaaacaagcugagacaccugaucagcguggagcugggcaagauccccaccguggagaacagcaucuuccacauggccgccuggagcggcagcgccugccacgacggcaaggaguggaccuacaucggcguggacggccccgacagcaacgcccugcugaagaucaaguacggcgaggccuacaccgacaccuaccacagcuacgccaacaacauccugagaacccaggagagcgccugcaacugcaucggcggcgacugcuaccugaugaucaccgacggcagcgccagcggcaucagcgagugcagauuccugaagaucagagagggcagaaucaucaaggagaucuuccccaccggcagaguggagcacaccgaggagugcaccugcggcuucgccagcaacaagaccaucgagugcgccugcagagacaacagcuacaccgccaagagacccuucgugaagcugaacguggagaccgacaccgccgagaucagacugaugugcaccgagaccuaccuggacacccccagacccgacgacggcagcaucaccggccccugcgagagcaacggcgacaagggcagcggcggcaucaagggcggcuucgugcaccagagaauggccagcaagaucggcagaugguacagcagaaccaugagcaagaccaagagaaugggcaugggccuguacgugaaguacgacggcgaccccuggaucgacagcgacgcccugacccugagcggcgugauggugagcauggaggagcccggcugguacagcuucggcuucgagaucaaggacaagaagugcgacgugcccugcaucggcaucgagauggugcacgacggcggcaagaagaccuggcacagcgccgccaccgccaucuacugccugaugggcagcggccagcugcugugggacaccgugaccggcguggacauggcccuguga

SEQ ID NO: 189080 - RNA, 1401 nt, Artificial Sequence
  derived and/or modified CDS sequence (opt4) from neuraminidase__InfluenzaB__AFJ80242
augcugcccagcaccauccagacccugacccuguuccugaccagcggcggcgugcugcugagccuguacgugagcgcccugcugagcuaccugcuguacagcgacauccugcugaaguucagccccaccaaggugaucgcccccaccaugagccuggacugcgccaacgccagcaacgugcaggccgugaaccacagcgccaccgaggagaugaccuuccugcugcccgagcccgaguggaccuaccccagacugagcugccagggcagcaccuuccagaaggcccugcugaucagcccccacagauucggcgaggccaagggcaacagcgccccccugaucaucagagagcccuucaucgccugcggccccaaggagugcaagcacuucgcccugacccacuacgccgcccagcccggcggcuacuacaacggcaccagagaggacagaaacaagcugagacaccugaucagcgugaaccugggcaagauccccaccguggagaacagcaucuuccacauggccgccuggagcggcagcgccugccacgacggcagagaguggaccuacaucggcguggacggccccgacagcaacgcccugaucaagaucaaguacggcgaggccuacaccgacaccuaccacagcuacgccaacaacauccugagaacccaggagagcgccugcaacugcaucggcggcgacugcuaccugaugaucaccgacggcagcgccagcggcaucagcagaugcagauuccugaagaucagagagggcagaaucaucaaggagaucuuccccaccggcagaguggagcacaccgaggagugcaccugcggcuucgccagcaacaagaccaucgagugcgccugcagagacaacagcuacaccgccaagagacccuucgugaagcugaacguggagaccgacaccgccgagaucagacugaugugcaccgagaccuaccuggacacccccagacccgacgacggcagcaucaccggccccugcgagagcaacggcgacaagggcaacggcggcaucaagggcggcuucgugcaccagagaauggccagcagaaucggcagaugguacagcagaaccaugagcaagaccaagagaaugggcauggagcuguacgugaaguacgacggcgaccccuggaccgacagcgacgcccuggcccccagcggcgugauggugagcauggaggagcccggcugguacagcuucggcuucgagaucaaggacaagaagugcgacgugcccugcaucggcaucgagauggugcacgacggcggcaagaccaccuggcacagcgccgccaccgccaucuacugccugaugggcagcggccagcugcugugggacaccgugaccggcguggacauggcccuguga

SEQ ID NO: 189081 - RNA, 1401 nt, Artificial Sequence
  derived and/or modified CDS sequence (opt4) from neuraminidase__InfluenzaB__AFJ80660
augcugcccagcaccauccagacccugacccuguuccugaccagcggcggcgugcugcugagccuguacgugagcgccagccugagcuaccugcuguacagcgacauccugcugaaguucagccccaccgagaucaccgcccccaccaugccccuggacugcgccaacgccagcaacgugcaggccgugaacagaagcgccaccaagggcgugacccugcugcugcccgagcccgaguggaccuaccccagacugagcugccccggcagcaccuuccagaaggcccugcugaucagcccccacagauucggcgagaccaagggcaacagcgccccccugaucaucagagagcccuucaucgccugcggccccaaggagugcaagcacuucgcccugacccacuacgccgcccagcccggcggcuacuacaacggcaccagagaggacagaaacaagcugagacaccugaucagcgugaagcugggcaagauccccaccguggagaacagcaucuuccacauggccgccuggagcggcagcgccugccacgacggcagagaguggaccuacaucggcguggacggccccgacagcaacgcccugcugaagaucaaguacggcgaggccuacaccgacaccuaccacagcuacgccaacaacauccugagaacccaggagagcgccugcaacugcaucggcggcgacugcuaccugaugaucaccgacggcagcgccagcggcaucagcgagugcagauuccugaagaucagagagggcagaaucaucaaggagaucuuccccaccggcagaguggagcacaccgaggagugcaccugcggcuucgccagcaacaagaccaucgagugcgccugcagagacaacagcuacaccgccaagagacccuucgugaagcugaacguggagaccgacaccgccgagaucagacugaugugcaccgagaccuaccuggacacccccagacccgacgacggcagcaucaccggccccugcgagagcaacggcgacaagggcagcggcggcaucaagggcggcuucgugcaccagagaaugaccagcaagaucggcagaugguacagcagaaccaugagcaagaccaagagaaugggcaugggccuguacgugaaguacgacggcgaccccuggaccgacagcgacgcccuggcccugagcggcgugauggugagcauggaggagcccggcugguacagcuucggcuucgagaucaaggacaagaagugcgacgugcccugcaucggcaucgagauggugcacgacggcggcaagaagaccuggcacagcgccgccaccgccaucuacugccugaugggcagcggccagcugcugugggacaccgugaccggcguggacauggcccuguga

SEQ ID NO: 189082 - RNA, 1401 nt, Artificial Sequence; identical to SEQ ID NO: 189079
  derived and/or modified CDS sequence (opt4) from neuraminidase__InfluenzaB__AFJ80671

SEQ ID NO: 189083 - RNA, 1401 nt, Artificial Sequence; identical to SEQ ID NO: 189079
  derived and/or modified CDS sequence (opt4) from neuraminidase__InfluenzaB__AFJ80682

SEQ ID NO: 189084 - RNA, 1401 nt, Artificial Sequence
  derived and/or modified CDS sequence (opt4) from neuraminidase__InfluenzaB__AFJ80693
augcugcccagcaccauccagacccugacccuguuccugaccagcggcggcgugcugcugagccuguacgugagcgccagccugagcuaccugcuguacagcggcauccugcugaaguucagccccaccgagaucaccgcccccaccaugccccugaacugcgccaacgccagcaacgugcaggccgugaacagaagcgccaccaagggcgugacccugcugcugcccgagcccgaguggaccuaccccagacugagcugccccggcagcaccuuccagaaggcccugcugaucagcccccacagauucggcgagaccaagggcaacagcgccccccugaucaucagagagcccuucaucgccugcggccccaaggagugcaagcacuucgcccugacccacuacgccgcccagcccggcggcuacuacaacggcaccagagaggacagaaacaagcugagacaccugaucagcgugaagcugggcaagauccccaccguggagaacagcaucuuccacauggccgccuggagcggcagcgccugccacgacggcagagaguggaccuacaucggcguggacggccccgacagcaacgcccugcugaagaucaaguacggcgaggccuacaccgacaccuaccacagcuacgccaacaacauccugagaacccaggagagcgccugcaacugcaucggcggcgacugcuaccugaugaucaccgacggcagcgccagcggcaucagcgagugcagauuccugaagaucagagagggcagaaucaucaaggagaucuuccccaccggcagaguggagcacaccgaggagugcaccugcggcuucgccagcaacaagaccaucgagugcgccugcagagacaacagcuacaccgccaagagacccuucgugaagcugaacguggagaccgacaccgccgagaucagacugaugugcaccgagaccuaccuggacacccccagacccgacgacggcagcaucaccggccccugcgagagccacggcgacaagggcagcggcggcaucaagggcggcuucgugcaccagagaauggccagcaagaucggcagaugguacagcagaaccaugagcaagaccaagagaaugggcaugggccuguacgugaaguacgacggcgaccccuggaucgacagcggcgcccugacccugagcggcgugauggugagcauggaggagcccggcugguacagcuucggcuucgagaucaaggacaagaagugcgacgugcccugcaucggcaucgagauggugcacgacggcggcaagaagaccuggcacagcgccgccaccgccaucuacugccugaugggcagcggccagcugcugugggacaccgugaccggcguggacauggcccuguga

SEQ ID NO: 189085 - RNA, 1401 nt, Artificial Sequence
  derived and/or modified CDS sequence (opt4) from neuraminidase__InfluenzaB__AFJ80726
augcugcccagcaccauccagacccugacccuguuccugaccagcggcggcgugcugcugagccuguacgugagcgccagccugagcuaccugcuguacagcgacauccugcugaaguucagccagaccgagaucaccgcccccaccaugccccuggacugcgccaacgccagcaacgugcaggccgugaacagaagcgccaccaagggcgugacccugcugcugcccgagcccgaguggaccuaccccagacugagcugccccggcagcaccuuccagaaggcccugcugaucagcccccacagauucggcgagaccaagggcaacagcgccccccugaucaucagagagcccuucaucgccugcggccccaaggagugcaagcacuucgcccugacccacuacgccgcccagcccggcggcuacuacaacggcaccagagaggacagaaacaagcugagacaccugaucagcgugaagcugggcaagauccccaccguggagaacagcaucuuccacauggccgccuggagcggcagcgccugccacgacggcagagaguggaccuacaucggcguggacggccccgacagcaacgcccugcugaagaucaaguacggcgaggccuacaccgacaccuaccacagcuacgccaagaacauccugagaacccaggagagcgccugcaacugcaucggcggcgacugcuaccugaugaucaccgacggcagcgccagcggcaucagcgagugcagauuccugaagaucagagagggcagaaucaucaaggagaucuuccccaccggcagagugaagcacaccgaggagugcaccugcggcuucgccagcaacaagaccaucgagugcgccugcagagacaacagcuacaccgccaagagacccuucgugaagcugaacguggagaccgacaccgccgagaucagacugaugugcaccgagaccuaccuggacacccccagacccaacgacggcagcaucaccggccccugcgagagcaacggcgacagaggcggcggcggcaucaagggcggcuucgugcaccagagaauggccagcaagaucggcagaugguacagcagaaccaugagcaagaccaagagaaugggcaugggccuguacgugaaguacgacggcgaccccuggaccgacagcgaggcccuggcccugagcggcgugauggugcccauggaggagcccggcugguacagcuucggcuucgagaucaaggacaagaagugcgacgugcccugcaucggcaucgagauggugcacgacggcggcaagaccaccuggcacagcgccgccaccgccaucuacugccugaugggcagcggccagcugcugugggacaccgugaccggcguggacauggcccuguga

SEQ ID NO: 189086 - RNA, 1401 nt, Artificial Sequence
  derived and/or modified CDS sequence (opt4) from neuraminidase__InfluenzaB__AFJ80737
augcugcccagcaccauccagacccugacccuguuccugaccagcggcggcgugcugcugagccuguacgugagcgccagccugagcuaccugcuguacagcgacauccugcugaaguucagccagaccgagaucaccgcccccaucaugccccuggacugcgccaacgccagcaacgugcaggccgugaacagaagcgccaccaagggcgugacccugcugcugcccgagcccgaguggaccuaccccagacugagcugccccggcagcaccuuccagaaggcccugcugaucagcccccacagauucggcgagaccaagggcaacagcgccccccugaucaucagagagcccuucaucgccugcggccccaaggagugcaagcacuucgcccugacccacuacgccgcccagcccggcggcuacuacaacggcaccagagaggacagaaacaagcugagacaccugaucagcgugaagcugggcaagauccccaccguggagaacagcaucuuccacauggccgccuggagcggcagcgccugccacgacggcagagaguggaccuacaucggcguggacggccccgacagcaacgcccugcugaagaucaaguacggcgaggccuacaccgacaccuaccacagcuacgccaagaacauccugagaacccaggagagcgccugcaacugcaucagaggcgacugcuaccugaugaucaccgacggccccgccagcggcaucagcgagugcagauuccugaagaucagagagggcagaaucaucaaggagaucuuccccaccggcagagugaagcacaccgaggagugcaccugcggcuucgccagcaacaagaccaucgagugcgccugcagagacaacagcuacaccgccaagagacccuucgugaagcugaacguggagaccgacaccgccgagaucagacugaugugcaccgagaccuaccuggacacccccagacccaacgacggcagcaucaccggccccugcgagagcaacggcgacaagggcagcggcggcaucaagggcggcuucgugcaccagagaauggccagcaagaucggcagaugguacagcagaaccaugagcaagaccaagagaaugggcaugggccuguacgugaaguacgacggcgaccccuggaccgacagcgaggcccuggcccugagcggcgugauggugagcauggaggagcccggcugguacagcuucggcuucgagaucaaggacaagaagugcgacgugcccugcaucggcaucgagauggugcacgacggcggcaagaccaccuggcacagcgccgccaccgccaucuacugccugaugggcagcggccagcugcugugggacaccgugaccggcguggacauggcccuguga

SEQ ID NO: 189087 - RNA, 1401 nt, Artificial Sequence; identical to SEQ ID NO: 188728
  derived and/or modified CDS sequence (opt4) from neuraminidase__InfluenzaB__AFJ80759

SEQ ID NO: 189088 - RNA, 1401 nt, Artificial Sequence
  derived and/or modified CDS sequence (opt4) from neuraminidase__InfluenzaB__AFJ80770
augcugcccagcaccauccagacccugacccuguuccugaccagcggcggcgugcugcugagccuguacgugagcgccagccugagcuaccugcuguacagcgacauccugcugaaguucagccagaccgagaucaccgcccccaccaugccccuggacugcgccaacgccagcaacgugcaggccgugaacagaagcgccaccaagggcgugacccugcugcugcccgagcccgaguggaccuaccccagacugagcugccccggcagcaccuuccagaaggcccugcugaucagcccccacagauucggcgagaccaagggcaacagcgccccccugaucaucagagagcccuucaucgccugcggccccaacgagugcaagcacuucgcccugacccacuacgccgcccagcccggcggcuacuacaacggcaccagagaggacagaaacaagcugagacaccugaucagcgugaagcugggcaagauccccaccguggagaacagcaucuuccacauggccgccuggagcggcagcgccugccacgacggcagagaguggaccuacaucggcguggacggccccgacagcaacgcccugcugaagaucaaguacggcgaggccuacaccgacaccuaccacagcuacgccaagaacauccugagaacccaggagagcgccugcaacugcaucggcggcgacugcuaccugaugaucaccgacggccccgccagcggcaucagcgagugcagauuccugaagaucagagagggcagaaucaucaaggagaucuuccccaccggcagagugaagcacaccgaggagugcaccugcggcuucgccagcaacaagaccaucgagugcgccugcagagacaacagcuacaccgccaagagacccuucgugaagcuggacguggagaccgacaccgccgagaucagacugaugugcaccgagaccuaccuggacacccccagacccaacgacggcagcaucaccggccccugcgagagcaacggcgacaagggcagcggcggcaucaagggcggcuucgugcaccagagaauggccagcaagaucggcagaugguacagcagaacccugagcaagaccaagagaaugggcaugggccuguacgugaaguacgacggcgaccccuggaccgacagcgaggcccuggcccugagcggcgugauggugagcauggaggagcccggcugguacagcuucggcuucgagaucaaggacaagaagugcgacgugcccugcaucggcaucgagauggugcacgacggcggcaagaccaccuggcacagcgccgccaccgccaucuacugccugaugggcagcggccagcugcugugggacaccgugaccggcguggacauggcccuguga

SEQ ID NO: 189089 - RNA, 1401 nt, Artificial Sequence; identical to SEQ ID NO: 188728
  derived and/or modified CDS sequence (opt4) from neuraminidase__InfluenzaB__AFJ80785

SEQ ID NO: 189090 - RNA, 1401 nt, Artificial Sequence; identical to SEQ ID NO: 188728
  derived and/or modified CDS sequence (opt4) from neuraminidase__InfluenzaB__AFJ80796

SEQ ID NO: 189091 - RNA, 1401 nt, Artificial Sequence
  derived and/or modified CDS sequence (opt4) from neuraminidase__InfluenzaB__AFJ80807
augcugcccagcaccauccagacccugacccuguuccugaccagcggcggcgugcugcugagccuguacgugagcgugagccugagcuaccugcuguacagcgacauccugcugaaguuccccagcaccgagaucaccgcccccaccaugccccuggacugcgccaacgccagcaacgugcaggccgugaacagaagcgccaccaagggcgugacccugcugcugcccgagcccgaguggaccuaccccagacugagcugccccggcagcaccuuccagaaggcccugcugaucagcccccacagauucggcgagaccaagggcaacagcgccccccugaucaucagagagcccuucaucgccugcggccccaaggagugcaagcacuucgcccugacccacuacgccgcccagcccggcggcuacuacaacggcaccagaggcgacagaaacaagcugagacaccugaucagcgugaagcugggcaagauccccaccguggagaacagcaucuuccacauggccgccuggagcggcagcgccugccacgacggcaaggaguggaccuacaucggcguggacggccccgacaacaacgcccugcugaagaucaaguacggcgaggccuacaccgacaccuaccacagcuacgccaacaacauccugagaacccaggagagcgccugcaacugcaucggcggcaacugcuaccugaugaucaccgacggcagcgccagcggcgugagcgagugcagauuccugaagaucagagagggcagaaucaucaaggagaucuuccccaccggcagaaucaagcacaccgaggagugcaccugcggcuucgccagcaacaagaccaucgagugcgccugcagagacaacagcuacaccgccaagagacccuucgugaagcugaacguggagaccgacaccgccgagaucagacugaugugcaccgagaccuaccuggacacccccagacccgacgacggcagcaucaccggccccugcgagagcaacggcgacaagggcagcggcggcaucaagggcggcuucgugcaccagagaauggccagcaagaucggcagaugguacagcagaaccaugagcaagaccaagagaaugggcaugggccuguacgugaaguacgacggcgaccccugggccgacagcgacgcccuggccuucagcggcgugauggugagcauggaggagcccggcugguacagcuucggcuucgagaucaaggacaagaagugcgacgugcccugcaucggcaucgagauggugcacgacggcggcaaggagaccuggcacagcgccgccaccgccaucuacugccugaugggcagcggccagcugcugugggacaccgugaccggcgugaacauggcccuguga

SEQ ID NO: 189092 - RNA, 1401 nt, Artificial Sequence; identical to SEQ ID NO: 188728
  derived and/or modified CDS sequence (opt4) from neuraminidase__InfluenzaB__AFJ80818

SEQ ID NO: 189093 - RNA, 1401 nt, Artificial Sequence; identical to SEQ ID NO: 188728
  derived and/or modified CDS sequence (opt4) from neuraminidase__InfluenzaB__AFJ80829

SEQ ID NO: 189094 - RNA, 1401 nt, Artificial Sequence; identical to SEQ ID NO: 189065
  derived and/or modified CDS sequence (opt4) from neuraminidase__InfluenzaB__AFJ80840

SEQ ID NO: 189095 - RNA, 1401 nt, Artificial Sequence; identical to SEQ ID NO: 189065
  derived and/or modified CDS sequence (opt4) from neuraminidase__InfluenzaB__AFJ80851

SEQ ID NO: 189096 - RNA, 1401 nt, Artificial Sequence
  derived and/or modified CDS sequence (opt4) from neuraminidase__InfluenzaB__AFJ80862
augcugcccagcaccauccagacccugacccuguuccugaccagcggcggcgugcugcugagccuguacgugagcgccagccugagcuaccugcuguacagcgacauccugcugaaguuccccagcaccgagaucaccgcccccaccaugccccuggacugcgccaacgccagcaacgugcaggccaugaacagaagcgccaccaagggcgugacccugcugcugcccgagaccgaguggaccuaccccagacugagcugccccggcagcaccuuccagaaggcccugcugaucagcccccacagauucggcgagaccaagggcaacagcgccccccugaucaucagagagcccuucaucgccugcggccccaaggagugcaagcacuucgcccugacccacuacgccgcccagcccggcggcuacuacaacggcaccagaggcgacagaaacaagcugagacaccugaucagcgugaagcugggcaagauccccaccguggagaacagcaucuuccacauggccgccuggagcggcagcgccugccacgacggcaaggaguggaccuacaucggcguggacggccccgacaacaacgcccugcugaagaucaaguacggcgaggccuacaccgacaccuaccacagcuacgccaacaacauccugagaacccaggagagcgccugcaacugcaucggcggcaacugcuaccugaugaucaccgacggcagcgccagcggcgugagcgagugcagauuccugaagaucagagagggcagaaucaucaaggagaucuuccccaccggcagaaucaagcacaccgaggagugcaccugcggcuucgccagcaacaagaccaucgagugcgccugcagagacaacagcuacaccgccaagagacccuucgugaagcugaacguggagaccgacaccgccgagaucagacugaugugcaccgagaccuaccuggacacccccagacccgacgacggcagcaucaccggccccugcgagagcaacggcgacaagggcagcggcggcaucaagggcggcuucgugcaccagagaauggccagcaagaucggcagaugguacagcagaaccaugagcaagaccgagagaaugggcaugggccuguacgugaaguacgacggcgaccccugggccgacagcgacgcccugaccuucagcggcgugauggugagcauggaggagcccggcugguacagcuucggcuucgagaucaaggacaagaagugcgacgugcccugcaucggcaucgagauggugcacgacggcggcaaggagaccuggcacagcgccgccaccgccaucuacugccugaugggcagcggccagcugcugugggacaccgugaccggcgugaacauggcccuguga

SEQ ID NO: 189097 - RNA, 1401 nt, Artificial Sequence
  derived and/or modified CDS sequence (opt4) from neuraminidase__InfluenzaB__AFJ80873
augcugcccagcaccauccagacccugacccuguuccugaccagcggcggcgugcugcugagccuguacgugagcgccagccugagccaccugcuguacagcggcauccugcugaaguuccccagcaccgagaucaccgcccccaccaugccccuggacugcgccaacgccagcaacgugcaggccgugaacagaagcgccaccaagggcgugacccugcugccccccgagcccgaguggaccuaccccagacugagcugccccggcagcaccuuccagaaggcccugcugaucagcccccacagauucggcgagaccaagggcaacagcgccccccugaucaucagagagcccuucaucgccugcggccccaaggagugcaagcacuucgcccugacccacuacgccgcccagcccggcggcuacuacaacggcaccagaggcgacagaaacaagcugagacaccugaucagcgugaagcugggcaagauccccaccguggagaacagcaucuuccacauggccgccuggagcggcagcgccugccacgacggcaaggaguggaccuacaucggcguggacggccccgacaacaacgcccugcugaagaucaaguacggcgaggccuacaccgacaccuaccacagcuacgccaacaacauccugagaacccaggagagcgccugcaacugcaucggcggcaacugcuaccugaugaucaccgacggcagcgccagcggcgugagcgagugcagauuccugaagaucagagagggcagaaucaucaaggagaucuuccccaccggcagaaucaagcacaccgaggagugcaccugcggcuucgccagcaacaagaccaucgagugcgccugcagagacaacagcuacaccgccaagagacccuucgugaagcugaacguggagaccgacaccgccgagaucagacugaugugcaccgagaccuaccuggacacccccagacccgacgacggcagcaucaccggccccugcgagagcaacggcgacaagggcagcggcggcaucaagggcggcuucgugcaccagagaauggccagcaagaucggcagaugguacagcagaaccaugagcaagaccgagagaaugggcaugggccuguacgugaaguacgacggcgaccccugggccgacagcgacgcccugaccuucagcggcgugauggugagcauggaggagcccggcugguacagcuucggcuucgagaucaaggacaagaagugcgacgugcccugcaucggcaucgagauggugcacgacggcggcaaggagaccuggcacagcgccgccaccgccaucuacugccugaugggcagcggccagcugcugugggacaccgugaccggcgugaacauggcccuguga

SEQ ID NO: 189098 - RNA, 1401 nt, Artificial Sequence
  derived and/or modified CDS sequence (opt4) from neuraminidase__InfluenzaB__AFJ80884
augcugcccagcaccauccagacccugacccuguuccugaccagcggcggcgugcugcugagccuguacgugagcgccagccugagcuaccugcuguacagcgacauccugcugaaguuccccagcaccgagaucaccgcccccaccaugccccuggacugcgccaacgccagcaacgugcaggccgugaacagaagcgccaccaagggcgugacccugcugcugcccgagcccgaguggaccuaccccagacugagcugccccggcagcaccuuccagaaggcccugcugaucagcccccacagauucggcgagaccaagggcaacagcgccccccugaucaucagagagcccuucaucgccugcggccccaaggagugcaagcacuucgcccugacccacuacgccgcccagcccggcggcuacuacaacggcaccagaggcgacagaaacaagcugagacaccugaucagcgugaagcugggcaagauccccaccguggagaacagcaucuuccacauggccgccuggagcggcagcgccugccacgacggcaaggaguggaccuacaucggcguggacggccccgacaacaacgcccugcugaagaucaaguacggcgaggccuacaccgacaccuaccacagcuacgccaacaacauccugagaacccaggagagcgccugcaacugcaucggcggcaacugcuaccugaugaucaccgacggcagcgccagcggcgugagcaagugcagauuccugaagaucagagagggcagaaucaucaaggagaucuuccccaccggcagaaucaagcacaccgaggagugcaccugcggcuucgccagcaacaagaccaucgagugcgccugcagagacaacagcuacaccgccaagagacccuucgugaagcugaacguggagaccgacaccgccgagaucagacugaugugcaccgagaccuaccuggacacccccagacccgacgacggcagcaucaccggccccugcgagagcaacggcgacaagggcagcggcggcaucaagggcggcuucgugcaccagagaauggccagcaagaucggcagaugguacagcagaaccaugagcaagaccgagagaaugggcaugggccuguacgugaaguacgacggcgaccccugggccgacagcgacgcccugaccuucagcggcgugauggugagcauggaggagcccggcugguacagcuucggcuucgagaucaaggacaagaagugcgacgugcccugcaucggcaucgagauggugcacgacggcggcaaggagaccuggcacagcgccgccaccgccaucuacugccugaugggcagcggccagcugcugugggacaccgugaccggcgugaacauggcccuguga

SEQ ID NO: 189099 - RNA, 1401 nt, Artificial Sequence; identical to SEQ ID NO: 189064
  derived and/or modified CDS sequence (opt4) from neuraminidase__InfluenzaB__AFJ80895

SEQ ID NO: 189100 - RNA, 1401 nt, Artificial Sequence
  derived and/or modified CDS sequence (opt4) from neuraminidase__InfluenzaB__AFJ80917
augcugcccagcaccauccagacccugacccuguuccugaccagcggcggcgugcugcugagccuguacgugagcgccagccugagcuaccugcuguacagcgacauccugcugaaguuccccagcaccgagaucaccgcccccaccaugccccuggacugcgccaacgccagcaacgugcaggccgugaacagaagcgccaccaagggcgugacccugcugcugcccgagcccgaguggaccuaccccagacugagcugccccggcagcaccuuccagaaggcccugcugaucagcccccacagauucggcgagaccaagggcaacagcgccccccugaucaucagagagcccuucaucgccugcggccccaaggagugcaagcacuucgcccugacccacuacgccgcccagcccggcggcuacuacaacggcaccagaggcgacagaaacaagcugagacaccugaucagcgugaagcugggcaagauccccaccguggagaacagcaucuuccacauggccgccuggagcggcagcgccugccacgacggcaaggaguggaccuacaucggcguggacggccccgacaacaacgcccugcugaagaucaaguacggcgaggccuacaccgacaccuaccacagcuacgccaacaacauccugagaacccaggagagcgccugcaacugcaucggcggcaacugcuaccugaugaucaccgacggcagcgccagcggcgugagcgagugcagauuccugaagaucagagagggcagaaucaucaaggagaucuuccccaccggcagaaucaagcacaccgaggagugcaccugcggcuucgccagcaacaagaccaucgagugcaccugcagagacaacagcuacaccgccaagagacccuucgugaagcugaacguggagaccgacaccgccgagaucagacugaugugcaccgagaccuaccuggacacccccagacccgacgacggcagcaucaccggccccugcgagagcaacggcgacaagggcagcggcggcaucaagggcggcuucgugcaccagagaauggccagcaagaucggcagaugguacagcagaaccaugagcaagaccgagagaaugggcaugggccuguacgugaaguacgacggcgaccccugggccgacagcgacgcccugaccuucagcggcgugauggugagcauggaggagcccggcugguacagcuucggcuucgagaucaaggacaagaagugcgacgugcccugcaucggcaucgagauggugcacgacggcggcaaggagaccuggcacagcgccgccaccgccaucuacugccugaugggcagcggccagcugcugugggacaccgugaccggcgugaacauggcccuguga

SEQ ID NO: 189101 - RNA, 1401 nt, Artificial Sequence
  derived and/or modified CDS sequence (opt4) from neuraminidase__InfluenzaB__AFJ80928
augcugcccagcaccauccagacccugacccuguuccugaccagcggcggcgugcugcugagccuguacgugagcgccagccugagcuaccugcuguacagcgacauccugcugaaguuccccagcaccgagaucaccgcccccaccaugccccuggacugcgccaacgccagcaacgugcaggccgugaacagaagcgccaccaagggcgugacccugcugcugcccgagcccgaguggaccuaccccagacugagcugccccggcagcaccuuccagaaggcccugcugaucagcccccacagauucggcgagaccaagggcaacagcgccccccugaucaucagagagcccuucaucgccugcgagcccaaggagugcaagcacuucgcccugacccacuacgccgcccagcccggcggcuacuacaacggcaccagaggcgacagaaacaagcugagacaccugaucagcgugaagcugggcaagauccccaccguggagaacagcaucuuccacauggccgccuggagcggcagcgccugccacgacggcaaggaguggaccuacaucggcguggacggccccgacaacaacgcccugcugaagaucaaguacggcgaggccuacaccgacaccuaccacagcuacgccaacaacauccugagaacccaggagagcgccugcaacugcaucggcggcaacugcuaccugaugaucaccgacggcagcgccagcggcgugagcgagugcagauuccugaagaucagagagggcagaaucaucaaggagaucuuccccaccggcagaaucaagcacaccgaggagugcaccugcggcuucgccagcaacaagaccaucgagugcgccugcagagacaacagcuacaccgccaagagacccuucgugaagcugaacguggagaccgacaccgccgagaucagacugaugugcaccgagaccuaccuggacacccccagacccgacgacggcagcaucaccggccccugcgagagcaacggcgacaagggcagcggcggcaucaagggcggcuucgugcaccagagaauggccagcaagaucggcagaugguacagcagaaccaugagcaagaccgagagaaugggcaugggccuguacgugaaguacgacggcgaccccugggccgacagcgacgcccugaccuucagcggcgugauggugagcauggaggagcccggcugguacagcuucggcuucgagaucaaggacaagaagugcgacgugcccugcaucggcaucgagauggugcacgacggcggcaaggagaccuggcacagcgccgccaccgccaucuacugccugaugggcagcggccagcugcugugggacaccgugaccggcgugaacauggcccuguga

SEQ ID NO: 189102 - RNA, 1401 nt, Artificial Sequence
  derived and/or modified CDS sequence (opt4) from neuraminidase__InfluenzaB__AFJ80939
augcugcccagcaccauccagacccugacccuguuccugaccagcggcggcgugcugcugagccuguacgugagcgccagccugagcuaccugcuguacagcgacauccugcugaaguucccccccaccgaggugaccgcccccaccaugccccuggacugcgccaacgccagcaacgugcaggccgugaacagaagcgccaccaagggcgugacccugcugcugcccgagcccgaguggaccuaccccagacugagcugccccggcagcaccuuccagaaggcccugcugaucagcccccacagauucggcgagaccaagggcaacagcgccccccugaucaucagagagcccuucaucgccugcggccccaaggagugcaagcacuucgcccugacccacuacgccgcccagcccggcggcuacuacaacggcaccagaggcgacagaaacaagcugagacaccugaucagcgugaagcugggcaagauccccaccguggagaacagcaucuuccacauggccgccuggagcggcagcgccugccacgacggcaaggaguggaccuacaucggcguggacggccccgacaacaacgcccugcugaagaucaaguacggcgaggccuacaccgacaccuaccacagcuacgccaacaacauccugagaacccaggagagcgccugcaacugcaucggcggcaacugcuaccugaugaucaccgacggcagcgccagcggcgugagcgagugcagauuccugaagaucagagagggcagaaucaucaaggagaucuuccccaccggcagaaucaagcacaccgaggagugcaccugcggcuucgccagcaacaagaccaucgagugcgccugcagagacaacagcuacaccgccaagagacccuucgugaagcugaacguggagaccgacaccgccgagaucagacugaugugcaccgagaccuaccuggacacccccagacccgacgacggcagcaucaccggccccugcgagagcaacggcgacaagggcagcggcggcaucaagggcggcuucgugcaccagagaauggccagcaagaucggcagaugguacagcagaaccaugagcaagaccgagagaaugggcaugggccuguacgugaaguacgacggcgaccccugggccgacagcgacgcccugaccuucagcggcgugauggugagcauggaggagcccggcugguacagcuucggcuucgagaucaaggacaagaagugcgacgugcccugcaucggcaucgagauggugcacgacggcggcaaggagaccuggcacagcgccgccaccgccaucuacugccugaugggcagcggccagcugcugugggacaccgugaccggcgugaacauggcccuguga

SEQ ID NO: 189103 - RNA, 1401 nt, Artificial Sequence
  derived and/or modified CDS sequence (opt4) from neuraminidase__InfluenzaB__AFJ80950
augcugcccagcaccauccagacccugacccuguuccugaccagcggcggcgugcugcugagccuguacgugagcgccagccugagcuaccugcuguacagcgacauccugcugaaguucagccagaccgagaucaccgcccccaucaugccccuggacugcgccaacgccagcaacgugcaggccgugaacagaagcgccgccaagggcgugacccugcugcugcccgagcccgaguggaccuaccccagacugagcugccccggcagcaccuuccagaaggcccugcugaucagcccccacagauucggcgagaccaagggcaacagcgccccccugaucaucagagagcccuucaucgccugcggccccaccgagugcaagcacuucgcccugacccacuacgccgcccagcccggcggcuacuacaacggcaccagagaggacagaaacaagcugagacaccugaucagcgugaagcugggcaagauccccaccguggagaacagcaucuuccacauggccgccuggagcggcagcgccugccacgacggcaaggaguggaccuacaucggcguggacggccccgacagcaacgcccugcugaagaucaaguacggcgaggccuacaccgacaccuaccacagcuacgccaagaacauccugagaacccaggagagcgccugcaacugcaucggcggcgacugcuaccugaugaucaccgacggccccgccagcggcaucagcgagugcagauuccugaagaucagagagggcagaaucaucaaggagaucuuccccaccggcagagugaagcacaccgaggagugcaccugcggcuucgccagcaacaagaccaucgagugcgccugcagagacaacagcuacaccgccaagagacccuucgugaagcugaacguggagaccgacaccgccgagaucagacugaugugcaccgagaccuaccuggacacccccagacccaacgacggcagcaucaccggccccugcgagagcgacggcgacaagggcaacggcggcaucaagggcggcuucgugcaccagagaauggccagcaagaucggcagaugguacagcagaaccaugagcaagaccaagagaaugggcaugggccuguacgugaaguacgacggcgaccccuggaccgacagcgaggcccuggcccugagcggcgugauggugagcauggaggagcccggcugguacagcuucggcuucgagaucaaggacaagaagugcgacgugcccugcaucggcaucgagauggugcacgacggcggcaagaccaccuggcacagcgccgccaccgccaucuacugccugaugggcagcggccagcugcugugggacaccgugaccggcguggacauggcccuguga

SEQ ID NO: 189104 - RNA, 1401 nt, Artificial Sequence; identical to SEQ ID NO: 189065
  derived and/or modified CDS sequence (opt4) from neuraminidase__InfluenzaB__AFJ80961

SEQ ID NO: 189105 - RNA, 1401 nt, Artificial Sequence; identical to SEQ ID NO: 188848
  derived and/or modified CDS sequence (opt4) from neuraminidase__InfluenzaB__AFJ80972

SEQ ID NO: 189106 - RNA, 1401 nt, Artificial Sequence; identical to SEQ ID NO: 188848
  derived and/or modified CDS sequence (opt4) from neuraminidase__InfluenzaB__AFJ80983

SEQ ID NO: 189107 - RNA, 1401 nt, Artificial Sequence; identical to SEQ ID NO: 188803
  derived and/or modified CDS sequence (opt4) from neuraminidase__InfluenzaB__AFJ80994

SEQ ID NO: 189108 - RNA, 1401 nt, Artificial Sequence; identical to SEQ ID NO: 188848
  derived and/or modified CDS sequence (opt4) from neuraminidase__InfluenzaB__AFJ81005

SEQ ID NO: 189109 - RNA, 1401 nt, Artificial Sequence; identical to SEQ ID NO: 188848
  derived and/or modified CDS sequence (opt4) from neuraminidase__InfluenzaB__AFJ84364

SEQ ID NO: 189110 - RNA, 1401 nt, Artificial Sequence
  derived and/or modified CDS sequence (opt4) from neuraminidase__InfluenzaB__AFJ90399
augcugcccagcaccauccagacccugacccuguuccugaccagcggcggcgugcugcugagccuguacgugagcgccagccugagcuaccugcuguacagcgacauccugcugaaguuccccagcaccgagaucaccgccccccccaugccccuggacugcgccaacgccagcaacgugcaggccgugaacagaagcgccaccaagggcgugacccugcugcugcccgagcccgaguggaccuaccccagacugagcugccccggcagcaccuuccagagagcccugcugaucagcccccacagauucggcgagaccaagggcaacagcgccccccugaucaucagagagcccuucaucgccugcggccccagagagugcaagcacuucgcccugacccacuacgccgcccagcccggcggcuacuacaacggcaccagaggcgacagaaacaagcugagacaccugaucagcgugaagcugggcaagauccccaccguggagaacagcaucuuccacauggccgccuggagcggcagcgccugccacgacggcaaggaguggaccuacaucggcguggacggccccgacaacaacgcccugcugaagaucaaguacggcgaggccuacaccgacaccuaccacagcuacgccaacaacauccugagaacccaggagagcgccugcaacugcaucggcggcaacugcuaccugaugaucaccgacggcagcgccagcggcgugagcgagugcagauuccugaagaucagagagggcagaaucaucaaggagaucuuccccaccggcagaaucaagcacaccgaggagugcaccugcggcuucgccagcaacaagaccaucgagugcgccugcagagacaacagcuacaccgccaagagacccuucgugaagcugaacguggagaccgacaccgccgagaucagacugaugugcaccgagaccuaccuggacacccccagacccgacgacggcagcaucaccggccccugcgagagcaacggcgacaagggcagcggcggcaucaagggcggcuucgugcaccagagaaugaccagcaagaucggcagaugguacagcagaaccaugagcaagaccgagagaaugggcaugggccuguacgugaaguacgacggcgaccccugggccgacagcgacgcccugaccuucagcggcgugauggugagcauggaggagcccggcugguacagcuucggcuucgagaucaaggacaagaagugcgacgugcccugcaucggcaucgagauggugcacgacggcggcaaggagaccuggcacagcgccgccaccgccaucuacugccugaugggcagcggccagcugcugugggacaccgugaccggcgugaacauggcccuguga

SEQ ID NO: 189111 - RNA, 1401 nt, Artificial Sequence
  derived and/or modified CDS sequence (opt4) from neuraminidase__InfluenzaB__AFJ90410
augcugcccagcaccauccagacccugacccuguuccugaccagcggcggcgugcugcugagccuguacgugagcgccagccugagcuaccugcuguacagcgacauccugcugaaguucagccagaccgagaucaccgcccccaucaugccccuggacugcgccaacgccagcaacgugcaggccgugaacagaagcgccgccaagggcgugacccugcugcugcccaagcccgaguggaccuaccccagacugagcugccccggcagcaccuuccagaaggcccugcugaucagcccccacagauucggcgagaccaagggcaacagcgccccccugaucaucagagagcccuucaucgccugcggccccaccgagugcaagcacuucgcccugacccacuacgccgcccagcccggcggcuacuacaacggcaccagagaggacagaaacaaccugagacaccugaucagcgugaagcugggcaagauccccaccguggagaacagcaucuuccacauggccgccuggagcggcagcgccugccacgacggcaaggaguggaccuacaucggcguggacggccccgacagcaacgcccugcugaagaucaaguacggcgaggccuacaccgacaccuaccacagcuacgccaagaacauccugagaacccaggagagcgccugcaacugcaucggcggcgacugcuaccugaugaucaccgacggccccgccagcggcaucagcgagugcagauuccugaagaucagagagggcagaaucaucaaggagaucuuccccaccggcagagugaagcacaccgaggagugcaccugcggcuucgccagcaacaagaccaucgagugcgccugcagagacaacagcuacaccgccaagagacccuucgugaagcugaacguggagaccgacaccgccgagaucagacugaugugcaccgagaccuaccuggacacccccagacccaacgacggcagcaucaccggccccugcgagagcgacggcgacaagggcagcggcggcaucaagggcggcuucgugcaccagagaauggccagcaagaucggcagaugguacagcagaaccaugagcaagaccaagagaaugggcaugggccuguacgugaaguacgacggcgaccccuggaccgacagcgaggcccuggcccugagcggcgugauggugagcauggaggagcccggcugguacagcuucggcuucgagaucaaggacaagaagugcgacgugcccugcaucggcaucgagauggugcacgacggcggcaagaccaccuggcacagcgccgccaccgccaucuacugccugaugggcagcggccagcugcugugggacaccgugaccggcguggacauggcccuguga

SEQ ID NO: 189112 - RNA, 1401 nt, Artificial Sequence
  derived and/or modified CDS sequence (opt4) from neuraminidase__InfluenzaB__AFJ90432
augcugcccagcaccauccagacccugacccuguuccugaccagcggcggcgugcugcugagccuguacgugagcaccagccugagcuaccugcuguacagcgacauccugcugaaguucagccagaccgagaucaccgcccccaucaugccccuggacugcgccaacgccagcaacgugcaggccgugaacagaagcgccgccaagggcgugacccugcugcugcccgagcccgaguggaccuaccccagacugagcugccccggcagcaccuuccagaaggcccugcugaucagcccccacagauucggcgagaccaagggcaacagcgccccccugaucaucagagagcccuucaucgccugcggccccaccgagugcaagcacuucgcccugacccacuacgccgcccagcccggcggcuacuacaacggcaccagagaggacagaaacaagcugagacaccugaucagcgugaagcugggcaagauccccaccguggagaacagcaucuuccacauggccgccuggagcggcagcgccugccacgacggcaaggaguggaccuacaucggcguggacggccccgacagcaacgcccugcugaagaucaaguacggcgaggccuacaccgacaccuaccacagcuacgccaagaacauccugagaacccaggagagcgccugcaacugcaucggcggcgacugcuaccugaugaucaccgacggccccgccagcggcaucagcgagugcagauuccugaagaucagagagggcagaaucaucaaggagaucuuccccaccggcagagugaagcacaccgaggagugcaccugcggcuucgccagcaacaagaccaucgagugcgccugcagagacaacagcuacaccgccaagagacccuucgugaagcugaacguggagaccgacaccgccgagaucagacugaugugcaccgagaccuaccuggacacccccagacccaacgacggcagcaucaccggccccugcgagagcgacggcgacaagggcagcggcggcaucaagggcggcuucgugcaccagagaauggccagcaagaucggcagaugguacagcagaaccaugagcaagaccaagagaaugggcaugggccuguacgugaaguacgacggcgaccccuggaccgacagcgaggcccuggcccugagcggcgugauggugagcauggaggagcccggcugguacagcuucggcuucgagaucaaggacaagaagugcgacgugcccugcaucggcaucgagauggugcacgacggcggcaagaccaccuggcacagcgccgccaccgccaucuacugccugaugggcagcggccagcugcugugggacaccgugaccggcguggacauggcccuguga

SEQ ID NO: 189113 - RNA, 1401 nt, Artificial Sequence; identical to SEQ ID NO: 189032
  derived and/or modified CDS sequence (opt4) from neuraminidase__InfluenzaB__AFJ90443

SEQ ID NO: 189114 - RNA, 1401 nt, Artificial Sequence
  derived and/or modified CDS sequence (opt4) from neuraminidase__InfluenzaB__AFJ90454
augcugcccagcaccauccagacccugacccuguuccugaccagcggcggcgugcugcugagccuguacgugagcgccagccugagcuaccugcuguacagcgacauccugcugaaguucagccagaccgagaucaccgcccccaucgugccccuggacugcgccaacgccagcaacgugcaggccgugaacagaagcgccgccaagggcgugacccugcugcugcccgagcccgaguggaccuaccccagacugagcugccccggcagcaccuuccagaaggcccugcugaucagcccccacagauucggcgagaccaagggcaacagcgccccccugaucaucagagagcccuucaucgccugcggccccaccgagugcaagcacuucgcccugacccacuacgccgcccagcccggcgaguacuacaacggcaccagagaggacagaaacaagcugagacaccugaucagcgugaagcugggcaagauccccaccguggagaacagcaucuuccacauggccgccuggagcggcagcgccugccacgacggcaaggaguggaccuacaucggcguggacggccccgacagcaacgcccugcugaagaucaaguacggcgaggccuacaccgacaccuaccacagcuacgccaagaacauccugagaacccaggagagcgccugcaacugcaucggcggcgacugcuaccugaugaucaccgacggccccgccagcggcaucagcgagugcagauuccugaagaucagagagggcagaaucaucaaggagaucuuccccaccggcagagugaagcacaccgaggagugcaccugcggcuucgccagcaacaagaccaucgagugcgccugcagagacaacagcuacaccgccaagagacccuucgugaagcugaacguggagaccgacaccgccgagaucagacugaugugcaccgagaccuaccuggacacccccagacccaacgacggcagcaucaccggccccugcgagagcgacggcgacaagggcagcggcggcaucaagggcggcuucgugcaccagagaauggccagcaagaucggcagaugguacagcagaaccaugagcaagaccaagagaaugggcaugggccuguacgugaaguacgacggcgaccccuggaccgacagcgaggcccuggcccugagcggcgugauggugagcauggaggagcccggcugguacagcuucggcuucgagaucaaggacaagaagugcgacgugcccugcaucggcaucgagauggugcacgacggcggcaagaccaccuggcacagcgccgccaccgccaucuacugccugaugggcagcggccagcugcugugggacaccgugaccggcguggacauggcccuguga

SEQ ID NO: 189115 - RNA, 1401 nt, Artificial Sequence
  derived and/or modified CDS sequence (opt4) from neuraminidase__InfluenzaB__AFJ91042
augcugcccagcaccauccagacccugacccuguuccugaccagcggcggcgugcugcugagccuguacgugagcgccagccugagcuaccugcuguacagcgacauccugcugaaguucagccagaccgagaucaccgcccccaucaugccccuggacugcgccaacgccagcaacgugcaggccgugaacagaagcgccgccaagggcgugacccugcugauccccgagcccgaguggaccuaccccagacugagcugccccggcagcaccuuccagaaggcccugcugaucagcccccacagauucggcgagaccaagggcaacagcgccccccugaucaucagagagcccuucaucgccugcggccccaccgagugcaagcacuucgcccugacccacuacgccgcccagcccggcggcuacuacaacggcaccagagaggacagaaacaagcugagacaccugaucagcgugaagcugggcaagauccccaccguggagaacagcaucuuccacauggccgccuggagcggcagcgccugccacgacggcaaggaguggaccuacaucggcguggacggccccgacagcaacgcccugcugaagaucaaguacggcgaggccuacaccgacaccuaccacagcuacgccaagaacauccugagaacccaggagagcgccugcaacugcaucggcggcgacugcuaccugaugaucaccgacggccccgccagcggcaucagcgagugcagauuccugaagaucagagagggcagaaucaucaaggagaucuuccccaccggcagagugaagcacaccgaggagugcaccugcggcuucgccagcaacaagaccaucgagugcgccugcagagacaacagcuacaccgccaagagacccuucgugaagcugaacguggagaccgacaccgccgagaucagacugaugugcaccgagaccuaccuggacacccccagacccaacgacggcagcaucgccggccccugcgagagcgacggcgacaagggcagcggcggcaucaagggcggcuucgugcaccagagaaugaccagcaagaucggcagaugguacagcagaaccaugagcaagaccaagagaaugggcaugggccuguacgugaaguacgacggcgaccccuggaccgacagcgaggcccuggcccugagcggcgugauggugagcauggaggagcccggcugguacagcuucggcuucgagaucaaggacaagaagugcgacgugcccugcaucggcaucgagauggugcacgacggcggcaagaccaccuggcacagcgccgccaccgccaucuacugccugaugggcagcggccagcugcugugggacaccgugaccggcguggacauggcccuguga

SEQ ID NO: 189116 - RNA, 1401 nt, Artificial Sequence
  derived and/or modified CDS sequence (opt4) from neuraminidase__InfluenzaB__AFJ91053
augcugcccagcaccauccagacccugacccuguuccugaccagcggcggcgugcugcugagccuguacgugagcgccagccugagcuaccugcuguacagcgacauccugcugaaguucagccagaccgagaucaccgcccccaucaugccccuggacugcgccaacgccagcaacgugcaggccgugaacagaagcgccgccaaggaggugacccugcugcugcccgagcccgaguggaccuaccccagacugagcugccccggcagcaccuuccagaaggcccugcugaucagcccccacagauucggcgagaccaagggcaacagcgccccccugaucaucagagagcccuucaucgccugcggccccaccgagugcaagcacuucgcccugacccacuacgccgcccagcccggcggcuacuacaacggcaccagagaggacagaaacaagcugagacaccugaucagcgugaagcugggcaagauccccaccguggagaacagcaucuuccacauggccgccuggagcggcagcgccugccacgacggcaaggaguggaccuacaucggcguggacggccccgacagcaacgcccugcugaagaucaaguacggcgaggccuacaccgacaccuaccacagcuacgccaagaacauccugagaacccaggagagcgccugcaacugcaucggcggcgacugcuaccugaugaucaccgacggccccgccagcggcaucagcgagugcagauuccugaagaucagagagggcagaaucaucaaggagaucuuccccaccggcagagugaagcacaccgaggagugcaccugcggcuucgccagcaacaagaccaucgagugcgccugcagagacaacagcuacaccgccaagagacccuucgugaagcugaacguggagaccgacaccgccgagaucagacugaugugcaccgagaccuaccuggacacccccagacccaacgacggcagcaucaccggccccugcgagagcgacggcgacaagggcagcggcggcaucaagggcggcuucgugcaccagagaauggccagcaagaucggcagaugguacagcagaaccaugagcaagaccaagagaaugggcaugggccuguacgugaaguacgacggcgaccccuggaccgacagcgaggcccuggcccugagcggcgugauggugagcauggaggagcccggcugguacagcuucggcuucgagaucaaggacaagaagugcgacgugcccugcaucggcaucgagauggugcacgacggcggcaagaccaccuggcacagcgccgccaccgccaucuacugccugaugggcagcggccagcugcugugggacaccgugaccggcguggacauggcccuguga

SEQ ID NO: 189117 - RNA, 1401 nt, Artificial Sequence
  derived and/or modified CDS sequence (opt4) from neuraminidase__InfluenzaB__AFJ91075
augcugcccagcaccauccagacccugacccuguuccugaccagcggcggcgugcugcugagccuguacgugagcgccagccugagcuaccugcuguacagcgacauccugcugaaguucagccagaccgagaucaccgcccccaucaugccccuggacugcgccaacgccagcaacgugcaggccgugaacagaagcgccgccaagggcgugacccugcugcugcccgagcccgaguggaccuaccccagacugagcugccccggcagcaccuuccagaaggcccugcugaucagcccccacagauucggcgagaccaagggcaacagcgccccccugaucaucagagagcccuucaucgccugcggccccaccgagugcaagcacuucgcccugacccacuacgccgcccagcccggcggcuacuacaacggcaccagagaggacagaaacaagcugagacaccugaucagcgugaagcugggcaagauccccaccguggagaacagcaucuuccacauggccgccuggagcggcagcgccugccacgacggcaaggaguggaccuacaucggcguggacggccccgacagcaacacccugcugaagaucaaguacggcgaggccuacaccgacaccuaccacagcuacgccaagaacauccugagaacccaggagagcgccugcaacugcaucggcggcgacugcuaccugaugaucaccgacggccccgccagcggcaucagcgagugcagauuccugaagaucagagagggcagaaucaucaaggagaucuuccccaccggcagagugaagcacaccgaggagugcaccugcggcuucgccagcaacaagaccaucgagugcgccugcagagacaacagcuacaccgccaagagacccuucgugaagcugaacguggagaccgacaccgccgagaucagacugaugugcaccgagaccuaccuggacacccccagacccaacgacggcagcaucaccggccccugcgagagcgacggcgacaagggcagcggcggcaucaagggcggcuucgugcaccagagaauggccagcaagaucggcagaugguacagcagaaccaugagcaagaccaagagaaugggcaugggccuguacgugaaguacgacggcgaccccuggaccgacagcgaggcccuggcccugagcggcgugauggugagcauggaggagcccggcugguacagcuucggcuucgagaucaaggacaagaagugcgacgugcccugcaucggcaucgagauggugcacgacggcggcaagaccaccuggcacagcgccgccaccgccaucuacugccugaugggcagcggccagcugcugugggacaccgugaccggcguggacauggcccuguga

SEQ ID NO: 189118 - RNA, 1401 nt, Artificial Sequence; identical to SEQ ID NO: 188877
  derived and/or modified CDS sequence (opt4) from neuraminidase__InfluenzaB__AFJ91086

SEQ ID NO: 189119 - RNA, 1401 nt, Artificial Sequence; identical to SEQ ID NO: 188877
  derived and/or modified CDS sequence (opt4) from neuraminidase__InfluenzaB__AFJ91097

SEQ ID NO: 189120 - RNA, 1401 nt, Artificial Sequence; identical to SEQ ID NO: 188877
  derived and/or modified CDS sequence (opt4) from neuraminidase__InfluenzaB__AFJ91108

SEQ ID NO: 189121 - RNA, 1401 nt, Artificial Sequence; identical to SEQ ID NO: 188877
  derived and/or modified CDS sequence (opt4) from neuraminidase__InfluenzaB__AFJ91119

SEQ ID NO: 189122 - RNA, 1401 nt, Artificial Sequence; identical to SEQ ID NO: 188728
  derived and/or modified CDS sequence (opt4) from neuraminidase__InfluenzaB__AFJ91707

SEQ ID NO: 189123 - RNA, 1401 nt, Artificial Sequence
  derived and/or modified CDS sequence (opt4) from neuraminidase__InfluenzaB__AFK09801
augcugcccagcaccauccagacccugacccuguuccugaccagcggcggcgugcugcugagccuguacgugagcgccagccugagcuaccugcuguacagcgacauccugcugaaguucagccagaccgagaucaccgcccccaccaugccccuggacugcgccaacgccagcaacgugcaggccgugaacagaagcgccaccaagggcgugacccugcugcugcccgagcccgaguggaccuaccccagacugagcugccccggcagcaccuuccagaaggcccugcugaucagcccccacagauucggcgagaccaagggcaacagcgccccccugaucaucagagagcccuucaucgccugcggccccaaggagugcaagcacuucgcccugacccacuacgccgcccagcccggcggcuacuacaacggcaccagagaggacagaaacaagcugagacaccugaucagcgugaagcugggcaagauccccaccguggagaacagcaucuuccacauggccgccuggagcggcagcgccugccacgacggcagagaguggaccuacaucggcguggacggccccgacagcaacgcccugcugaagaucaaguacggcgaggccuacaccgacaccuaccacagcuacgccaagaacauccugagaacccaggagagcgccugcaacugcaucggcggcgacugcuaccugaugaucaccgacggcagcgccagcggcaucagcgagugcagauuccugaagaucagagagggcagaaucaucaaggagaucuuccccaccggcagagugaagcacaccgaggagugcaccugcggcuucgccagcaacaagaccaucgagugcgccugcagagacaacagcuacaccgccaagagacccuucgugaagcugaacguggagaccgacaccgccgagaucagacugaugugcaccgagaccuaccuggacacccccagacccaacgacggcagcaucaccggccccugcgagagcaacggcgacagaggcagcggcggcaucaagggcggcuucgugcaccagagaauggccagcaagaucggcagaugguacagcagaaccaugagcaagaccaagagaaugggcaugggccuguacgugaaguacgacggcgaccccuggaccgacagcgaggcccuggcccugagcggcgugauggugcccauggaggagcccggcugguacagcuucggcuucgagaucaaggacaagaagugcgacgugcccugcaucggcaucgagauggugcacgacggcggcaagaccaccuggcacagcgccgccaccgccaucuacugccugaugggcagcggccagcugcugugggacaccgugaccggcguggacauggcccuguga

SEQ ID NO: 189124 - RNA, 1401 nt, Artificial Sequence; identical to SEQ ID NO: 188852
  derived and/or modified CDS sequence (opt4) from neuraminidase__InfluenzaB__AFN54669

SEQ ID NO: 189125 - RNA, 1401 nt, Artificial Sequence; identical to SEQ ID NO: 188852
  derived and/or modified CDS sequence (opt4) from neuraminidase__InfluenzaB__AFN54680

SEQ ID NO: 189126 - RNA, 1401 nt, Artificial Sequence; identical to SEQ ID NO: 188877
  derived and/or modified CDS sequence (opt4) from neuraminidase__InfluenzaB__AFN54691

SEQ ID NO: 189127 - RNA, 1401 nt, Artificial Sequence; identical to SEQ ID NO: 188877
  derived and/or modified CDS sequence (opt4) from neuraminidase__InfluenzaB__AFN54702

SEQ ID NO: 189128 - RNA, 1401 nt, Artificial Sequence; identical to SEQ ID NO: 188877
  derived and/or modified CDS sequence (opt4) from neuraminidase__InfluenzaB__AFN54713

SEQ ID NO: 189129 - RNA, 1401 nt, Artificial Sequence; identical to SEQ ID NO: 188877
  derived and/or modified CDS sequence (opt4) from neuraminidase__InfluenzaB__AFN54724

SEQ ID NO: 189130 - RNA, 1401 nt, Artificial Sequence; identical to SEQ ID NO: 188877
  derived and/or modified CDS sequence (opt4) from neuraminidase__InfluenzaB__AFN54735

SEQ ID NO: 189131 - RNA, 1401 nt, Artificial Sequence; identical to SEQ ID NO: 188877
  derived and/or modified CDS sequence (opt4) from neuraminidase__InfluenzaB__AFN54746

SEQ ID NO: 189132 - RNA, 1401 nt, Artificial Sequence; identical to SEQ ID NO: 188877
  derived and/or modified CDS sequence (opt4) from neuraminidase__InfluenzaB__AFN54757

SEQ ID NO: 189133 - RNA, 1401 nt, Artificial Sequence; identical to SEQ ID NO: 188877
  derived and/or modified CDS sequence (opt4) from neuraminidase__InfluenzaB__AFN54768

SEQ ID NO: 189134 - RNA, 1401 nt, Artificial Sequence; identical to SEQ ID NO: 188877
  derived and/or modified CDS sequence (opt4) from neuraminidase__InfluenzaB__AFN54779

SEQ ID NO: 189135 - RNA, 1401 nt, Artificial Sequence; identical to SEQ ID NO: 188877
  derived and/or modified CDS sequence (opt4) from neuraminidase__InfluenzaB__AFN54790

SEQ ID NO: 189136 - RNA, 1401 nt, Artificial Sequence; identical to SEQ ID NO: 188877
  derived and/or modified CDS sequence (opt4) from neuraminidase__InfluenzaB__AFN54801

SEQ ID NO: 189137 - RNA, 1401 nt, Artificial Sequence; identical to SEQ ID NO: 188877
  derived and/or modified CDS sequence (opt4) from neuraminidase__InfluenzaB__AFN54812

SEQ ID NO: 189138 - RNA, 1401 nt, Artificial Sequence
  derived and/or modified CDS sequence (opt4) from neuraminidase__InfluenzaB__AFN54834
augcugcccagcaccauccagacccugacccuguuccugaccagcggcggcgugcugcugagccuguacgugagcgccagccugagcuaccugcuguacagcgacauccugcugaaguucagcagaaccgagaucaccgcccccaucaugccccuggacugcgccaacgccagcaacgugcaggccgugaacagaagcgccaccaagggcgugacccugcugcugcccgagcccgaguggaccuaccccagacugagcugccccggcagcaccuuccagaaggcccugcugaucagcccccacagauucggcgagaccaagggcaacagcgccccccugaucaucagagagcccuucaucgccugcggccccaaggagugcaagcacuucgcccugacccacuacgccgcccagcccggcggcuacuacaacggcaccagagaggacagaaacaagcugagacaccugaucagcgugaagcugggcaagauccccaccguggagaacagcaucuuccacauggccgccuggagcggcagcgccugccacgacggcagagaguggaucuacaucggcguggacggccccgacagcaacgcccugcugaagaucaaguacggcgaggccuacaccgacaccuaccacagcuacgccaagaacauccugagaacccaggagagcgccugcaacugcaucggcggcgacugcuaccugaugaucaccgacggccccgccagcggcaucagcgagugcagauuccugaagaucagagagggcagaaucaucaaggagaucuuccccaccggcagagugaagcacaccgaggagugcaccugcggcuucgccagcaacaagaccaucgagugcgccugcagagacaacagcuacaccgccaagagacccuucgugaagcugaacguggagaccgacaccgccgagaucagacugaugugcaccgagaccuaccuggacacccccagacccaacgacggcagcaucaccggccccugcgagagcaacggcgacaagggcagcggcggcaucaagggcggcuucgugcaccagagaauggccagcaagaucggcagaugguacagcagaaccaugagcaagaccaagagaaugggcaugggccuguacgugaaguacgacggcgaccccuggaccgacagcgaggcccuggcccugagcggcgugauggugagcauggaggagcccggcugguacagcuucggcuucgagaucaaggacaagaagugcgacgugcccugcaucggcaucgagauggugcacgacggcggcaagaccaccuggcacagcgccgccaccgccaucuacugccugaugggcagcggccagcugcugugggacaccgugaccggcgugaacaugacccuguga

SEQ ID NO: 189139 - RNA, 1401 nt, Artificial Sequence; identical to SEQ ID NO: 188877
  derived and/or modified CDS sequence (opt4) from neuraminidase__InfluenzaB__AFN54845

SEQ ID NO: 189140 - RNA, 1401 nt, Artificial Sequence
  derived and/or modified CDS sequence (opt4) from neuraminidase__InfluenzaB__AFN54856
augcugcccagcaccauccagacccugacccuguuccugaccagcggcggcgugcugcugagccuguacgugagcgccagccugagcuaccugcuguacagcgacauccugcugaaguucagcagaaccgagaucaccgcccccaucaugccccuggacugcgccaacgccagcaacgugcaggccgugaacagaagcgccaccaagggcgugacccugcugcugcccgagcccgaguggaccuaccccagacugagcugccccggcagcaccuuccagaaggcccugcugaucagcccccacagauucggcgagaccaagggcaacagcgccccccugaucaucagagagcccuucaucgccugcggccccaaggagugcaagcacuucgcccugacccacuacgccgcccagcccggcggcuacuacaacggcaccagagaggacagaaacaagcugagacaccugaucagcgugaagcugggcaagauccccaccguggagaacagcaucuuccacauggccgccuggagcggcagcgccugccacgacggcagagaguggaccuacaucggcguggacggccccgacagcaacgcccugcugaagaucaaguacggcgaggccuacaccgacaccuaccacagcuacgccaagaacauccugagaacccaggagagcgccugcaacugcaucggcggcgacugcuaccugaugaucaccgacggccccgccagcggcgugagcgagugcagauuccugaagaucagagagggcagaaucaucaaggagaucuuccccaccggcagagugaagcacaccgaggagugcaccugcggcuucgccagcaacaagaccaucgagugcgccugcagagacaacagcuacaccgccaagagacccuucgugaagcugaacguggagaccgacaccgccgagaucagacugaugugcaccgagaccuaccuggacacccccagacccaacgacggcagcaucaccggccccugcgagagcaacggcgacaagggcagcggcggcaucaagggcggcuucgugcaccagagaauggccagcaagaucggcagaugguacagcagaaccaugagcaagaccaagagaaugggcaugggccuguacgugaaguacgacggcgaccccuggaccgacagcgaggcccuggcccugagcggcgugauggugagcauggaggagcccggcugguacagcuucggcuucgagaucaaggacaagaagugcgacgugcccugcaucggcaucgagauggugcacgacggcggcaagaccaccuggcacagcgccgccaccgccaucuacugccugaugggcagcggccagcugcugugggacaccgccaccggcgugaacaugacccuguga

SEQ ID NO: 189141 - RNA, 1401 nt, Artificial Sequence; identical to SEQ ID NO: 188877
  derived and/or modified CDS sequence (opt4) from neuraminidase__InfluenzaB__AFN54867

SEQ ID NO: 189142 - RNA, 1401 nt, Artificial Sequence
  derived and/or modified CDS sequence (opt4) from neuraminidase__InfluenzaB__AFU34598
augcugcccagcaccauccagacccugacccuguuccugaccagcggcggcgugcugcugagccuguacgugagcgccagccugagcuaccugcuguacagcgacauccugcugaaguucagccccaccgagaucaccgcccccaccaugagccuggacugcgccaacgccagcaacgugcaggccgugaacagaagcgccaccaagggcgugaccuuccugcugcccgagcccgaguggaccuaccccagacugagcugccccggcagcaccuuccagaaggcccugcugaucagcccccacagauucggcgagaccaagggcaacagcgccccccugaucaucagagagcccuucaucgccugcggccccaacgagugcaagcacuucgcccugacccacuacgccgcccagcccggcggcuacuacaacggcaccagaggcgacagaaacaagcugagacaccugaucagcgugaagcugggcaagauccccaccguggagaacagcaucuuccacauggccgccuggagcggcagcgccugccacgacggcaaggaguggaccuacaucggcguggacggccccgacaacaacgcccugcugaaggugaaguacggcgaggccuacaccgacaccuaccacagcuacgccaacaagauccugagaaccagagagagcgccugcaacugcaucggcggcaacugcuaccugaugaucaccgacggcagcgccagcggcgugagcgagugcagauuccugaagaucagagugggcagaaucaucaaggagaucuuccccaccggcagagugaagcacaccgaggagugcaccugcggcuucgccagcaacaagaccaucgagugcgccugcagagacaacagcuacaccgccaagagacccuucgugaagcugaacguggagaccgacaccgccgagaucagacugaugugcaccgacaccuaccuggacacccccagacccgacgacggcagcaucaccggccccugcgagagcaacggcgacaagggcagcggcggcaucaagggcggcuucgugcaccagagaauggagagcaagaucggcagaugguacagcagaaccaugagcaagaccgagagaaugggcaugggccuguacgugaaguacgacggcgaccccugggccgacagcgacgcccuggccuucagcggcgugauggugagcaugaaggagcccggcugguacagcuucggcuucgagaucaaggacaagaagugcgacgugcccugcaucggcaucgagauggugcacgacggcggcaaggagaccuggcacagcgccgccaccgccaucuacugccugaugggcagcggccagcugcugugggacaccgugaccggcguggacguggcccuguga

SEQ ID NO: 189143 - RNA, 1401 nt, Artificial Sequence
  derived and/or modified CDS sequence (opt4) from neuraminidase__InfluenzaB__AFU34609
augcugcccagcaccauccagacccugacccuguuccugaccagcggcggcgugcugcugagccuguacgugagcgcccugcugagcuaccugcuguacagcgacauccugcugaaguucagccccaccgagaucaccgcccccaccaugagccuggacugcgccaacgccagcaacgugcaggccgugaacagaagcgccaccagaggcgugaccuuccugcugcccgagcccgagugggccuaccccagacugagcugccccggcagcaccuuccagaaggcccugcugaucagcccccacagauucggcgagaccaagggcaacagcgccccccugaucaucagagagcccuucaucgccugcggccccaacgagugcaagcacuucgcccugacccacuacgccgcccagcccggcggcuacuacaacggcaccagaggcgacagaaacaagcugagacaccugaucagcgugaagcugggcaagauccccaccguggagaacagcaucuuccacauggccgccuggagcggcagcgccugccacgacggcaaggaguggaccuacaucggcguggacggccccgacaacgacgcccugcugaaggugaaguacggcgaggccuacaccgacaccuaccacagcuacgccaacaagauccugagaacccaggagagcgccugcaacugcaucggcggcaacugcuaccugaugaucaccgacggcagcgccagcggcgugagcgagugcagauuccugaagaucagagagggcagaaucaucaaggagaucuuccccaccggcagagugaagcacaccgaggagugcaccugcggcuucgccagcaacaagaccaucgagugcgccugcagagacaacagcuacaccgccaagagacccuucgugaagcugaacguggagaccgacaccgccgagaucagacugaugugcaccgacaccuaccuggacacccccagacccgacgacggcagcaucaccggccccugcgagagcaacggcgacaagggcagcggcggcaucaagggcggcuucgugcaccagagaauggagagcaagaucggcagaugguacagcagaaccaugagcaagaccgagagaaugggcaugggccuguacgugaaguacgacggcgaccccugggccgacagcgacgcccuggccuucagcggcgugauggugagcaugaaggagcccggcugguacagcuucggcuucgagaucaaggacaagaagugcgacgugcccugcaucggcaucgagauggugcacgacggcggcaaggagaccuggcacagcgccgccaccgccaucuacugccugaugggcagcggccagcugcugugggacaccgugaccggcguggacauggcccuguga

SEQ ID NO: 189144 - RNA, 1401 nt, Artificial Sequence
  derived and/or modified CDS sequence (opt4) from neuraminidase__InfluenzaB__AFU34620
augcugcccagcaccauccagacccugacccuguuccugaccagcggcggcgugcugcugagccuguacgugagcgcccugcugagcuaccugcuguacagcgacauccugcugaaguucagccccaccgagaucaccgcccccaccaugagccuggacugcgccaacgccagcaacgugcaggccgugaacagaagcgccaccagaggcgugaccuuccugcugcccgagcccgaguggaccuaccccagacugagcugccccggcagcaccuuccagaaggcccugcugaucagcccccacagauucggcgagaccaagggcaacagcgccccccugaucaucagagagcccuucaucgccugcggccccaacgagugcaagcacuucgcccugacccacuacgccgcccagcccggcggcuacuacaacggcaccagaggcgacagaaacaagcugagacaccugaucagcgugaagcugggcaagauccccaccguggagaacagcaucuuccacauggccgccuggagcggcagcgccugccacgacggcaaggaguggaccuacaucggcguggacggccccgacaacgacgcccugcugaaggugaaguacggcgaggccuacaccgacaccuaccacagcuacgccaacaagauccugagaacccaggagagcgccugcaacugcaucggcggcaacugcuaccugaugaucaccgacggcagcgccagcggcgugagcgagugcagauuccugaagaucagagagggcagaaucaucaaggagaucuuccccaccggcagagugaagcacaccgaggagugcaccugcggcuucgccagcaacaagaccaucgagugcgccugcagagacaacagcuacaccgccaagagacccuucgugaagcugaacguggagaccgacaccgccgagaucagacugaugugcaccgacaccuaccuggacacccccagacccgacgacggcagcaucaccggccccugcgagagcaacggcgacaagggcagcggcggcaucaagggcggcuucgugcaccagagaauggagagcaagaucggcagaugguacagcagaaccaugagcaagaccgagagaaugggcaugggccuguacgugaaguacgacggcgaccccugggccgacagcgacgcccuggccuucagcggcgugauggugagcaugaaggagcccggcugguacagcuucggcuucgagaucaaggacaagaagugcgacgugcccugcaucggcaucgagauggugcacgacggcggcaaggagaccuggcacagcgccgccaccgccaucuacugccugaugggcagcggccagcugcugugggacaccgugaccggcguggacauggcccuguga

SEQ ID NO: 189145 - RNA, 1401 nt, Artificial Sequence
  derived and/or modified CDS sequence (opt4) from neuraminidase__InfluenzaB__AFU34631
augcugcccagcaccauccagacccugacccuguuccugaccagcggcggcgugcugcugagccuguacgugagcgcccugcugagcuaccugcuguacagcgacauccugcugaaguucagccccaccgagaucaccgcccccaccaugagccuggacugcgccaacgccagcaacgugcaggccgugaacagaagcgccaccagaggcgugaccuuccugcugcccgagcccgaguggaccuaccccagacugagcugccccggcagcaccuuccagaaggcccugcugaucagcccccacagauucggcgagaccaagggcaacagcgccccccugaucaucagagagcccuucaucgccugcggccccaacgagugcaagcacuucgcccugacccacuacgccgcccagcccggcggcuacuacaacggcaccagaggcgacagaaacaagcugagacaccugaucagcgugaagcugggcaagauccccaccguggagaacagcaucuuccacauggccgccuggagcggcagcgccugccacgacggcaaggaguggaccuacaucggcguggacggccccgacaacgacgcccugcugaaggugaaguacggcgaggccuacaccgacaccuaccacagcuacgccaacaagauccugagaacccaggagagcgccugcaacugcaucagaggcaacugcuaccugaugaucaccgacggcagcgccagcggcgugagcgagugcagauuccugaagaucagagagggcagaaucaucaaggagaucuuccccaccggcagagugaagcacaccgaggagugcaccugcggcuucgccagcaacaagaccaucgagugcgccugcagagacaacagcuacaccgccaagagacccuucgugaagcugaacguggagaccgacaccgccgagaucagacugaugugcaccgacaccuaccuggacacccccagacccgacgacggcagcaucaccggccccugcgagagcaacggcgacaagggcagcggcggcaucaagggcggcuucgugcaccagagaauggagagcaagaucggcagaugguacagcagaaccaugagcaagaccgagagaaugggcaugggccuguacgugaaguacgacggcgaccccugggccgacagcgacgcccuggccuucagcggcgugauggugagcaugaaggagcccggcugguacagcuucggcuucgagaucaaggacaagaagugcgacgugcccugcaucggcaucgagauggugcacgacggcggcaaggagaccuggcacagcgccgccaccgccaucuacugccugaugggcagcggccagcugcugugggacaccgugaccggcguggacauggcccuguga

SEQ ID NO: 189146 - RNA, 1401 nt, Artificial Sequence
  derived and/or modified CDS sequence (opt4) from neuraminidase__InfluenzaB__AFU34642
augcugcccagcaccauccagacccugacccuguuccugaccagcggcggcgugcugcugagccuguacgugagcgccagccugagcuaccugcuguacagcgacauccugcugaaguucagccccaccgagaucaccgcccccaccaugagccuggacugcgccaacgccagcaacgugcaggccgugaacagaagcgccaccaagggcaugaccuuccugcugcccgagcccgaguggaccuaccccagacugagcugccccggcagcaccuuccagaaggcccugcugaucagcccccacagauucggcgagaccaagggcaacagcgccccccugaucaucagagagcccuucaucgccugcggccccaacggcugcaagcacuucgcccugacccacuacgccgcccagcccggcggcuacuacaacggcaccagaggcgacagaaacaagcugagacaccugaucagcgugaagcugggcaagauccccaccguggagaacagcaucuuccacauggccgccuggagcggcagcgccugccacgacggcaaggaguggaccuacaucggcguggacggccccgacaacaacgcccugcugaaggugaaguacggcgaggccuacaccgacaccuaccacagcuacgccaacaagauccugagaacccaggagagcgccugcaacugcaucggcggcaacugcuaccugaugaucaccgacggcagcgccagcggcgugagcgagugcagauuccugaagaucagagagggcagaaucaucaaggagaucuuccccaccggcagagugaagcacaccgaggagugcaccugcggcuucgccagcaacaagaccaucgagugcgccugcagagacaacagcuacaccgccaagagacccuucgugaagcugaacguggagaccgacaccgccgagaucagacugaugugcaccgacaccuaccuggacacccccagacccgacgacggcagcaucaccggccccugcgagagcuacggcgacaagggcagcggcggcaucaagggcggcuucgugcaccagagaauggagagcaagaucggcagaugguacagcagaaccaugagcaagaccgagagaaugggcaugggccuguacgugaaguacgacggcgaccccugggccgacagcgacgcccuggccuucagcggcgugauggugagcaugaaggagcccggcugguacagcuucggcuucgagaucaaggacaagaagugcgacgugcccugcaucggcaucgagauggugcacgacggcggcaaggagaccuggcacagcgccgccaccgccaucuacugccugaugggcagcggccagcugcugugggacaccgugaccggcguggacauggcccuguga

SEQ ID NO: 189147 - RNA, 1401 nt, Artificial Sequence
  derived and/or modified CDS sequence (opt4) from neuraminidase__InfluenzaB__AGB97261
augcugcccagcaccauccagacccugacccuguuccugaccagcggcggcgugcugcugagccuguacgugagcgccagccugagcuaccugcuguacagcgacaugcugcugaaguucagcagaaccgagaucaccgcccccaucaugccccuggacugcgccaacgccagcaacgugcaggccgugaacagaagcgccaccaagggcgugacccugcugcugcccgagcccgaguggaccuaccccagacugagcugccccggcagcaccuuccagaaggcccugcugaucagcccccacagauucggcgagaccaagggcaacagcgccccccugaucaucagagagcccuucaucgccugcggccccaaggagugcaagcacuucgcccugacccacuacgccgcccagcccggcggcuacuacaacggcaccagagaggacagaaacaagcugagacaccugaucagcgugaagcugggcaagauccccaccguggagaacagcaucuuccacauggccgccuggagcggcagcgccugccacgacggcagagaguggaccuacaucggcguggacggccccgacagcaacgcccugcugaagaucaaguacggcgaggccuacaccgacaccuaccacagcuacgccaagaacauccugagaacccaggagagcgccugcaacugcaucggcggcgacugcuaccugaugaucaccgacggccccgccagcggcaucagcgagugcagauuccugaagaucagagagggcagaaucaucaaggagaucuuccccaccggcagagugaagcacaccgaggagugcaccugcggcuucgccagcaacaagaccaucgagugcgccugcagagacaacagcuacaccgccaagagacccuucgugaagcugaacguggagaccgacaccgccgagaucagacugaugugcaccgagaccuaccuggacacccccagacccaacgacggcagcaucaccggccccugcgagagcaacggcgacaagggcagcggcggcaucaagggcggcuucgugcaccagagaauggccagcaagaucggcagaugguacagcagaaccaugagcaagaccaagagaaugggcaugggccuguacgugaaguacgacggcgaccccuggaccgacagcgaggcccuggcccugagcggcgugauggugagcauggaggagcccggcugguacagcuucggcuucgagaucaaggacaagaagugcgacgugcccugcaucggcaucgagauggugcacgacggcggcaagaccaccuggcacagcgccgccaccgccaucuacugccugaugggcagcggccagcugcugugggacaccgugaccggcgugaacaugacccuguga

SEQ ID NO: 189148 - RNA, 1401 nt, Artificial Sequence
  derived and/or modified CDS sequence (opt4) from neuraminidase__InfluenzaB__AGB97267
augcugcccagcaccauccagacccugacccuguuccugaccagcggcggcgugcugcugagccuguacgugagcgccagccugagcuaccugcuguacagcgacauccugcugaaguucagccagaccgagaucaccgcccccaucaugccccuggacugcaccaacgccagcaacgugcaggccgugaacagaagcgccgccaagggcgugacccugcugcugcccgagcccgaguggaccuaccccagacugagcugccccggcagcaccuuccagaaggcccugcugaucagcccccacagauucggcgagaucaagggcaacagcgccccccugaucaucagagagcccuucaucgccugcggccccaccgagugcaagcacuucgcccugacccacuacgccgcccagcccggcggcuacuacaacggcaccagagaggacagaaacaagcugagacaccugaucagcgugaagcugggcaagauccccaccguggagaacagcaucuuccacauggccgccuggagcggcagcgccugccacgacggcaaggaguggaccuacaucggcaucgacggccccgacagcaacgcccugcugaagaucaaguacggcgaggccuacaccgacaccuaccacagcuacgccaagaacauccugagaacccaggagagcgccugcaacugcaucggcggcgacugcuaccugaugaucaccgacggccccgccagcggcgugagcgagugcagauuccugaagaucagagagggcagaaucaucaaggagaucuuccccaccggcagagugaagcacaccgaggagugcaccugcggcuucgccagcaacaagaccaucgagugcgccugcagagacaacagauacaccgccaagagacccuucgugaagcugaacguggagaccgacaccgccgagaucagacugaugugcaccgagaccuaccuggacacccccagacccaacgacggcagcaucaccggccccugcgagagcgacggcgacaagggcagcggcggcaucaagggcggcuucgugcaccagagaauggccagcaagaucggcagaugguacagcagaaccaugagcaagaccaagagaaugggcaugggccuguacgugaaguacgacggcgaccccuggaccgacagcgaggcccuggcccugagcggcgugauggugagcauggaggagcccggcugguacagcuucggcuucgagaucaaggacaagaagugcgacgugcccugcaucggcaucgagauggugcacgacggcggcaagaccaccuggcacagcgccgccaccgccaucuacugccugaugggcagcggccagcugcugugggacaccgugaccggcguggacauggcccuguga

SEQ ID NO: 189149 - RNA, 1401 nt, Artificial Sequence; identical to SEQ ID NO: 188877
  derived and/or modified CDS sequence (opt4) from neuraminidase__InfluenzaB__AGR54784

SEQ ID NO: 189150 - RNA, 1401 nt, Artificial Sequence; identical to SEQ ID NO: 188742
  derived and/or modified CDS sequence (opt4) from neuraminidase__InfluenzaB__AGX15491

SEQ ID NO: 189151 - RNA, 1401 nt, Artificial Sequence
  derived and/or modified CDS sequence (opt4) from neuraminidase__InfluenzaB__AGX15533
augcugcccagcaccauccagacccugacccuguuccugaccagcggcggcgugcugcugagccuguacgugagcgccagccugagcuaccugcuguacagcgacauccugcugaaguucagccccaccgagaucaccgcccccaccaugccccuggacugcgccaacgccagcaacgugcaggccgugaacagaagcgccaccaagggcgugacccugcugcugcccgagcccgaguggaccuaccccagacugagcugccccggcagcaccuuccagaaggcccugcugaucagcccccacagauucggcgagaccaagggcaacagcgccccccugaucaucagagagcccuucaucgccugcggccccaacgagugcaagcacuucgcccugacccacuacgccgcccagcccggcggcuacuacaacggcaagagaggcgacagaaacaagcugagacaccugaucagcgugaagcugggcaagauccccaccguggagaacagcaucuuccacauggccgccuggagcggcagcgccugccacgacggcaaggaguggaccuacaucggcguggacggccccgacaacaacgcccugcugaagaucaaguacggcgaggccuacaccgacaccuaccacagcuacgccaacaacauccugagaacccaggagagcgccugcaacugcaucggcggcaacugcuaccugaugaucaccgacggcagcgccagcggcgugagcgagugcagauuccugaagaucagagagggcagaaucaucaaggagaucuuccccaccggcagagugaagcacaccgaggagugcaccugcggcuucgccagcaacaagaccaucgagugcgccugcagagacaacagcuacaccgccaagagacccuucgugaagcugaacguggagaccgacaccgccgagaucagacugaugugcaccgacaccuaccuggacacccccagacccgacgacggcagcaucaccggccccugcgagagcaacggcgacaagggcagcggcggcaucaagggcggcuucgugcaccagagaauggccagcaaggugggcagaugguacagcagaaccaugagcaagaccgagagaaugggcaugggccuguacgugaaguacgacggcgaccccugggccgacagcgacgcccuggccuucagcggcgugauggugagcaugaaggagcccggcugguacagcuucggcuucgagaucaaggacaagaagugcgacgugcccugcaucggcaucgagauggugcacgacggcggcaaggagaccuggcacagcgccgccaccgccaucuacugccugaugggcagcggccagcugcugugggacaccgugaccggcguggacauggcccuguga

SEQ ID NO: 189152 - RNA, 1401 nt, Artificial Sequence; identical to SEQ ID NO: 188695
  derived and/or modified CDS sequence (opt4) from neuraminidase__InfluenzaB__AGX15545

SEQ ID NO: 189153 - RNA, 1401 nt, Artificial Sequence; identical to SEQ ID NO: 188695
  derived and/or modified CDS sequence (opt4) from neuraminidase__InfluenzaB__AGX15556

SEQ ID NO: 189154 - RNA, 1401 nt, Artificial Sequence
  derived and/or modified CDS sequence (opt4) from neuraminidase__InfluenzaB__AGX15567
augcugcccagcaccauccagacccugacccuguuccugaccagcggcggcgugcugcugagccuguacgugagcgccagccugagcuaccugcuguacagcgacauccugcugaaguuccccagcaccgagaucaccgcccccaccaugccccuggacugcgccaacgccagcaacgugcaggccgugaacagaagcgccaccaagggcgugacccugcugcugcccgagcccgaguggaccuaccccagacugagcugccccggcagcaccuuccagaaggcccugcugaucagcccccacagauucggcgagaccaagggcaacagcgccccccugaucaucagagagcccuucaucgccugcggccccaaggagugcaagcacuucgcccugacccacuacgccgcccagcccggcggcuacuacaacggcaccagaggcgacagaaacaagcugagacaccugaucagcgugaagcugggcaagauccccaccguggagaacagcaucuuccacauggccgccuggagcggcagcgccugccacgacggcaaggaguggaccuacaucggcguggacggccccgacaacaacgcccugcugaagaucaaguacggcgaggccuacaccgacaccuaccacagcuacgccaacaacauccugagaacccaggagagcgccugcaacugcaucggcggcaacugcuaccugaugaucaccgacggcagcgccagcggcgugagcgagugcagauuccugaagaucagagagggcagaaucaucaaggagaucuuccccaccggcagaaucaagcacaccgaggagugcaccugcggcuucgccagcaacaagaccaucgagugcgccugcagagacaacagcuacaccgccaagagacccuucgugaagcugaacguggagaccgacaccgccgagaucagacugaugugcaccgagaccuaccuggacacccccagacccgacgacggcagcaucaccggccccugcgagagcaacggcgacaagggcagcggcggcaucaagggcggcuucgugcaccagagaauggccagcaagaucggcagaugguacagcagaaccaugagcaagaccgagagaaugggcaugggccuguacgugaaguacgacggcgaccccugggccgacagcgacgcccuggccuucagcggcgugauggugagcauggaggagcccggcugguacagcuucggcuucgagaucaaggacaagaagugcgacgugcccugcaucggcaucgagauggugcacgacggcggcaaggagaccuggcacagcgccgccaccgccaucuacugccugaugggcagcggccagcugcugugggacaccgugaccggcgugaacauggcccuguga

SEQ ID NO: 189155 - RNA, 1401 nt, Artificial Sequence; identical to SEQ ID NO: 188695
  derived and/or modified CDS sequence (opt4) from neuraminidase__InfluenzaB__AGX15578

SEQ ID NO: 189156 - RNA, 1401 nt, Artificial Sequence; identical to SEQ ID NO: 188695
  derived and/or modified CDS sequence (opt4) from neuraminidase__InfluenzaB__AGX15589

SEQ ID NO: 189157 - RNA, 1401 nt, Artificial Sequence; identical to SEQ ID NO: 188901
  derived and/or modified CDS sequence (opt4) from neuraminidase__InfluenzaB__AGX15600

SEQ ID NO: 189158 - RNA, 1401 nt, Artificial Sequence; identical to SEQ ID NO: 188901
  derived and/or modified CDS sequence (opt4) from neuraminidase__InfluenzaB__AGX15611

SEQ ID NO: 189159 - RNA, 1401 nt, Artificial Sequence; identical to SEQ ID NO: 189021
  derived and/or modified CDS sequence (opt4) from neuraminidase__InfluenzaB__AGX15644

SEQ ID NO: 189160 - RNA, 1401 nt, Artificial Sequence; identical to SEQ ID NO: 189021
  derived and/or modified CDS sequence (opt4) from neuraminidase__InfluenzaB__AGX15655

SEQ ID NO: 189161 - RNA, 1401 nt, Artificial Sequence; identical to SEQ ID NO: 189021
  derived and/or modified CDS sequence (opt4) from neuraminidase__InfluenzaB__AGX15666

SEQ ID NO: 189162 - RNA, 1401 nt, Artificial Sequence; identical to SEQ ID NO: 189021
  derived and/or modified CDS sequence (opt4) from neuraminidase__InfluenzaB__AGX15679

SEQ ID NO: 189163 - RNA, 1401 nt, Artificial Sequence
  derived and/or modified CDS sequence (opt4) from neuraminidase__InfluenzaB__AGX15690
augcugcccagcaccauccagacccugacccuguuccugaccagcggcggcgugcugcugagccuguacgugagcgccagccugagcuaccugcuguacagcgacauccugcugaaguucagccccaccgagaucaccgcccccaccaugccccuggacugcgccaacgccagcaacgugcaggccgugaacagaagcgccaccaagggcgugacccugcugcugcccgagcccgaguggaccuaccccagacugagcugccccggcagcaccuuccagaaggcccugcugaucagcccccacagauucggcgagaccaagggcaacagcgccccccugaucaucagagagcccuucaucgccugcggccccaacgagugcaagcacuucgcccugacccacuacgccgcccagcccggcggcuacuacaacggcaccagaggcgacagaaacaagcugagacaccugaucagcgugaagcugggcaagauccccaccguggagaacagcaucuuccacauggccgccuggagcggcagcgccugccacgacggcaaggaguggaccuacaucggcguggacggccccgacaacaacgcccugcugaaggugaaguacggcgaggccuacaccgacaccuaccacagcuacgccaacaagauccugagaacccaggagagcgccugcaacugcaucggcggcaacugcuaccugaugaucaccgacggcagcgccagcggcgugagcgagugcagauuccugaagaucagagagggcagaaucaucaaggagaucuuccccaccggcagagugaagcacaccgaggagugcaccugcggcuucgccagcaacaagaccaucgagugcgccugcagagacaacagcuacaccgccaagagacccuucgugaagcugaacguggagaccgacaccgccgagaucagacugaugugcaccgacaccuaccuggacacccccagacccaacgacggcagcaucaccggccccugcgagagcaacggcgacaagggcagcggcggcaucaagggcggcuucgugcaccagagaaugaagagcaagaucggcagaugguacagcagaaccaugagcaagaccgagagaaugggcaugggccuguacgugaaguacgacggcgaccccugggccgacagcgacgcccuggccuucagcggcgugauggugagcaugaaggagcccggcugguacagcuucggcuucgagaucaaggacaagaagugcgacgugcccugcaucggcaucgagauggugcacgacggcggcaaggagaccuggcacagcgccgccaccgccaucuacugccugaugggcagcggccagcugcugugggacaccgugaccggcguggacauggcccuguga

SEQ ID NO: 189164 - RNA, 1401 nt, Artificial Sequence; identical to SEQ ID NO: 189021
  derived and/or modified CDS sequence (opt4) from neuraminidase__InfluenzaB__AGX15701

SEQ ID NO: 189165 - RNA, 1401 nt, Artificial Sequence
  derived and/or modified CDS sequence (opt4) from neuraminidase__InfluenzaB__AGX15712
augcugcccagcaccauccagacccugacccuguuccugaccagcggcggcgugcugcugagccuguacgugagcgccagccugagcuaccugcuguacagcgacauccugcugaaguucagccccaccgagaucaccgcccccaccaugccccuggacugcgccaacgccagcaacgugcaggccgugaacagaagcgccaccaagggcgugacccugcugcugcccgagcccgaguggaccuaccccagacugagcugccccggcagcaccuuccagaaggcccugcugaucagcccccacagauucggcgagcccaagggcaacagcgccccccugaucaucagagagcccuucaucgccugcggccccaacgagugcaagcacuucgcccugacccacuacgccgcccagcccggcggcuacuacaacggcaccagaggcgacagaaacaagcugagacaccugaucagcgugaagcugggcaagauccccaccguggagaacagcaucuuccacauggccgccuggagcggcagcgccugccacgacggcaaggaguggaccuacaucggcguggacggccccgacaacaacgcccugcugaaggugaaguacggcgaggccuacaccgacaccuaccacagcuacgccaacaagauccugagaacccaggagagcgccugcaacugcaucggcggcaacugcuaccugaugaucaccgacggcagcgccagcggcgugagcgagugcagauuccugaagaucagagagggcagaaucaucaaggagaucuuccccaccggcagagugaagcacaccgaggagugcaccugcggcuucgccagcaacaagaccaucgagugcgccugcagagacaacagcuacaccgccaagagacccuucgugaagcugaacguggagaccgacaccgccgagaucagacugaugugcaccgacaccuaccuggacacccccagacccaacgacggcagcaucaccggccccugcgagagcgacggcgacaagggcagcggcggcaucaagggcggcuucgugcaccagagaauggagagcaagaucggcagaugguacagcagaaccaugagcaagaccgagagaaugggcaugggccuguacgugaaguacgacggcgaccccugggccgacagcgacgcccuggccuucagcggcgugauggugagcaugaaggagcccggcugguacagcuucggcuucgagaucaaggacaagaagugcgacgugcccugcaucggcaucgagauggugcacgacggcggcaaggagaccuggcacagcgccgccaccgccaucuacugccugaugggcagcggccagcugcugugggacaccgugaccggcgugaacauggcccuguga

SEQ ID NO: 189166 - RNA, 1401 nt, Artificial Sequence; identical to SEQ ID NO: 189021
  derived and/or modified CDS sequence (opt4) from neuraminidase__InfluenzaB__AGX15723

SEQ ID NO: 189167 - RNA, 1401 nt, Artificial Sequence; identical to SEQ ID NO: 189021
  derived and/or modified CDS sequence (opt4) from neuraminidase__InfluenzaB__AGX15745

SEQ ID NO: 189168 - RNA, 1401 nt, Artificial Sequence; identical to SEQ ID NO: 189021
  derived and/or modified CDS sequence (opt4) from neuraminidase__InfluenzaB__AGX15757

SEQ ID NO: 189169 - RNA, 1401 nt, Artificial Sequence
  derived and/or modified CDS sequence (opt4) from neuraminidase__InfluenzaB__AGX15768
augcugcccagcaccauccagacccugacccuguuccugaccagcggcggcgugcugcugagccuguacgugagcgccagccugagcuaccugcuguacagcgacauccugcugaaguucagccccaccgagaucaccgcccccaccaugccccuggacugcgccaacgccagcaacgugcaggccgugaacagaagcgccaccaagggcgugacccugcugcugcccgagcccgaguggaccuaccccagacugagcugccccggcagcaccuuccagaaggcccugcugaucagcccccacagauucggcgagaccaagggcaacagcgccccccugaucaucagagagcccuucaucgccugcggccccaacgagugcaagcacuucgcccugacccacuacgccgcccagcccggcggcuacuacaacggcaccagaggcgacagaaacaagcugagacaccugaucagcgugaagcugggcaagauccccaccguggagaacagcaucuuccacauggccgccuggagcggcagcgccugccacgacggcaaggaguggaccuacaucggcguggacggccccgacaacaacgcccugcugaaggugaaguacggcgaggccuacaccgacaccuaccacagcuacgccaacaagauccugagaacccaggagagcgccugcaacugcaucggcggcaacugcuaccugaugaucaccgacggcagcgccagcggcgugagcgagugcagauuccugaagaucagagagggcagaaucaucaaggagaucuuccccaccggcagagugaagcacaccgaggagugcaccugcggcuucgccagcaacaagaccaucgagugcgccugcagagacaacagcuacaccgccaagagacccuucgugaagcugaacguggagaccgacaccgccgagaucagacugaugugcaccgacaccuaccuggacacccccagacccaacgacggcagcaucaccggccccugcgagagcaacggcgacaagggcagcggcggcaucaagggcggcuucgugcaccagagaauggagagcaagaucggcagaugguacagcagaaccaugagcaagaccgagagaaugggcaugggccuguacgugaaguacgacggcgaccccugggccgacagcgacgcccuggccuucagcggcgugaugaucagcaugaaggagcccggcugguacagcuucggcuucgagaucaaggacaagaagugcgacgugcccugcaucggcaucgagauggugcacgacggcggcaaggagaccuggcacagcgccgccaccgccaucuacugccugaugggcagcggccagcugcugugggacaccgugaccggcguggacauggcccuguga

SEQ ID NO: 189170 - RNA, 1401 nt, Artificial Sequence
  derived and/or modified CDS sequence (opt4) from neuraminidase__InfluenzaB__AGX15801
augcugcccagcaccauccagacccugacccuguuccugaccagcggcggcgugcugcugagccuguacgugagcgccagccugagcuaccugcuguacagcgacauccugcugaaguucagccccaccgagaucaccgcccccaccaugagccuggacugcgugaacgccagcaacgugcaggccgugaacagaagcgccaccaagggcgugacccugcugcugcccgagcccgaguggaccuaccccagacugagcugccccggcagcaccuuccagaaggcccugcugaucagcccccacagauucggcgagaccaagggcaacagcgccccccugaucaucagagagcccuucaucgccugcggccccaacgagugcaagcacuucgcccugacccacuacgccgcccagcccggcggcuacuacaacggcaccagaggcgacagaaacaagcugagacaccugaucagcgugaagcugggcaagauccccaccguggagaacagcaucuuccacauggccgccuggagcggcagcgccugccacgacggcaaggaguggaccuacaucggcguggacggccccgacaacaacgcccugcugaaggugaaguacggcgaggccuacaccgacaccuaccacagcuacgccaacaagauccugagaacccaggagagcgccugcaacugcaucggcggcaacugcuaccugaugaucaccgacggcagcgccagcggcgugagcgagugcagauuccugaagaucagagagggcagaaucaucaaggagaucuuccccaccggcagagugaagcacaccgaggagugcaccugcggcuucgccagcaacaagaccaucgagugcgccugcagagacaacagcuacaccgccaagagacccuucgugaagcugaacguggagaccgacaccgccgagaucagacugaugugcaccgacaccuaccuggacacccccagacccaacgacggcagcaucaccggccccugcgagagcaacggcgacaagggcagcggcggcaucaagggcggcuucgugcaccagagaauggagagcaagaucggcagaugguacagcagaaccaugagcaagaccgagagaaugggcaugggccuguacgugaaguacgacggcgaccccugggccgacagcgacgcccuggccuucagcggcgugauggugagcaugaaggagcccggcugguacagcuucggcuucgagaucaaggacaagaagugcgacgugcccugcaucggcaucgagauggugcacgacggcggcaaggagaccuggcacagcgccgccaccgccaucuacugccugaugggcagcggccagcugcugugggacaccgugaccggcguggacauggcccuguga

SEQ ID NO: 189171 - RNA, 1401 nt, Artificial Sequence; identical to SEQ ID NO: 189021
  derived and/or modified CDS sequence (opt4) from neuraminidase__InfluenzaB__AGX15812

SEQ ID NO: 189172 - RNA, 1401 nt, Artificial Sequence; identical to SEQ ID NO: 189021
  derived and/or modified CDS sequence (opt4) from neuraminidase__InfluenzaB__AGX15823

SEQ ID NO: 189173 - RNA, 1401 nt, Artificial Sequence; identical to SEQ ID NO: 188955
  derived and/or modified CDS sequence (opt4) from neuraminidase__InfluenzaB__AGX15845

SEQ ID NO: 189174 - RNA, 1401 nt, Artificial Sequence; identical to SEQ ID NO: 188932
  derived and/or modified CDS sequence (opt4) from neuraminidase__InfluenzaB__AGX15856

SEQ ID NO: 189175 - RNA, 1401 nt, Artificial Sequence; identical to SEQ ID NO: 188955
  derived and/or modified CDS sequence (opt4) from neuraminidase__InfluenzaB__AGX15867

SEQ ID NO: 189176 - RNA, 1401 nt, Artificial Sequence; identical to SEQ ID NO: 188955
  derived and/or modified CDS sequence (opt4) from neuraminidase__InfluenzaB__AGX15889

SEQ ID NO: 189177 - RNA, 1401 nt, Artificial Sequence
  derived and/or modified CDS sequence (opt4) from neuraminidase__InfluenzaB__AGX15900
augcugcccagcaccauccagacccugacccuguuccugaccagcggcggcgugcugcugagccuguacgugagcgcccugcugagcuaccugcuguacagcgacauccugcugaaguucagccccaccgagaucaccgcccccaccaugagccuggacugcgccaacaccagcaacgugcaggccgugaacagaagcgccaccaagggcgugaccuuccugcugcccgagcccgaguggaccuaccccagacugagcugccccggcagcaccuuccagaaggcccugcugaucagcccccacagauucggcgagaccaagggcaacagcgccccccugaucaucagagagcccuucaucgccugcggccccaacgagugcaagcacuucgcccugacccacuacgccgcccagcccggcggcuacuacaacggcaccagaggcgacagaaacaagcugagacaccugaucagcgugaagcugggcaagauccccaccguggagaacagcaucuuccacauggccgccuggagcggcagcgccugccacgacggcaaggaguggaccuacaucggcguggacggccccgacaacgacgcccugcugaaggugaaguacggcgaggccuacaccgacaccuaccacagcuacgccaacaagauccugagaacccaggagagcgccugcaacugcaucggcggcaacugcuaccugaugaucaccgacggcagcgccagcggcgugagcgagugcagauuccugaagaucagagagggcagaaucaucaaggagaucuuccccaccggcagagugaagcacaccgaggagugcaccugcggcuucgccagcaacaagaccaucgagugcgccugcagagacaacagcuacaccgccaagagacccuucgugaagcugaacguggagaccgacaccgccgagaucagacugaugugcaccgacaccuaccuggacacccccagacccgacgacggcagcaucaccggccccugcgagagcaacggcgacaagggcagcggcggcaucaagggcggcuucgugcaccagagaauggagagcaagaucggcagaugguacagcagaaccaugagcaagaccgagagaagaggcaugggccuguacgugaaguacgacggcgaccccugggccgacagcgacgcccuggccuucagcggcgugauggugagcaugaaggagcccggcugguacagcuucggcuucgagaucaaggacaagaagugcgacgugcccugcaucggcaucgagauggugcacgacggcggcaaggagaccuggcacagcgccgccaccgccaucuacugccugaugggcagcggccagcugcugugggacaccgugaccggcguggacauggcccuguga

SEQ ID NO: 189178 - RNA, 1401 nt, Artificial Sequence; identical to SEQ ID NO: 188955
  derived and/or modified CDS sequence (opt4) from neuraminidase__InfluenzaB__AGX15911

SEQ ID NO: 189179 - RNA, 1401 nt, Artificial Sequence
  derived and/or modified CDS sequence (opt4) from neuraminidase__InfluenzaB__AGX15933
augcugcccagcaccauccagacccugacccuguuccugaccagcggcggcgugcugcugagccuguacgugagcgccagccugagcuaccugcuguacagcgacauccugcugaaguucagccccaccgagaucaccgcccccgccaugccccuggacugcgccaacgccagcaacgugcaggccgugaacagaagcgccaccaagggcgugacccugcugcugcccgagcccgaguggaccuaccccagacugagcugccccggcagcaccuuccagaaggcccugcugaucagcccccacagauucggcgagaccaagggcaacagcgccccccugaucaucagagagcccuucaucgccugcggccccaacgagugcaagcacuucgcccugacccacuacgccgcccagcccggcggcuacuacaacggcaccagaggcgacagaaacaagcugagacaccugaucagcgugaagcugggcaagauccccaccguggagaacagcaucuuccacauggccgccuggagcggcagcgccugccacgacggcaaggaguggaccuacaucggcguggacggccccgacaacaacgcccugcugaaggugaaguacggcgaggccuacaccgacaccuaccacagcuacgccaacaagauccugagaacccaggagagcgccugcaacugcaucggcggcaacugcuaccugaugaucaccgacggcagcgccagcggcgugagcgagugcagauuccugaagaucagagagggcagaaucaucaaggagaucuuccccaccggcagagugaagcacaccgaggagugcaccugcggcuucgccagcaacaagaccaucgagugcgccugcagagacaacagcuacaccgccaagagacccuucgugaagcugaacguggagaccgacaccgccgagaucagacugaugugcaccgacaccuaccuggacacccccagacccaacgacggcagcaucaccggccccugcgagagcgacggcgacaagggcagcggcggcaucaagggcggcuucgugcaccagagaauggagagcaagaucggcagaugguacagcagaaccaugagcaagaccgagagaaugggcaugggccuguacgugaaguacgacggcgaccccugggccgacagcgacgcccuggccuucagcggcgugauggugagcaugaaggagcccggcugguacagcuucggcuucgagaucaaggacaagaagugcgacgugcccugcaucggcaucgagauggugcacgacggcggcaaggagaccuggcacagcgccgccaccgccaucuacugccugaugggcagcggccagcugcugugggacaccgugaccggcguggacauggcccuguga

SEQ ID NO: 189180 - RNA, 1401 nt, Artificial Sequence; identical to SEQ ID NO: 188955
  derived and/or modified CDS sequence (opt4) from neuraminidase__InfluenzaB__AGX15944

SEQ ID NO: 189181 - RNA, 1401 nt, Artificial Sequence; identical to SEQ ID NO: 189016
  derived and/or modified CDS sequence (opt4) from neuraminidase__InfluenzaB__AGX15966

SEQ ID NO: 189182 - RNA, 1401 nt, Artificial Sequence
  derived and/or modified CDS sequence (opt4) from neuraminidase__InfluenzaB__AGX15988
augcugcccagcaccauccagacccugacccuguuccugaccagcggcggcgugcugcugagccuguacgugagcgccagccugagcuaccugcuguacagcgacauccugcugaaguucagccccaccgagaucaccgcccccaccaugccccuggacugcgccaacgccagcaacgugcaggccgugaacagaagcgccaccaagggcgugacccugcugcugcccgagcccgaguggaccuaccccagacugagcugccccggcagcaccuuccagaaggcccugcugaucagcccccacagauucggcgagaccaagggcaacagcgccccccugaucaucagagagcccuucaucgccugcggccccaacgagugcaagcacuucgcccugacccacuacgccgcccagcccggcggcuacuacaacggcaccagaggcgacagaaacaagcugagacaccugaucagcgugaagcugggcaagauccccaccguggagaacagcaucuuccacauggccgccuggagcggcagcgccugccacgacggcaaggaguggaccuacaucggcguggacggccccgacaacaacgcccugcugaaggugaaguacggcgaggccuacaccgacaccuaccacagcuacgccaacaagauccugagaacccaggagagcgccugcaacugcaucggcggcaacugcuaccugaugaucaccgacggcagcgccagcggcgugagcgagugcagauuccugaagaucagagagggcagaaucaucaaggagaucuuccccaccggcagagugaagcacaccgaggagugcaccugcggcuucgccagcaacaagaccaucgagugcgccugcagagacaacagcuacaccgccaagagacccuucgugaagcugaacguggagaccgacaccgccgaggugagacugaugugcaccgacaccuaccuggacacccccagacccaacgacggcagcaucaccggccccugcgagagcgacggcgacaagggcagcggcggcaucaagggcggcuucgugcaccagagaauggagagcaagaucggcagaugguacagcagaaccaugagcaagaccgagagaaugggcaugggccuguacgugaaguacgacggcgaccccugggccgacagcgacgcccugaccuucagcggcgugauggugagcaugaaggagcccggcugguacagcuucggcuucgagaucaaggacaagaagugcgacgugcccugcaucggcaucgagauggugcacgacggcggcaaggagaccuggcacagcgccgccaccgccaucuacugccugaugggcagcggccagcugcugugggacaccgugaccggcguggacauggcccuguga

SEQ ID NO: 189183 - RNA, 1401 nt, Artificial Sequence; identical to SEQ ID NO: 189016
  derived and/or modified CDS sequence (opt4) from neuraminidase__InfluenzaB__AGX15999

SEQ ID NO: 189184 - RNA, 1401 nt, Artificial Sequence; identical to SEQ ID NO: 189016
  derived and/or modified CDS sequence (opt4) from neuraminidase__InfluenzaB__AGX16010

SEQ ID NO: 189185 - RNA, 1401 nt, Artificial Sequence; identical to SEQ ID NO: 189016
  derived and/or modified CDS sequence (opt4) from neuraminidase__InfluenzaB__AGX16021

SEQ ID NO: 189186 - RNA, 1401 nt, Artificial Sequence
  derived and/or modified CDS sequence (opt4) from neuraminidase__InfluenzaB__AGX16032
augcugcccagcaccauccagacccugacccuguuccugaccagcggcggcgugcugcugagccuguacgugagcgccagccugagcuaccugcuguacagcgacauccugcugaaguucagccagaccgagaucaccgcccccaucaugccccuggacugcgccaacgccagcaacgugcaggccgugaacagaagcgccaccaagggcgugacccugcugcugcccgagcccgaguggaccuaccccagacugagcugccccggcagcaccuuccagaaggcccugcugaucagcccccacagauucggcgagaccaagggcaacagcgccccccugaucaucagagagcccuucaucgccugcggccccaaggagugcaagcacuucgcccugacccacuacgccgcccagcccggcggcuacuacaacggcaccagagaggacagaaacaagcugagacaccugaucagcgugaagcugggcaagauccccaccguggagaacagcaucuuccacauggccgccuggagcggcagcgccugccacgacggcaaggaguggaccuacaucggcguggacggccccgacagcaacgcccugcugaagaucaaguacggcgaggccuacaccgacaccuaccacagcuacgccaagaacauccugagaacccaggagagcgccugcaacugcaucggcggcgacugcuaccugaugaucaccgacggccccgccagcggcaucagcgagugcagauuccugaagaucagagagggcagaaucaucaaggagaucuuccccaccggcagagugaagcacaccgaggagugcaccugcggcuucgccagcaacaagaccaucgagugcgccugcagagacaacagcuacaccgccaagagacccuucgugaagcugaacguggagaccgacaccgccgagaucagacugaugugcaccgagaccuaccuggacacccccagacccaacgacggcagcaucaccggccccugcgagagcgacggcgacaagggcagcggcggcaucaagggcggcuucgugcaccagagaauggccagcaagaucggcagaugguacagcagaaccaugagcaagaccaagagaaugggcaugggccuguacgugaaguacgacggcgaccccuggaccgacagcgaggcccuggcccugagcggcgugauggugagcauggaggagcccggcugguacagcuucggcuucgagaucaaggacaagaagugcgacgugcccugcaucggcaucgagauggugcacgacggcggcaagaccaccuggcacagcgccgccaccgccaucuacugccugaugggcagcggccagcugcugugggacaccgugaccggcguggacauggcccuguga

SEQ ID NO: 189187 - RNA, 1401 nt, Artificial Sequence; identical to SEQ ID NO: 188803
  derived and/or modified CDS sequence (opt4) from neuraminidase__InfluenzaB__AGX16043

SEQ ID NO: 189188 - RNA, 1401 nt, Artificial Sequence; identical to SEQ ID NO: 188805
  derived and/or modified CDS sequence (opt4) from neuraminidase__InfluenzaB__AGX16054

SEQ ID NO: 189189 - RNA, 1401 nt, Artificial Sequence
  derived and/or modified CDS sequence (opt4) from neuraminidase__InfluenzaB__AGX16087
augcugcccagcaccauccagacccugacccuguuccugaccagcggcggcgugcugcugagccuguacgugagcgccagccugagcuaccugcuguacagcgacauccugcugaaguucagccagaccgagaucaccgcccccaucaugccccuggacugcgccaacgccagcaacgugcaggccgugaacagaagcgccaccaagggcgugacccugcugcugcccgagcccgaguggaccuaccccagacugagcugccccggcagcaccuuccagaaggcccugcugaucagcccccacagauucggcgagaccaagggcaacagcgccccccugaucaucagagagcccuucaucgccugcggccccaaggagugcaagcacuucgcccugacccacuacgccgcccagcccggcggcuacuacaacggcaccagagaggacagaaacaagcugagacaccugaucagcgugaagcugggcaagauccccaccguggagaacagcaucuuccacauggccgccuggagcggcagcgccugccacgacggcagagaguggaccuacaucggcguggacggccccgacagcaacgcccugcugaagaucaaguacggcgaggccuacaccgacaccuaccacagcuacgccaagaacauccugagaacccaggagagcgccugcaacugcaucggcggcgacugcuaccugaugaucaccgacggccccgccagcggcaucagcgagugcagauuccugaagaucagagagggcagaaucaucaaggagaucuuccccaccggcagagugaagcacaccgaggagugcaccugcggcuucgccagcaacaagaccaucgagugcgccugcagagacaacaacuacaccgccaagagacccuucgugaagcugaacguggagaccgacaccgccgagaucagacugaugugcaccgagaccuaccuggacacccccagacccaacgacggcagcaucaccggccccugcgagagcaacggcgacaagggcagcggcggcaucaagggcggcuucgugcaccagagaauggccagcaagaucggcagaugguacagcagaaccaugagcaagaccaagagaaugggcaugggccuguacgugaaguacgacggcgaccccuggaccgacagcgaggcccuggcccugagcggcgugauggugagcauggaggagcccggcugguacagcuucggcuucgagaucaaggacaagaagugcgacgugcccugcaucggcaucgagauggugcacgacggcggcaagaccaccuggcacagcgccgccaccgccaucuacugccugaugggcagcggccagcugcugugggacaccgugaccggcguggacauggcccuguga

SEQ ID NO: 189190 - RNA, 1401 nt, Artificial Sequence
  derived and/or modified CDS sequence (opt4) from neuraminidase__InfluenzaB__AGX16109
augcugcccagcaccauccagacccugacccuguuccugaccagcggcggcgugcugcugagccuguacgugagcgccagccugagcuaccugcuguacagcgacauccugcugaaguucagccagaccgagaucaccgcccccaccaugccccuggacugcgccaacgccagcaacgugcaggccgugaacagaagcgccaccaagggcgugacccugcugcugcccgagcccgaguggaccuaccccagacugagcugccccggcagcaccuuccagaaggcccugcugaucagcccccacagauucggcgagaccaagggcaacagcgccccccugaucaucagagagcccuucaucgccugcggccccaaggagugcaagcacuucgcccugacccacuacgccgcccagcccggcggcuacuacaacggcaccagagaggacagaaacaagcugagacaccugaucagcgugaagcugggcaagauccccaccguggagaacagcaucuuccacauggccgccuggagcggcagcgccugccacgacggcagagaguggaccuacgugggcguggacggccccgacagcaacgcccugcugaagaucaaguacggcgaggccuacaccgacaccuaccacagcuacgccaagaacauccugagaacccaggagagcgccugcaacugcaucggcggcgacugcuaccugaugaucaccgacggccccgccagcggcaucagcgagugcagauuccugaagaucagagagggcagaaucaucaaggagaucuuccccaccggcagagugaagcacaccgaggagugcaccugcggcuucgccagcaacaagaccaucgagugcgccugcagagacaacagcuacaccgccaagagacccuucgugaagcuggacguggagaccgacaccgccgagaucagacugaugugcaccgagaccuaccuggacacccccagacccaacgacggcagcaucaccggccccugcgaggccaacggcgacaagggcagcggcggcaucaagggcggcuucgugcaccagagaauggccagcaagaucggcagaugguacagcagaaccaugagcaagaccaagagaaugggcaugggccuguacgugaaguacgacggcgaccccuggaccgacagcgaggcccuggcccugagcggcgugauggugagcauggaggagcccggcugguacagcuucggcuucgagaucaaggacaagaagugcgacgugcccugcaucggcaucgagauggugcacgacggcggcaagaccaccuggcacagcgccgccaccgccaucuacugccugaugggcagcggccagcugcugugggacaccgugaccggcguggacauggcccuguga

SEQ ID NO: 189191 - RNA, 1401 nt, Artificial Sequence
  derived and/or modified CDS sequence (opt4) from neuraminidase__InfluenzaB__AGX16120
augcugcccagcaccauccagacccugacccuguuccugaccagcggcggcgugcugcugagccuguacgugagcgccagccugagcuaccugcuguacagcgacauccugcugaaguucagcaccaccgagaucaccgcccccaccaugccccuggacugcgccaacgccagcaacgugcaggccgugaacagaagcgccaccaagggcgugaccuuccugcugcccgagcccgaguggaccuaccccagacugagcugccccggcagcaccuuccagaaggcccugcugaucagcccccacagauucggcgagaccaagggcaacagcgccccccugaucaucagagagcccuucaucgccugcggccccaaggagugcaagcacuucgcccugacccacuacgccgcccagcccggcggcuacuacaacggcaccagagaggacagaaacaagcugagacaccugaucagcgugaagcugggcaagauccccaccguggagaacagcaucuuccacauggccgccuggagcggcagcgccugccacgacggcaaggaguggaccuacaucggcguggacggccccgacagcaacgcccugcugaagaucaaguacggcgaggccuacaccgacaccuaccacagcuacgccaacaacauccugagaacccaggagagcgccugcaacugcaucggcggcaacugcuaccugaugaucaccgacggcagcgccagcggcaucagcgagugcagauuccugaagaucagagagggcagaaucaucaaggagaucuuccccaccggcagagugaagcacaccgaggagugcaccugcggcuucgccagcaacaagaccaucgagugcgccugcagagacaacagcuacaccgccaagagacccuucgugaagcugaacguggagaccgacaccgccgagaucagacugaugugcaccgagaccuaccuggacacccccagacccgacgacggcagcaucaccggccccugcgagagcaacggcaacaagggcagcggcggcaucaagggcggcuucgugcaccagagaauggccagcaagaucggcagaugguacagcagaaccaugagcaagaccaagagaaugggcaugggccuguacgugaaguacgacggcgaccccuggaccgacagcgacgcccuggcccugagcggcgugauggugagcauggaggagcccggcugguacagcuucggcuucgagaucaaggacaagaagugcgacgugcccugcaucggcaucgagauggugcacgacggcggcaaggagaccuggcacagcgccgccaccgccaucuacugccugaugggcagcggccagcugcugugggacaccgugaccggcguggacauggcccuguga

SEQ ID NO: 189192 - RNA, 1401 nt, Artificial Sequence; identical to SEQ ID NO: 189191
  derived and/or modified CDS sequence (opt4) from neuraminidase__InfluenzaB__AGX16131

SEQ ID NO: 189193 - RNA, 1401 nt, Artificial Sequence; identical to SEQ ID NO: 189191
  derived and/or modified CDS sequence (opt4) from neuraminidase__InfluenzaB__AGX16142

SEQ ID NO: 189194 - RNA, 1401 nt, Artificial Sequence
  derived and/or modified CDS sequence (opt4) from neuraminidase__InfluenzaB__AGX16153
augcugcccagcaccauccagacccugacccuguuccugaccagcggcggcgugcugcugagccuguacgugagcgccagccugagcuaccugcuguacagcgacauccugcugaaguucagccagaccgagaucaccgcccccaucaugccccuggacugcgccaacgccagcaacgugcaggccgugaacagaagcgccaccagaggcgugacccugcugcugcccgagcccgaguggaccuaccccagacugagcugccccggcagcaccuuccagaaggcccugcugaucagcccccacagauucggcgagaccaagggcaacagcgccccccugaucaucagagagcccuucaucgccugcggccccaaggagugcaagcacuucgcccugacccacuacgccgcccagcccggcggcuacuacaacggcaccagagaggacagaaacaagcugagacaccugaucagcgugaagcugggcaagauccccaccguggagaacagcaucuuccacaugaccgccuggagcggcagcgccugccacgacggcagagaguggaccuacaucggcguggacggccccgacagcaacgcccugcugaagaucaaguacggcgaggccuacaccgacaccuaccacagcuacgccaagaacauccugagaacccaggagagcgccugcaacugcaucggcggcgacugcuaccugaugaucaccgacggccccgccagcggcaucagcgagugcagauuccugaagaucagagagggcagaaucaucaaggagaucuuccccaccggcagagugaagcacaccgaggagugcaccugcggcuucgccagcaacaagaccaucgagugcgccugcagagacaacagcuacaccgccaagagacccuucgugaagcugaacguggagaccgacaccgccgagaucagacugaugugcaccgagaccuaccuggacacccccagacccaacgacggcagcaucaccggccccugcgagagcaacggcgacaagggcagcggcggcaucaagggcggcuucgugcaccagagaauggccagcaagaucggcagaugguacagcagaaccaugagcaagaccaagagaaugggcaugggccuguacgugaaguacgacggcgaccccuggaccgacagcgaggcccuggcccugagcggcgugauggugagcauggaggagcccggcugguacagcuucggcuucgagaucaaggacaagaagugcgacgugcccugcaucggcaucgagauggugcacgacggcggcaagaccaccuggcacagcgccgccaccgccaucuacugccugaugggcagcggccagcugcugugggacaccgugaccggcguggacauggcccuguga

SEQ ID NO: 189195 - RNA, 1401 nt, Artificial Sequence; identical to SEQ ID NO: 189189
  derived and/or modified CDS sequence (opt4) from neuraminidase__InfluenzaB__AGX16164

SEQ ID NO: 189196 - RNA, 1401 nt, Artificial Sequence; identical to SEQ ID NO: 188848
  derived and/or modified CDS sequence (opt4) from neuraminidase__InfluenzaB__AGX16197

SEQ ID NO: 189197 - RNA, 1401 nt, Artificial Sequence; identical to SEQ ID NO: 188848
  derived and/or modified CDS sequence (opt4) from neuraminidase__InfluenzaB__AGX16208

SEQ ID NO: 189198 - RNA, 1401 nt, Artificial Sequence; identical to SEQ ID NO: 188848
  derived and/or modified CDS sequence (opt4) from neuraminidase__InfluenzaB__AGX16219

SEQ ID NO: 189199 - RNA, 1401 nt, Artificial Sequence; identical to SEQ ID NO: 188687
  derived and/or modified CDS sequence (opt4) from neuraminidase__InfluenzaB__AGX16230

SEQ ID NO: 189200 - RNA, 1401 nt, Artificial Sequence
  derived and/or modified CDS sequence (opt4) from neuraminidase__InfluenzaB__AGX16241
augcugcccagcaccauccagacccugacccuguuccugaccagcggcggcgugcugcugagccuguacgugagcgccagccugagcuaccugcuguacagcgacauccugcugaaguucagccagaccgagaucaccgcccccaucaugccccuggacugcgccaacgccagcaacgugcaggccgugaaccacagcgccaccaagggcgugacccugcugcugcccgagcccgaguggaccuaccccagacugagcugccccggcagcaccuuccagaaggcccugcugaucagcccccacagauucggcgagaccaagggcaacagcgccccccugaucaucagagagcccuucaucgccugcggccccaaggagugcaagcacuucgcccugacccacuacgccgcccagcccggcggcuacuacaacggcaccagagaggacagaaacaagcugagacaccugaucagcgugaagcugggcaagauccccaccguggagaacagcaucuuccacauggccgccuggagcggcagcgccugccacgacggcagagaguggaccuacaucggcguggacggccccgacagcaacgcccugcugaagaucaaguacggcgaggccuacaccgacaccuaccacagcuacgccaagaacauccugagaacccaggagagcgccugcaacugcaucggcggcgacugcuaccugaugaucaccgacggccccgccagcggcaucagcgagugcagauuccugaagaucagagagggcagaaucaucaaggagaucuuccccaccggcagagugaagcacaccgaggagugcaccugcggcuucgccagcaacaagaccaucgagugcgccugcagagacaacagcuacaccgccaagagacccuucgugaagcugaacguggagaccgacaccgccgagaucagacugaugugcaccgagaccuaccuggacacccccagacccaacgacggcagcaucaucggccccugcgagagcaacggcgacaagggcagcggcggcaucaagggcggcuucgugcaccagagaauggccagcaagaucggcagaugguacagcagaaccaugagcaagaccaagagaaugggcaugggccuguacgugaaguacgacggcgaccccuggaccgacagcgaggcccugacccugagcggcgugauggugagcauggaggagcccggcugguacagcuucggcuucgagaucaaggacaagaagugcgacgugcccugcaucggcaucgagauggugcacgacggcggcaagaccaccuggcacagcgccgccaccgccaucuacugccugaugggcagcggccagcugcugugggacaccgugaccggcguggacauggcccuguga

SEQ ID NO: 189201 - RNA, 1401 nt, Artificial Sequence
  derived and/or modified CDS sequence (opt4) from neuraminidase__InfluenzaB__AGX16252
augcugcccagcaccauccagacccugacccuguuccugaccagcggcggcgugcugcugagccuguacgugagcgccagccugagcuaccugcuguacagcgacauccugcugaaguucagccagaccgagaucaccgcccccaucaugccccuggacugcgccaacgccagcaacgugcaggccgugaacagaagcgccgccaagggcgugacccugcugcugcccgagcccgagugggccuaccccagacugagcugccccggcagcaccuuccagaaggcccugcugaucagcccccacagauucggcgagaccaagggcaacagcgccccccugaucaucagagagcccuucaucgccugcggccccaccgagugcaagcacuucgcccugacccacuacgccgcccagcccggcggcuacuacaacggcaccagagaggacagaaacaagcugagacaccugaucagcgugaagcugggcaagauccccaccguggagaacagcaucuuccacauggccgccuggagcggcagcgccugccacgacggcaaggaguggaccuacaucggcguggacggccccgacagcaacgcccugcugaagaucaaguacggcgaggccuacaccgacaccuaccacagcuacgccaagaacauccugagaacccaggagagcgccugcaacugcaucggcggcgacugcuaccugaugaucaccgacggccccgccagcggcaucagcgagugcagauuccugaagaucagagagggcagaaucaucaaggagaucuuccccaccggcagagugaagcacaccgaggagugcaccugcggcuucgccagcaacaagaccaucgagugcgccugcagagacaacagauacaccgccaagagacccuucgugaagcugaacguggagaccgacaccgccgagaucagacugaugugcaccgagaccuaccuggacacccccagacccaacgacggcagcaucaccggccccugcgagagcgacggcgacaagggcagcggcggcaucaagggcggcuucgugcaccagagaauggccagcaagaucggcagaugguacagcagaaccaugagcaagaccaagagaaugggcaugggccuguacgugaaguacgacggcgaccccuggaccgacagcgaggcccuggcccugagcggcgugauggugagcauggaggagcccggcugguacagcuucggcuucgagaucaaggacaagaagugcgacgugcccugcaucggcaucgagauggugcacgacggcggcaagaccaccuggcacagcgccgccaccgccaucuacugccugaugggcagcggccagcugcugugggacaccgugaccggcguggacauggcccuguga

SEQ ID NO: 189202 - RNA, 1401 nt, Artificial Sequence; identical to SEQ ID NO: 188848
  derived and/or modified CDS sequence (opt4) from neuraminidase__InfluenzaB__AGX16274

SEQ ID NO: 189203 - RNA, 1401 nt, Artificial Sequence
  derived and/or modified CDS sequence (opt4) from neuraminidase__InfluenzaB__AGX16285
augcugcccagcaccauccagacccugacccuguuccugaccagcggcggcgugcugcugagccuguacgugagcgccagccugagcuaccugcuguacagcgacauccugcugaaguucagccagaccgagaucaccgcccccaucaugccccuggacugcgccaacgccagcaacgugcaggccgugaacagaagcgccgccaagggcgugacccugcugcugcccgagcccgaguggaccuaccccagacugagcugccccggcagcaccuuccagaaggcccugcugaucagcccccacagauucggcgagaccaagggcaacagcgccccccugaucaucagagagcccuucaucgccugcggccccaccgagugcaagcacuucgcccugacccacuacgccgcccagcccggcggcuacuacaacggcaccagagaggacagaaacaagcugagacaccugaucagcgugaagcugggcaagauccccaccguggagaacagcaucuuccacauggccgccuggagcggcagcgccugccacgacggcaaggaguggaccuacaucggcguggacggccccgacagcaacgcccugcugaagaucaaguacggcgaggccuacaccgacaccuaccacagcuacgccaagaacauccugagaacccaggagagcgccugcaacugcaucggcggcgacugcuaccugaugaucaccgacggccccgccagcggcaucagcgagugcagauuccugaagaucagagagggcagaaucaucaaggagaucuuccccaccggcagagugaagcacaccgaggagugcaccugcggcuucgccagcaacaagaccaucgagugcgccugcagagacaacagcuacaccgccaagagacccuucgugaagcugaacguggagaccgacaccgccgagaucagacugaugugcaccgagaccuaccuggacacccccagacccaacgacggcagcaccaccggccccugcgagagcgacggcgacaagggcagcggcggcaucaagggcggcuucgugcaccagagaauggccagcaagaucggcagaugguacagcagaaccaugagcaagaccaagagaaugggcaugggccuguacgugaaguacgacggcgaccccuggaccgacagcgaggcccuggcccugagcggcgugauggugagcauggaggagcccggcugguacagcuucggcuucgagaucaaggacaagaagugcgacgugcccugcaucggcaucgagauggugcacgacggcggcaagaccaccuggcacagcgccgccaccgccaucuacugccugaugggcagcggccagcugcugugggacaccgugaccggcguggacauggcccuguga

SEQ ID NO: 189204 - RNA, 1401 nt, Artificial Sequence; identical to SEQ ID NO: 188848
  derived and/or modified CDS sequence (opt4) from neuraminidase__InfluenzaB__AGX16296

SEQ ID NO: 189205 - RNA, 1401 nt, Artificial Sequence; identical to SEQ ID NO: 188695
  derived and/or modified CDS sequence (opt4) from neuraminidase__InfluenzaB__AGX16307

SEQ ID NO: 189206 - RNA, 1401 nt, Artificial Sequence; identical to SEQ ID NO: 188848
  derived and/or modified CDS sequence (opt4) from neuraminidase__InfluenzaB__AGX16329

SEQ ID NO: 189207 - RNA, 1401 nt, Artificial Sequence
  derived and/or modified CDS sequence (opt4) from neuraminidase__InfluenzaB__AGX16362
augcugcccagcaccauccagacccugacccuguuccugaccagcggcggcgugcugcugagccuguacgugagcgccagccugagcuaccugcuguacagcgacauccugcugaaguucagccagaccgagaucaccgcccccaucaugccccuggacugcgccaacgccagcaacgugcaggccgugaacagaagcgccgccaagggcgugacccugcugcugcccgagcccgaguggaccuaccccagacugagcugccccggcagcaccuuccagaaggcccugcugaucagcccccacagauucggcgagaccaagggcaacagcgccccccugaucaucagagagcccuucaucgccugcggccccaccgagugcaagcacuucgcccugacccacuacgccgcccagcccggcggcuacuacaacggcaccagagaggacagaaacaagcugagacaccugaucagcgugaagcugggcaagauccccaccguggagaacagcaucuuccacauggccgccuggagcggcagcgccugccacgacggcaaggaguggaccuacaucggcguggacggccccgacagcaacgcccugcugaagaucaaguacggcgaggccuacaccgacaccuaccacagcuacgccaagaacauccugagaacccaggagagcgccugcaacugcaucggcggcgacugcuaccugaugaucaccgacggccccgccagcggcgugagcgagugcagauuccugaagaucagagagggcagaaucaucaaggagaucuuccccaccggcagagugaagcacaccgaggagugcaccugcggcuucgccagcaacaagaccaucgagugcgccugcagagacaacagcuacaccgccaagagacccuucgugaagcugaacguggagaccgacaccgccgagaucagacugaugugcaccgagaccuaccuggacacccccagacccaacgacggcagcaucaccggccccugcgagagcgacggcgacaagggcagcggcggcaucaagggcggcuucgugcaccagagaauggccagcaagaucggcagaugguacagcagaaccaugagcaagaccaagagaaugggcaugggccuguacgugaaguacgacggcgaccccuggaccgacagcgaggcccuggcccugagcggcgugauggugagcauggaggagcccggcugguacagcuucggcuucgagaucaaggacaagaagugcgacgugcccugcaucggcaucgagauggugcacgacggcggcaagaccaccuggcacagcgccgccaccgccaucuacugccugaugggcagcggccagcugcugugggacaccgugaccggcguggacauggcccuguga

SEQ ID NO: 189208 - RNA, 1401 nt, Artificial Sequence; identical to SEQ ID NO: 189020
  derived and/or modified CDS sequence (opt4) from neuraminidase__InfluenzaB__AGX16373

SEQ ID NO: 189209 - RNA, 1401 nt, Artificial Sequence
  derived and/or modified CDS sequence (opt4) from neuraminidase__InfluenzaB__AGX16384
augcugcccagcaccauccagacccugacccuguuccugaccagcggcggcgugcugcugagccuguacgugagcgccagccugagcuaccugcuguacagcgacauccugcugaaguucagccagaccgagaucaccgcccccaucaugccccuggacugcgccaacgccagcaacgugcaggccgugaacagaagcgccgccaagggcgugacccugcugcugcccgagcccgaguggaccuaccccagacugagcugccccggcagcaccuuccagaaggcccugcugaucagcccccacagauucggcgagaccaagggcaacagcgccccccugaucaucagagagcccuucaucgccugcggccccaccgagugcaagcacuucgcccugacccacuacgccgcccagcccggcggcuacuacaacggcaccagagaggacagaaacaagcugaagcaccugaucagcgugaagcugggcaagauccccaccguggagaacagcaucuuccacauggccgccuggagcggcagcgccugccacgacggcaaggaguggaccuacaucggcguggacggccccgacagcaacgcccugcugaagaucaaguacggcgaggccuacaccgacaccuaccacagcuacgccaagaacauccugagaacccaggagagcgccugcaacugcaucggcggcgacugcuaccugaugaucaccgacggccccgccagcggcaucagcgagugcagauuccugaagaucagagagggcagaaucaucaaggagaucuuccccaccggcagagugaagcacaccgaggagugcaccugcggcuucgccagcaacaagaccaucgagugcgccugcagagacaacagcuacaccgccaagagacccuucgugaagcugaacguggagaccgacaccgccgagaucagacugaugugcaccgagaccuaccuggacacccccagacccaacgacggcagcaucaccggccccugcgagagcgacggcgacaagggcagcggcggcaucaagggcggcuucgugcaccagagaauggccagcaagaucggcagaugguacagcagaaccaugagcaagaccaagagaaugggcaugggccuguacgugaaguacgacggcgaccccuggaccgacagcgaggcccuggcccugagcggcgugauggugagcauggaggagcccggcugguacagcuucggcuucgagaucaaggacaagaagugcgacgugcccugcaucggcaucgagauggugcacgacggcggcaagaccaccuggcacagcgccgccaccgccaucuacugccugaugggcagcggccagcugcugugggacaccgugaccggcguggacauggcccuguga

SEQ ID NO: 189210 - RNA, 1401 nt, Artificial Sequence; identical to SEQ ID NO: 188877
  derived and/or modified CDS sequence (opt4) from neuraminidase__InfluenzaB__AGX16406

SEQ ID NO: 189211 - RNA, 1401 nt, Artificial Sequence; identical to SEQ ID NO: 188877
  derived and/or modified CDS sequence (opt4) from neuraminidase__InfluenzaB__AGX16427

SEQ ID NO: 189212 - RNA, 1401 nt, Artificial Sequence; identical to SEQ ID NO: 188877
  derived and/or modified CDS sequence (opt4) from neuraminidase__InfluenzaB__AGX16438

SEQ ID NO: 189213 - RNA, 1401 nt, Artificial Sequence; identical to SEQ ID NO: 188877
  derived and/or modified CDS sequence (opt4) from neuraminidase__InfluenzaB__AGX16449

SEQ ID NO: 189214 - RNA, 1401 nt, Artificial Sequence; identical to SEQ ID NO: 188877
  derived and/or modified CDS sequence (opt4) from neuraminidase__InfluenzaB__AGX16460

SEQ ID NO: 189215 - RNA, 1401 nt, Artificial Sequence
  derived and/or modified CDS sequence (opt4) from neuraminidase__InfluenzaB__AGX16471
augcugcccagcaccauccagacccugacccuguuccugaccagcggcggcgugcugcugagccuguacgugagcgccagccugagcuaccugcuguacagcgacauccugcugaaguucagccagaccgagaucaccgcccccaucaugccccuggacugcgccaacgccagcaacgugcaggccgugaacagaagcgccgccaagggcgugacccugcugcugcccgagcccgaguggaccuaccccagacugagcugccccggcagcaccuuccagaaggcccugcugaucagcccccacagauucggcgagaccaagggcaacagcgccccccugaucaucagagagcccuucaucgccugcggccccaccgagugcaagcacuucgcccugacccacuacgccgcccagcccggcggcuacuacaacggcaccagagaggacagaaacaagcugagacaccugaucagcgugaagcugggcaagauccccaccguggagaacagcaucuuccacauggccgccuggagcggcagcgccugccacgacggcaaggaguggaccuacaucggcguggacggccccgacagcaacgcccugcugaagaucaaguacggcgaggccuacaccgacaccuaccacagcuacgccaagaacauccugagaacccaggagagcgccugcaacugcaucggcggcgacugcuaccugaugaucaccgacggccccgccagcggcaucagcgagugcagauuccugaagaucagagagggcagaaucaucaaggagaucuuccccaccggcagagugaagcacaccgaggagugcaccugcggcuucgccagcaacaagaccaucgagugcgccugcagagacaacagcuacaccgccaagagacccuucgugaagcugaacguggagaccgacaccgccgagaucagacugaugugcaccaagaccuaccuggacacccccagacccaacgacggcagcaucaccggccccugcgagagcgacggcgacaagggcagcggcggcaucaagggcggcuucgugcaccagagaauggccagcaagaucggcagaugguacagcagaaccaugagcaagaccagaagaaugggcaugggccuguacgugaaguacgacggcgaccccuggaccgacagcgaggcccuggcccugagcggcgugauggugagcauggaggagcccggcugguacagcuucggcuucgagaucaaggacaagaagugcgacgugcccugcaucggcaucgagauggugcacgacggcggcaagaccaccuggcacagcgccgccaccgccaucuacugccugaugggcagcggccagcugcugugggacaccgugaccggcguggacauggcccuguga

SEQ ID NO: 189216 - RNA, 1401 nt, Artificial Sequence; identical to SEQ ID NO: 188877
  derived and/or modified CDS sequence (opt4) from neuraminidase__InfluenzaB__AGX16482

SEQ ID NO: 189217 - RNA, 1401 nt, Artificial Sequence
  derived and/or modified CDS sequence (opt4) from neuraminidase__InfluenzaB__AGX16493
augcugcccagcaccauccagacccugacccuguuccugaccagcggcggcgugcugcugagccuguacgugagcgccagccugagcuaccugcuguacagcgacauccugcugaaguucagccagaccgagaucaccgcccccaucaugccccuggacugcgccaacgccagcaacgugcaggccgugaacagaagcgccgccaagggcgugacccugcugcugcccgagcccgaguggaccuaccccagacugagcugccccggcagcaccuuccagaaggcccugcugaucagcccccacagauucggcgagaccaagggcaacagcgccccccugaucaucagagagcccuucaucgccugcggccccaccgagugcaagcacuucgcccugacccacuacgccgcccagcccggcggcuacuacaacggcaccagagaggacagaaacaagcugagacaccugaucagcgugaagcugggcaagauccccaccguggagaacagcaucuuccacauggccgccuggagcggcagcgccugccacgacggcaaggaguggaccuacaucggcguggacggccccgacagcaacgcccugcugaagaucaaguacggcgaggccuacaccgacaccuaccacagcuacgccaagaacauccugagaacccaggagagcgccugcaacugcaucggcggcgacugcuaccugaugaucaccgacggccccgccagcggcaucagcgagugcagauuccugaagaucagagagggcagaaucaucaaggagaucuuccccaccggcagagugaagcacaccgaggagugcaccugcggcuucgccagcaacaagaccaucgagugcgccugcagagacaacagcuacaccgccaagagacccuucgugaagcugaacguggagaccgacaccgccgagaucagacugaugugcaccgagaccuaccuggacacccccagacccaacgacggcagcaucaccggccccugcgagagcgacggcgacaagggcagcggcggcaucaagggcggcuucgugcaccagagaauggccagcaagaucggcagaugguacagcagaaccaugagcaagaccaagagaaugggcaugggccuguacgugaaguacgacggcgaccccuggaccgacagcgaggcccuggcccugagcggcgugguggugagcauggaggagcccggcugguacagcuucggcuucgagaucaaggacaagaagugcgacgugcccugcaucggcaucgagauggugcacgacggcggcaagaccaccuggcacagcgccgccaccgccaucuacugccugaugggcagcggccagcugcugugggacaccgugaccggcguggacauggcccuguga

SEQ ID NO: 189218 - RNA, 1401 nt, Artificial Sequence; identical to SEQ ID NO: 188676
  derived and/or modified CDS sequence (opt4) from neuraminidase__InfluenzaB__AGX16504

SEQ ID NO: 189219 - RNA, 1401 nt, Artificial Sequence; identical to SEQ ID NO: 188676
  derived and/or modified CDS sequence (opt4) from neuraminidase__InfluenzaB__AGX16515

SEQ ID NO: 189220 - RNA, 1401 nt, Artificial Sequence
  derived and/or modified CDS sequence (opt4) from neuraminidase__InfluenzaB__AGX16548
augcugcccagcaccauccagacccugacccuguuccugaccagcggcggcgugcugcugagccuguacgugagcgccagccugagcuaccugcuguacagcgacauccugcugaaguucagccccaccgagaucaccgcccccaccaugccccuggacugcgccaacgccagcaacgugcaggccgugaacagaagcgccaccaagggcgugacccugcugcugcccgagcccgaguggaccuaccccagacugagcugccccggcagcaccuuccagaaggcccugcugaucagcccccacagauucggcgagaccaagggcaacagcgccccccugaucaucagagagcccuucaucgccugcggccccaaggagugcaagcacuucgcccugacccacuacgccgcccagcccggcggcuacuacaacggcaccagaggcgacagaaacaagcugagacaccugaucagcgugaagcugggcaagauccccaccguggagaacagcaucuuccacauggccgccuggagcggcagcgccugccacgacggcaaggaguggaccuacaucggcguggacggccccgacaacaacgcccugcugaagaucaaguacggcgaggccuacaccgacaccuaccacagcuacgccaacaacauccugagaacccaggagagcgccugcaacugcaucggcggcaacugcuaccugaugaucaccgacggcagcgccagcggcaucagcgagugcagauuccugaagaucagagagggcagaaucaucaaggagaucuuccccaccggcagagugaagcacaccgaggagugcaccugcggcuucgccagcaacaagaccaucgagugcgccugcagagacaacagcuacaccgccaagagacccuucgugaagcugaacguggagaccgacaccgccgagaucagacugaugugcaccgagaccuaccuggacacccccagacccgacgacggcagcaucaccggccccugcgagagcaacggcgacaacggcagcggcggcaucaagggcggcuucgugcaccagagaauggccagcaagaucggcagaugguacagcagaaccaugagcaagaccaagagaaugggcaugggccuguacgugaaguacgacggcgaccccugggccgacagcgacgcccuggcccugagcggcgugauggugagcauggaggagcccggcugguacagcuucggcuucgagaucaaggacaagaagugcgacgugcccugcaucggcaucgagauggugcacgacggcggcaaggagaccuggcacagcgccgccaccgccaucuacugccugaugggcagcggccagcugcugugggacaccgugaccggcguggacauggcccuguga

SEQ ID NO: 189221 - RNA, 1401 nt, Artificial Sequence
  derived and/or modified CDS sequence (opt4) from neuraminidase__InfluenzaB__AGX16559
augcugcccagcaccauccagacccugacccuguuccugaccagcggcggcgugcugcugagccuguacgugagcgccagccugagcuaccugcuguacagcgacauccugcugaaguucagccccaccgagaucaucgcccccaccaugccccuggacugcgccaacgccagcaacgugcaggccgugaacagaagcgccaccaagggcgugacccugcugcugcccgagcccgaguggaccuaccccagacugagcugccccggcagcaccuuccagaaggcccugcugaucagcccccacagauucggcgagaccaagggcaacagcgccccccugaucaucagagagcccuucaucgccugcggccccaaggagugcaagcacuucgcccugacccacuacgccgcccagcccggcggcuacuacaacggcaccagaggcgacagaaacaagcugagacaccugaucagcgugaagcugggcaagauccccaccguggagaacagcaucuuccacauggccgccuggagcggcagcgccugccacgacggcaaggaguggaccuacaucggcguggacggccccgacaacaacgcccugcugaagaucaaguacggcgaggccuacaccgacaccuaccacagcuacgccaacaacauccugagaacccaggagagcgccugcaacugcaucggcggcaacugcuaccugaugaucaccgacggcagcgccagcggcaucagcgagugcagauuccugaagaucagagagggcagaaucaucaaggagaucuuccccaccggcagagugaagcacaccgaggagugcaccugcggcuucgccagcaacaagaccaucgagugcgccugcagagacaacagcuacaccgccaagagacccuucgugaagcugaacguggagaccgacaccgccgagaucagacugaugugcaccgagaccuaccuggacacccccagacccgacgacggcagcaucaccggccccugcgagagcaacggcgacaagggcagcggcggcaucaagggcggcuucgugcaccagagaauggccagcaagaucggcagaugguacagcagaaccaugagcaagaccaagagaaugggcaugggccuguacgugaaguacgacggcgaccccugggccgacagcgacgcccuggcccugagcggcgugauggugagcauggaggagcccggcugguacagcuucggcuucgagaucagagacaagaagugcgacgugcccugcaucggcaucgagauggugcacgacggcggcaaggagaccuggcacagcgccgccaccgccaucuacugccugaugggcagcggccagcugcugugggacaccgugaccggcguggacauggcccuguga

SEQ ID NO: 189222 - RNA, 1401 nt, Artificial Sequence
  derived and/or modified CDS sequence (opt4) from neuraminidase__InfluenzaB__AGX16581
augcugcccagcaccauccagacccugacccuguuccugaccagcggcggcgugcugcugagccuguacgugagcgccagccugagcuaccugcuguacagcgacauccugcugaaguucagccccaccgagaucaucgcccccaccaugccccuggacugcgccaacgccagcaacgugcaggccgugaacagaagcgccaccaagggcgugacccugcugcugcccgagcccgaguggaccuaccccagacugagcugccccggcagcaccuuccagaaggcccugcugaucagcccccacagauucggcgagaccaagggcaacagcgccccccugaucaucagagagcccuucaucgccugcggccccaaggagugcaagcacuucgcccugacccacuacgccgcccagcccggcggcuacuacaacggcaccagaggcgacagaaacaagcugagacaccugaucagcgugaagcugggcaagauccccaccguggagaacagcaucuuccacauggccgccuggagcggcagcgccugccacgacggcaaggaguggaccuacaucggcguggacggccccgacaacaacgcccugcugaagaucaaguacggcgaggccuacaccgacaccuaccacagcuacgccaacaacauccugagaacccaggagagcgccugcaacugcaucggcggcaacugcuaccugaugaucaccgacggcagcgccagcggcaucagcgagugcagauuccugaagaucagagagggcagaaucaucaaggagaucuuccccaccggcagagugaagcacaccgaggagugcaccugcggcuucgccagcaacaagaccaucgagugcgccugcagagacaacagcuacaccgccaagagacccuucgugaagcugaacguggagaccgacaccgccgagaucagacugaugugcaccgagaccuaccuggacacccccagacccgacgacggcagcaucaccggccccugcgagagcaacggcgacaagggcagcggcggcaucaagggcggcuucgugcaccagagaauggccagcaagaucggcagaugguacagcagaaccaugagcaagaccaagagaaugggcaugggccuguacgugaaguacgacggcgaccccugggccgacagcgacgcccuggcccugagcggcgugauggugagcauggaggagcccggcugguacagcuucggcuucgagaucaaggacaagaagugcgacgugcccugcaucggcaucgagauggugcacgacggcggcaaggagaccuggcacagcgccgccaccgccaucuacugccugaugggcagcggccagcugcugugggacaccgugaccggcguggacauggcccuguga

SEQ ID NO: 189223 - RNA, 1401 nt, Artificial Sequence; identical to SEQ ID NO: 189222
  derived and/or modified CDS sequence (opt4) from neuraminidase__InfluenzaB__AGX16592

SEQ ID NO: 189224 - RNA, 1401 nt, Artificial Sequence; identical to SEQ ID NO: 188676
  derived and/or modified CDS sequence (opt4) from neuraminidase__InfluenzaB__AGX16603

SEQ ID NO: 189225 - RNA, 1401 nt, Artificial Sequence; identical to SEQ ID NO: 188742
  derived and/or modified CDS sequence (opt4) from neuraminidase__InfluenzaB__AGX16614

SEQ ID NO: 189226 - RNA, 1401 nt, Artificial Sequence; identical to SEQ ID NO: 189220
  derived and/or modified CDS sequence (opt4) from neuraminidase__InfluenzaB__AGX16625

SEQ ID NO: 189227 - RNA, 1401 nt, Artificial Sequence
  derived and/or modified CDS sequence (opt4) from neuraminidase__InfluenzaB__AGX16636
augcugcccagcaccauccagacccugacccuguuccugaccagcggcggcgugcugcugagccuguacgugagcgccagccugagcuaccugcuguacagcgacauccugcugaaguucagccccaccgagaucaucgcccccaccaugccccuggacugcgccaacgccagcaacgugcaggccgugaacagaagcgccaccaagggcgugacccugcugcugcccgagcccgaguggaccuaccccagacugagcugccccggcagcaccuuccagaaggcccugcugaucagcccccacagauucggcgagaccaagggcaacagcgccccccugaucaucagagagcccuucaucgccugcggccccaaggagugcaagcacuucgcccugacccacuacgccgcccagcccggcggcuacuacaacggcaccagaggcgacagaaacaagcugagacaccugaucagcgugaagcugggcaagauccccaccguggagaacagcaucuuccacauggccgccuggagcggcagcgccugccacgacggcaaggaguggaccuacaucggcguggacggccccgacaacaacgcccugcugaagaucaaguacggcgaggccuacaccgacaccuaccacagcuacgccaacaacauccugagaacccaggagagcgccugcaacugcaucggcggcaacugcuaccugaugaucaccgacggcagcgccagcggcaucagcgagugcagauuccugaagaucagagagggcagaaucaucaaggagaucuuccccaccggcagagugaagcacaccgaggagugcaccugcggcuucgccagcaacaagaccaucgagugcgccugcagagacaacagcuacaccgccaagagacccuucgugaagcugaacguggagaccgacaccgccgagaucagacugaugugcaccgagaccuaccuggacacccccagacccgacgacggcagcaucaccggccccugcgagagcaacggcgacaagggcagcggcggcaucaagggcggcuucgugcaccagagaauggccagcaagaucggcagaugguacagcagaaccaugagcaagaccaagagaaugggcaugggccuguacgugaaguacgacggcgaccccugggccgacagcgacgcccuggcccugagcggcgugauggugagcauggaggagcccggcugguacagcuucggcuucgagaucaaggacaagaagugcgacgugcccugcaucggcaucgagauggugcacgacggcggcaaggagaccuggcacagcgccgccaccgccaucuacugccugaugggcagcggccagcugcuguggaacaccgugaccggcguggacauggcccuguga

SEQ ID NO: 189228 - RNA, 1401 nt, Artificial Sequence; identical to SEQ ID NO: 188674
  derived and/or modified CDS sequence (opt4) from neuraminidase__InfluenzaB__AGX16647

SEQ ID NO: 189229 - RNA, 1401 nt, Artificial Sequence; identical to SEQ ID NO: 189222
  derived and/or modified CDS sequence (opt4) from neuraminidase__InfluenzaB__AGX16658

SEQ ID NO: 189230 - RNA, 1401 nt, Artificial Sequence; identical to SEQ ID NO: 188676
  derived and/or modified CDS sequence (opt4) from neuraminidase__InfluenzaB__AGX16669

SEQ ID NO: 189231 - RNA, 1401 nt, Artificial Sequence; identical to SEQ ID NO: 188742
  derived and/or modified CDS sequence (opt4) from neuraminidase__InfluenzaB__AGX16680

SEQ ID NO: 189232 - RNA, 1401 nt, Artificial Sequence; identical to SEQ ID NO: 188676
  derived and/or modified CDS sequence (opt4) from neuraminidase__InfluenzaB__AGX16691

SEQ ID NO: 189233 - RNA, 1401 nt, Artificial Sequence
  derived and/or modified CDS sequence (opt4) from neuraminidase__InfluenzaB__AGX16702
augcugcccagcaccauccagacccugacccuguuccugaccagcggcggcgugcugcugagccuguacgugagcgccagccugagcuaccugcuguacagcgacauccugcugaaguucagccccaccgagaucaccgcccccaccaugccccuggacugcgccaacgccagcaacgugcaggccgugaacagaagcgccaccaagggcgugacccugcugcugcccgagcccgaguggaccuaccccagacugagcugccccggcagcaccuuccagaaggcccugcugaucagcccccacagauucggcgagaccaagggcaacagcgccccccugaucaucagagagcccuucaucgccugcggccccaaggagugcaagcacuucgcccugacccacuacgccgcccagcccggcggcuacuacaacggcaagagaggcgacagaaacaagcugagacaccugaucagcgugaagcugggcaagauccccaccguggagaacagcaucuuccacauggccgccuggagcggcagcgccugccacgacggcaaggaguggaccuacaucggcguggacggccccgacaacaacgcccugcugaagaucaaguacggcgaggccuacaccgacaccuaccacagcuacgccaacaacauccugagaacccaggagagcgccugcaacugcaucggcggcaacugcuaccugaugaucaccgacggcagcgccagcggcaucagcgagugcagauuccugaagaucagagagggcagaaucaucaaggagaucuuccccaccggcagagugaagcacaccgaggagugcaccugcggcuucgccagcaacaagaccaucgagugcgccugcagagacaacagcuacaccgccaagagacccuucgugaagcugaacguggagaccgacaccgccgagaucagacugaugugcaccgagaccuaccuggacacccccagacccgacgacggcagcaucaccggccccugcgagagcaacggcgacaagggcagcggcggcaucaagggcggcuucgugcaccagagaauggccagcaagaucggcagaugguacagcagaaccaugagcaagaccaagagaaugggcaugggccuguacgugaaguacgacggcgaccccugggccgacagcgacgcccuggcccugagcggcgugauggugagcauggaggagcccggcugguacagcuucggcuucgagaucaaggacaagaagugcgacgugcccugcaucggcaucgagauggugcacgacggcggcaaggagaccuggcacagcgccgccaccgccaucuacugccugaugggcagcggccagcugcugugggacaccgugaccggcguggacauggcccuguga

SEQ ID NO: 189234 - RNA, 1401 nt, Artificial Sequence
  derived and/or modified CDS sequence (opt4) from neuraminidase__InfluenzaB__AGX16713
augcugcccagcaccauccagacccugacccuguuccugaccagcggcggcgugcugcugagccuguacgugagcgccagccugagcuaccugcuguacagcgacauccugcugaaguucagccccaccgagaucaccgcccccaccaugccccuggacugcgccaacgccagcaacgugcaggccgugaacagaagcgccaccaagggcgugacccugcugcugcccgagcccgaguggaccuaccccagacugagcugccccggcagcaucuuccagaaggcccugcugaucagcccccacagauucggcgagaccaagggcaacagcgccccccugaucaucagagagcccuucaucgccugcggccccaaggagugcaagcacuucgcccugacccacuacgccgcccagcccggcggcuacuacaacggcaccagaggcgacagaaacaagcugagacaccugaucagcgugaagcugggcaagauccccaccguggagaacagcaucuuccacauggccgccuggagcggcagcgccugccacgacggcaaggaguggaccuacaucggcguggacggccccgacaacaacgcccugcugaagaucaaguacggcgaggccuacaccgacaccuaccacagcuacgccaacaacauccugagaacccaggagagcgccugcaacugcaucggcggcaacugcuaccugaugaucaccgacggcagcgccagcggcaucagcgagugcagauuccugaagaucagagagggcagaaucaucaaggagaucuuccccaccggcagagugaagcacaccgaggagugcaccugcggcuucgccagcaacaagaccaucgagugcgccugcagagacaacagcuacaccgccaagagacccuucgugaagcugaacguggagaccgacaccgccgagaucagacugaugugcaccgagaccuaccuggacacccccagacccgacgacggcagcaucaccggccccugcgagagcaacggcgacaagggcagcggcggcaucaagggcggcuucgugcaccagagaauggccagcaagaucggcagaugguacagcagaaccaugagcaagaccaagagaaugggcaugggccuguacgugaaguacgacggcgaccccugggccgacagcgacgcccuggcccugagcggcgugauggugagcauggaggagcccggcugguacagcuucggcuucgagaucagagacaagaagugcgacgugcccugcaucggcaucgagauggugcacgacggcggcaaggagaccuggcacagcgccgccaccgccaucuacugccugaugggcagcggccagcugcugugggacaccgugaccggcguggacauggcccuguga

SEQ ID NO: 189235 - RNA, 1401 nt, Artificial Sequence; identical to SEQ ID NO: 188676
  derived and/or modified CDS sequence (opt4) from neuraminidase__InfluenzaB__AGX16724

SEQ ID NO: 189236 - RNA, 1401 nt, Artificial Sequence; identical to SEQ ID NO: 189222
  derived and/or modified CDS sequence (opt4) from neuraminidase__InfluenzaB__AGX16735

SEQ ID NO: 189237 - RNA, 1401 nt, Artificial Sequence; identical to SEQ ID NO: 189222
  derived and/or modified CDS sequence (opt4) from neuraminidase__InfluenzaB__AGX16746

SEQ ID NO: 189238 - RNA, 1401 nt, Artificial Sequence; identical to SEQ ID NO: 188676
  derived and/or modified CDS sequence (opt4) from neuraminidase__InfluenzaB__AGX16757

SEQ ID NO: 189239 - RNA, 1401 nt, Artificial Sequence
  derived and/or modified CDS sequence (opt4) from neuraminidase__InfluenzaB__AGX16768
augcugcccagcaccauccagacccugacccuguuccugaccagcggcggcgugcugcugagccuguacgugagcgccagccugagcuaccugcuguacagcgacauccugcugaaguucagccccaccgagaucaucgcccccaccaugccccuggacugcgccaacgccagcaacgugcaggccgugaacagaagcgccaccaagggcgugacccugcugcugcccgagcccgaguggaccuaccccagacugagcugccccggcagcaccuuccagaaggcccugcugaucagcccccacagauucggcgagaccaagggcaacagcgccccccugaucaucagagagcccuucaucgccugcggccccaaggagugcaagcacuucgcccugacccacuacgccgcccagcccggcggcuacuacaacggcaccagaggcgacagaaacaagcugagacaccugaucagcgugaagcugggcaagauccccaccguggagaacagcaucuuccacauggccgccuggagcggcagcgccugccacgacggcaaggaguggaccuacaucggcguggacggccccgacaacaacgcccugcugaagaucaaguacggcgaggccuacaccgacaccuaccacagcuacgccaacaacauccugagaacccaggagagcgccugcaacugcaucggcggcaacugcuaccugaugaucaccgacggcagcgccagcggcaucagcgagugcagauuccugaagaucagagagggcagaaucaucaaggagaucuuccccaccggcagagugaagcacaccgaggagugcaccugcggcuucgccagcaacaagaccaucgagugcgccugcagagacaacagcuacaccgccaagagacccuucgugaagcugaacguggagaccgacaccgccgagaucagacugaugugcaccgagaccuaccuggacacccccagacccgacgacggcagcaucaccggccccugcaagagcaacggcgacaagggcagcggcggcaucaagggcggcuucgugcaccagagaauggccagcaagaucggcagaugguacagcagaaccaugagcaagaccaagagaaugggcaugggccuguacgugaaguacgacggcgaccccugggccgacagcgacgcccuggcccugagcggcgugauggugagcauggaggagcccggcugguacagcuucggcuucgagaucaaggacaagaagugcgacgugcccugcaucggcaucgagauggugcacgacggcggcaaggagaccuggcacagcgccgccaccgccaucuacugccugaugggcagcggccagcugcugugggacaccgugaccggcguggacauggcccuguga

SEQ ID NO: 189240 - RNA, 1401 nt, Artificial Sequence; identical to SEQ ID NO: 188742
  derived and/or modified CDS sequence (opt4) from neuraminidase__InfluenzaB__AGX16779

SEQ ID NO: 189241 - RNA, 1401 nt, Artificial Sequence
  derived and/or modified CDS sequence (opt4) from neuraminidase__InfluenzaB__AGX16790
augcugcccagcaccauccagacccugacccuguuccugaccagcggcggcgugcugcugagccuguacgugagcgccagccugagcuaccugcuguacagcgacauccugcugaaguucagccccaccgagaucaccgcccccaccaugccccuggacugcgccaacgccagcaacgugcaggccgugaacagaagcgccaccaagggcgugacccugcugcugcccgagcccgaguggaccuaccccagacugagcugccccggcagcaccuuccagaaggcccugcugaucagcccccacagauucggcgagaccaagggcaacagcgccccccugaucaucagagagcccuucaucgccugcggccccaaggagugcaagcacuucgcccugacccacuacgccgcccagcccggcggcuacuacaacggcaccagaggcggcagaaacaagcugagacaccugaucagcgugaagcugggcaagauccccaccguggagaacagcaucuuccacauggccgccuggagcggcagcgccugccacgacggcaaggaguggaccuacaucggcguggacggccccgacaacaacgcccugcugaagaucaaguacggcgaggccuacaccgacaccuaccacagcuacgccaacaacauccugagaacccaggagagcgccugcaacugcaucggcggcaacugcuaccugaugaucaccgacggcagcgccagcggcaucagcgagugcagauuccugaagaucagagagggcagaaucaucaaggagaucuuccccaccggcagagugaagcacaccgaggagugcaccugcggcuucgccagcaacaagaccaucgagugcgccugcagagacaacagcuacaccgccaagagacccuucgugaagcugaacguggagaccgacaccgccgagaucagacugaugugcaccgagaccuaccuggacacccccagacccgacgacggcagcaucaccggccccugcgagagcaacggcgacaagggcagcggcggcaucaagggcggcuucgugcaccagagaauggccagcaagaucggcagaugguacagcagaaccaugagcaagaccaagagaaugggcaugggccuguacgugaaguacgacggcgaccccugggccgacagcgacgcccuggcccugagcggcgugauggugagcauggaggagcccggcugguacagcuucggcuucgagaucagagacaagaagugcgacgugcccugcaucggcaucgagauggugcacgacggcggcaaggagaccuggcacagcgccgccaccgccaucuacugccugaugggcagcggccagcugcugugggacaccgugaccggcguggacauggcccuguga

SEQ ID NO: 189242 - RNA, 1401 nt, Artificial Sequence
  derived and/or modified CDS sequence (opt4) from neuraminidase__InfluenzaB__AGX16801
augcugcccagcaccauccagacccugacccuguuccugaccagcggcggcgugcugcugagccuguacgugagcgccagccugagcuaccugcuguacagcgacauccugcugaaguucagccccaccgagaucaucgcccccaccaugccccuggacugcgccaacgccagcaacgugcaggccgugaacagaagcgccaccaagggcgugacccugcugcugcccgagcccgaguggaccuaccccagacugagcugccccggcagcaccuuccagaaggcccugcugaucagcccccacagauucggcgagaccaagggcaacagcgccccccugaucaucagagagcccuucaucgccugcggccccaaggagugcaagcacuucgcccugacccacuacgccgcccagcccggcggcuacuacaacggcaccagaggcgacagaaacaagcugagacaccugaucagcgugaagcugggcaagauccccaccguggagaacagcaucuuccacauggccgccuggagcggcagcgccugccacgacggcaaggaguggaccuacaucggcguggacggccccgacaacaacgcccugcugaagaucaaguacggcgaggccuacaccgacaccuaccacagcuacgccaacaacauccugagaacccaggagagcgccugcaacugcaucggcggcaacugcuaccugaugaucaccgacggcagcgccagcggcaucagcgagugcagauuccugaagaucagagagggcagaaucaucaaggagaucuuccccaccggcagagugaagcacaccgaggagugcaccugcggcuucgccagcaacaagaccaucgagugcgccugcagagacaacagcuacaccgccaagagacccuucgugaagcugaacguggagaccgacaccgccgagaucagacugaugugcaccgagaccuaccuggacacccccagacccaacgacggcagcaucaccggccccugcgagagcaacggcgacaagggcagcggcggcaucaagggcggcuucgugcaccagagaauggccagcaagaucggcagaugguacagcagaaccaugagcaagaccaagagaaugggcaugggccuguacgugaaguacgacggcgaccccugggccgacagcgacgcccuggcccugagcggcgugauggugagcauggaggagcccggcugguacagcuucggcuucgagaucaaggacaagaagugcgacgugcccugcaucggcaucgagauggugcacgacggcggcaaggagaccuggcacagcgccgccaccgccaucuacugccugaugggcagcggccagcugcugugggacaccgugaccggcguggacauggcccuguga

SEQ ID NO: 189243 - RNA, 1401 nt, Artificial Sequence; identical to SEQ ID NO: 188676
  derived and/or modified CDS sequence (opt4) from neuraminidase__InfluenzaB__AGX16812

SEQ ID NO: 189244 - RNA, 1401 nt, Artificial Sequence
  derived and/or modified CDS sequence (opt4) from neuraminidase__InfluenzaB__AGX16823
augcugcccagcaccauccagacccugacccuguuccugaccagcggcggcgugcugcugagccuguacgugagcgccagccugagcuaccugcuguacagcgacauccugcugaaguucagccccaccgagaucaccgcccccaccaugccccuggacugcgccaacgccagcaacgugcaggccgugaacagaagcgccaccaagggcgugacccugcugcugcccgagcccgaguggaccuaccccagacugagcugccccggcagcaccuuccagaaggcccugcugaucagcccccacagauucggcgagaccaagggcaacagcgccccccugaucaucagagagcccuucaucgccugcggccccaaggagugcaagcacuucgcccugacccacuacgccgcccagcccggcggcuacuacaacggcaccagaggcgacagaaacaagcugagacaccugaucagcgugaagcugggcaagauccccaccguggagaacagcaucuuccacauggccgccuggagcggcagcgccugccacgacggcaaggaguggaccuacaucggcguggacggccccgacaacaacgcccugcugaagaucaaguacggcgaggccuacaccgacaccuaccacagcuacgccaacaacauccugagaacccaggagagcgccugcaacugcaucggcggcaacugcuaccugaugaucaccgacggcagcgccagcggcaucagcgagugcagauuccugaagaucagagagggcagaaucaucaaggagaucuuccccaccggcagagugaagcacaccgaggagugcaccugcggcuucgccagcaacaagaccaucgagugcgccugcagagacaacagcuacaccgccaagagacccuucgugaagcugaacguggagaccgacaccgccgagaucagacugaugugcaccgagaccuaccuggacacccccagacccgccgacggcagcaucaccggccccugcgagagcaacggcgacaagggcagcggcggcaucaagggcggcuucgugcaccagagaauggccagcaagaucggcagaugguacagcagaaccaugagcaagaccaagagaaugggcaugggccuguacgugaaguacgacggcgaccccugggccgacagcgacgcccuggcccugagcggcgugauggugagcauggaggagcccggcugguacagcuucggcuucgagaucaaggacaagaagugcgacgugcccugcaucggcaucgagauggugcacgacggcggcaaggagaccuggcacagcgccgccaccgccaucuacugccugaugggcagcggccagcugcugugggacaccgugaccggcguggacauggcccuguga

SEQ ID NO: 189245 - RNA, 1401 nt, Artificial Sequence; identical to SEQ ID NO: 188676
  derived and/or modified CDS sequence (opt4) from neuraminidase__InfluenzaB__AGX16834

SEQ ID NO: 189246 - RNA, 1401 nt, Artificial Sequence
  derived and/or modified CDS sequence (opt4) from neuraminidase__InfluenzaB__AGX16845
augcugcccagcaccauccagacccugacccuguuccugaccagcggcggcgugcugcugagccuguacgugagcgccagccugagcuaccugcuguacagcgacauccugcugaaguucagccccaccgagaucaccacccccaccaugccccuggacugcgccaacgccagcaacgugcaggccgugaacagaagcgccaccaagggcgugacccugcugcugcccgagcccgaguggaccuaccccagacugagcugccccggcagcaccuuccagaaggcccugcuggugagcccccacagauucggcgagaccaagggcaacagcgccccccugaucaucagagagcccuucaucgccugcggccccaaggagugcaagcacuucgcccugacccacuacgccgcccagcccggcggcuacuacaacggcaccagaggcgacagaaacaagcugagacaccugaucagcgugaagcugggcaagauccccaccguggagaacagcaucuuccacauggccgccuggagcggcagcgccugccacgacggcaaggaguggaccuacaucggcguggacggccccgacaacaacgcccugcugaagaucaaguacggcgaggccuacaccgacaccuaccacagcuacgccaacaacauccugagaacccaggagagcgccugcaacugcaucggcggcaacugcuaccugaugaucaccgacggcagcgccagcggcaucagcgagugcagauuccugaagaucagagagggcagaaucaucaaggagaucuuccccaccggcagagugaagcacaccgaggagugcaccugcggcuucgccagcaacaagaccaucgagugcgccugcagagacaacagcuacaccgccaagagacccuucgugaagcugaacguggagaccgacaccgccgagaucagacugaugugcaccgagaccuaccuggacacccccagacccgacgacggcagcaucaccggccccugcgagagcaacggcgacaagggcagcggcggcaucaagggcggcuucgugcaccagagaauggccagcaagaucggcagaugguacagcagaaccaugagcaagaccaagagaaugggcaugggccuguacgugaaguacgacggcgaccccugggccgacagcgacgcccuggcccugagcggcgugauggugagcauggaggagcccggcugguacagcuucggcuucgagaucaaggacaagaagugcgacgugcccugcaucggcaucgagauggugcacgacggcggcaaggagaccuggcacagcgccgccaccgccaucuacugccugaugggcagcggccagcugcugugggacaccgugaccggcguggacauggcccuguga

SEQ ID NO: 189247 - RNA, 1401 nt, Artificial Sequence
  derived and/or modified CDS sequence (opt4) from neuraminidase__InfluenzaB__AGX16856
augcugcccagcaccauccagacccugacccuguuccugaccagcggcggcgugcugcugagccuguacgugagcgccagccugagcuaccugcuguacagcgacauccugcugaaguucagccccaccgagaucaccgcccccaccgugccccuggacugcgccaacgccagcaacgugcaggccgugaacagaagcgccaccaagggcgugacccugcugcugcccgagcccgaguggaccuaccccagacugagcugccccggcagcaccuuccagaaggcccugcugaucagcccccacagauucggcgagaccaagggcaacagcgccccccugaucaucagagagcccuucaucgccugcggccccaaggagugcaagcacuucgcccugacccacuacgccgcccagcccggcggcuacuacagcggcaccagaggcgacagaaacaagcugagacaccugaucagcgugaagcugggcaagauccccaccguggagaacagcaucuuccacauggccgccuggagcggcagcgccugccacgacggcaaggaguggaccuacaucggcguggacggccccgacaacaacgcccugcugaagaucaaguacggcgaggccuacaccgacaccuaccacagcuacgccaacaacauccugagaacccaggagagcgccugcaacugcaucggcggcaacugcuaccugaugaucaccgacggcagcgccagcggcaucagcgagugcagauuccugaagaucagagagggcagaaucaucaaggagaucuuccccaccggcagagugaagcacaccgaggagugcaccugcggcuucgccagcaacaagaccaucgagugcgccugcagagacaacagcuacaccgccaagagacccuucgugaagcugaacguggagaccgacaccgccgagaucagacugaugugcaccgagaccuaccuggacacccccagacccgacgacggcagcaucaccggccccugcgagagcaacggcgacaagggcagcggcggcaucaagggcggcuucgugcaccagagaauggccagcaagaucggcagaugguacagcagaaccaugagcaagaacaagagaaugggcaugggccuguacgugaaguacgacggcgaccccugggccgacagcgacgcccuggcccugagcggcgugauggugagcauggaggagcccggcugguacagcuucggcuucgagaucaaggacaagaagugcgacgugcccugcaucggcaucgagauggugcacgacggcggcaaggagaccuggcacagcgccgccaccgccaucuacugccugaugggcagcggccagcugcugugggacaccgugaccggcguggacauggcccuguga

SEQ ID NO: 189248 - RNA, 1401 nt, Artificial Sequence; identical to SEQ ID NO: 188676
  derived and/or modified CDS sequence (opt4) from neuraminidase__InfluenzaB__AGX16867

SEQ ID NO: 189249 - RNA, 1401 nt, Artificial Sequence
  derived and/or modified CDS sequence (opt4) from neuraminidase__InfluenzaB__AGX16878
augcugcccagcaccauccagacccugacccuguuccugaccagcggcggcgugcugcugagccuguacgugagcgccagccugagcuaccugcuguacagcgacauccugcugaaguucagccccaccgagcugaccgcccccaccaugccccuggacugcgccaacgccagcaacgugcaggccgugaacagaagcgccaccaagggcgugacccugcugcugcccgagcccgaguggaccuaccccagacugagcugccccggcagcaccuuccagaaggcccugcugaucagcccccacagauucggcgagaccaagggcaacagcgccccccugaucaucagagagcccuucaucgccugcggccccaaggagugcaagcacuucgcccugacccacuacgccgcccagcccggcggcuacuacaacggcaagagaggcgacagaaacaagcugagacaccugaucagcgugaagcugggcaagauccccaccguggagaacagcaucuuccacauggccgccuggagcggcagcgccugccacgacggcaaggaguggaccuacaucggcguggacggccccgacaacaacgcccugcugaagaucaaguacggcgaggccuacaccgacaccuaccacagcuacgccaacaacauccugagaacccaggagagcgccugcaacugcaucggcggcaacugcuaccugaugaucaccgacggcagcgccagcggcaucagcgagugcagauuccugaagaucagagagggcagaaucaucaaggagaucuuccccaccggcagagugaagcacaccgaggagugcaccugcggcuucgccagcaacaagaccaucgagugcgccugcagagacaacagcuacaccgccaagagacccuucgugaagcugaacguggagaccgacaccgccgagaucagacugaugugcaccgagaccuaccuggacacccccagacccgacgacggcagcaucaccggccccugcgagagcaacggcgacaacggcagcggcggcaucaagggcggcuucgugcaccagagaauggccagcaagaucggcagaugguacagcagaaccaugagcaagaccaagagaaugggcaugggccuguacgugaaguacgacggcgaccccugggccgacagcgacgcccuggcccugagcggcgugauggugagcauggaggagcccggcugguacagcuucggcuucgagaucaaggacaagaagugcgacgugcccugcaucggcaucgagauggugcacgacggcggcaaggagaccuggcacagcgccgccaccgccaucuacugccugaugggcagcggccagcugcugugggacaccgugaccggcguggacauggcccuguga

SEQ ID NO: 189250 - RNA, 1401 nt, Artificial Sequence; identical to SEQ ID NO: 189222
  derived and/or modified CDS sequence (opt4) from neuraminidase__InfluenzaB__AGX16889

SEQ ID NO: 189251 - RNA, 1401 nt, Artificial Sequence
  derived and/or modified CDS sequence (opt4) from neuraminidase__InfluenzaB__AGX16900
augcugcccagcaccauccagacccugacccuguuccugaccaccggcggcgugcugcugagccuguacgugagcgccagccugagcuaccugcuguacagcgacauccugcugaaguucagccccaccgagaucaucgcccccaccaugccccuggacugcgccaacgccagcaacgugcaggccgugaacagaagcgccaccaagggcgugacccugcugcugcccgagcccgaguggaccuaccccagacugagcugccccggcagcaccuuccagaaggcccugcugaucagcccccacagauucggcgagaccaagggcaacagcgccccccugaucaucagagagcccuucaucgccugcggccccaaggagugcaagcacuucgcccugacccacuacgccgcccagcccggcggcuacuacaacggcaccagaggcgacagaaacaagcugagacaccugaucagcgugaagcugggcaagauccccaccguggagaacagcaucuuccacauggccgccuggagcggcagcgccugccacgacggcaaggaguggaccuacaucggcguggacggccccgacaacaacgcccugcugaagaucaaguacggcgaggccuacaccgacaccuaccacagcuacgccaacaacauccugagaacccaggagagcgccugcaacugcaucggcggcaacugcuaccugaugaucaccgacggcagcgccagcggcaucagcgagugcagauuccugaagaucagagagggcagaaucaucaaggagaucuuccccaccggcagagugaagcacaccgaggagugcaccugcggcuucgccagcaacaagaccaucgagugcgccugcagagacaacagcuacaccgccaagagacccuucgugaagcugaacguggagaccgacaccgccgagaucagacugaugugcaccgagaccuaccuggacacccccagacccgacgacggcagcaucaccggccccugcgagagcaacggcgacaagggcagcggcggcaucaagggcggcuucgugcaccagagaauggccagcaagaucggcagaugguacagcagaaccaugagcaagaccaagagaaugggcaugggccuguacgugaaguacgacggcgaccccugggccgacagcgacgcccuggcccugagcggcgugauggugagcauggaggagcccggcugguacagcuucggcuucgagaucaaggacaagaagugcgacgugcccugcaucggcaucgagauggugcacgacggcggcaaggagaccuggcacagcgccgccaccgccaucuacugccugaugggcagcggccagcugcugugggacaccgugaccggcguggacauggcccuguga

SEQ ID NO: 189252 - RNA, 1401 nt, Artificial Sequence
  derived and/or modified CDS sequence (opt4) from neuraminidase__InfluenzaB__AGX16911
augcugcccagcaccauccagacccugacccuguuccugaccagcggcggcgugcugcugagccuguacgugagcgcccugcugagcuaccugcuguacagcgacauccugcugaaguucagccccaccgagaucaccgcccccaccaugccccuggacugcgccaacgccagcaacgugcaggccgugaacagaagcgccaccaagggcgugacccugcugcugcccgagcccgaguggaccuaccccagacugagcugccccggcagcaccuuccagaaggcccugcugaucagcccccacagauucggcgagaccaagggcaacagcgccccccugaucaucagagagcccuucaucgccugcggccccaaggagugcaagcacuucgcccugacccacuacgccgcccagcccggcggcuacuacaacggcaccagaggcgacagaaacaagcugagacaccugaucagcgugaagcugggcaagauccccaccguggagaacagcaucuuccacauggccgccuggagcggcagcgccugccacgacggcaaggaguggaccuacaucggcguggacggccccgacaacaacgcccugcugaagaucaaguacggcgaggccuacaccgacaccuaccacagcuacgccaacaacauccugagaacccaggagagcgccugcaacugcaucggcggcaacugcuaccugaugaucaccgacggcagcgccagcggcaucagcgagugcagauuccugaagaucagagagggcagaaucaucaaggagaucuuccccaccggcagagugaagcacaccgaggagugcaccugcggcuucgccagcaacaagaccaucgagugcgccugcagagacaacagcuacaccgccaagagacccuucgugaagcugaacguggagaccgacaccgccgagaucagacugaugugcaccgagaccuaccuggacacccccagacccgacgacggcagcaucaccggccccugcgagagcaacggcgacaagggcagcggcggcaucaagggcggcuucgugcaccagagaauggccagcaagaucggcagaugguacagcagaaccaugagcaagaccaagagaaugggcaugggccuguacgugaaguacgacggcgaccccugggccgacagcgacgcccuggcccugagcggcgugauggugagcauggaggagcccggcugguacagcuucggcuucgagaucaaggacaagaagugcgacgugcccugcaucggcaucgagauggugcacgacggcggcaaggagaccuggcacagcgccgccaccgccaucuacugccugaugggcagcggccagcugcugugggacaccgugaccggcguggacauggcccuguga

SEQ ID NO: 189253 - RNA, 1401 nt, Artificial Sequence
  derived and/or modified CDS sequence (opt4) from neuraminidase__InfluenzaB__AGX16922
augcugcccagcaccauccagacccugacccuguuccugaccagcggcggcgugcugcugagccuguacgugagcgccagccugagcuaccugcuguacagcgacauccugcugaaguucagccccaccgagaucaccgcccccaccaugccccuggacugcgccaacgccagcaacgugcaggccgugaacagaagcgccaccaagggcgugaccuuccugcugcccgagcccgaguggaccuaccccagacugagcugccccggcagcaccuuccagaaggcccugcugaucagcccccacagauucggcgagaccaagggcaacagcgccccccugaucaucagagagcccuucaucgccugcggccccaaggagugcaagcacuucgcccugacccacuacgccgcccagcccggcggcuacuacaacggcaccagaggcgacagaaacaagcugagacaccugaucagcgugaagcugggcaagauccccaccguggagaacagcaucuuccacauggccgccuggagcggcagcgccugccacgacggcaaggaguggaccuacaucggcguggacggccccgacaacaacgcccugcugaagaucaaguacggcgaggccuacaccgacaccuaccacagcuacgccaacaacauccugagaacccaggagagcgccugcaacugcaucggcggcaacugcuaccugaugaucaccgacggcagcgccagcggcaucagcgagugcagauuccugaagaucagagagggcagaaucaucaaggagaucuuccccaccggcagagugaagcacaccgaggagugcaccugcggcuucgccagcaacaagaccaucgagugcgccugcagagacaacagcuacaccgccaagagacccuucgugaagcugaacguggagaccgacaccgccgagaucagacugaugugcaccgagaccuaccuggacacccccagacccgacgacggcagcaucaccggccccugcgagagcaacggcgacaagggcagcggcggcaucaagggcggcuucgugcaccagagaauggccagcaagaucggcagaugguacagcagaaccaugagcaagaccaagagaaugggcaugggccuguacgugaaguacgacggcgaccccugggccgacagcgacgcccuggcccugagcggcgugauggugagcauggaggagcccggcugguacagcuucggcuucgagaucaaggacaagaagugcgacgugcccugcaucggcaucgagauggugcacgacggcggcaaggagaccuggcacagcgccgccaccgccaucuacugccugaugggcagcggccagcugcugugggacaccgugaccggcguggacauggcccuguga

SEQ ID NO: 189254 - RNA, 1401 nt, Artificial Sequence
  derived and/or modified CDS sequence (opt4) from neuraminidase__InfluenzaB__AGX16933
augcugcccagcaccauccagacccugacccuguuccugaccagcggcggcgugcugcugagccuguacgugagcgccagccugagcuaccugcuguacagcgacauccugcugaaguucagccccaccgagaucaacgcccccaccaugccccuggacugcgccaacgccagcaacgugcaggccgugaacagaagcgccaccaagggcgugacccugcugcugcccgagcccgaguggaccuaccccagacugagcugccccggcagcaccuuccagaaggcccugcugaucagcccccacagauucggcgagaccaagggcaacagcgccccccugaucaucagagagcccuucaucgccugcggccccaaggagugcaagcacuucgcccugacccacuacgccgcccagcccggcggcuacuacaacggcaccagaggcgacagaaacaagcugagacaccugaucagcgugaagcugggcaagauccccaccguggagaacagcaucuuccacauggccgccuggagcggcagcgccugccacgacggcaaggaguggaccuacaucggcguggacggccccgacaacaacgcccugcugaagaucaaguacggcgaggccuacaccgacaccuaccacagcuacgccaacaacauccugagaacccaggagagcgccugcaacugcaucggcggcaacugcuaccugaugaucaccgacggcagcgccagcggcaucagcgagugcagauuccugaagaucagagagggcagaaucaucaaggagaucuuccccaccggcagagugaagcacaccgaggagugcaccugcggcuucgccagcaacaagaccaucgagugcgccugcagagacaacagcuacaccgccaagagacccuucgugaagcugaacguggagaccgacaccgccgagaucagacugaugugcaccgagaccuaccuggacacccccagacccgacgacggcagcaucaccggccccugcgagagcaacggcgacaagggcagcggcggcaucaagggcggcuucgugcaccagagaauggccagcaagaucggcagaugguacagcagaaccaugagcaagaccaagagaaugggcaugggccuguacgugaaguacgacggcgaccccugggccgacagcgacgcccuggcccugagcggcgugauggugagcauggaggagcccggcugguacagcuucggcuucgagaucaaggacaagaagugcgacgugcccugcaucggcaucgagauggugcacgacggcggcaaggagaccuggcacagcgccgccaccgccaucuacugccugaugggcagcggccagcugcugcuggacaccgugaccggcguggacauggcccuguga

SEQ ID NO: 189255 - RNA, 1401 nt, Artificial Sequence
  derived and/or modified CDS sequence (opt4) from neuraminidase__InfluenzaB__AGX16944
augcugcccagcaccauccagacccugacccuguuccugaccagcggcggcgugcugcugagccuguacgugagcgccagccugagcuaccugcuguacagcgacauccugcugaaguucagccccaccgagaucaccgcccccaccaugccccuggacugcgccaacgccagcaacgugcaggccgugaacagaagcgccaccaagggcgugacccugcugcugcccgagcccgaguggaccuaccccagacugagcugccccggcagcaccuuccagaaggcccugcugaucagcccccacagauucggcgagaccaagggcaacagcgccccccugaucaucagagagcccuucaucgccugcggccccaaggagugcaagcacuucgcccugacccacuacgccgcccagcccggcggcuacuacagcggcaccagaggcgacagaaacaagcugagacaccugaucagcgugaagcugggcaagauccccaccguggagaacagcaucuuccacauggccgccuggagcggcagcgccugccacgacggcaaggaguggaccuacaucggcguggacggccccgacaacaacgcccugcugaagaucaaguacggcgaggccuacaccgacaccuaccacagcuacgccaacaacauccugagaacccaggagagcgccugcaacugcaucggcggcaacugcuaccugaugaucaccgacggcagcgccagcggcaucagcgagugcagauuccugaagaucagagagggcagaaucaucaaggagaucuuccccaccggcagagugaagcacaccgaggagugcaccugcggcuucgccagcaacaagaccaucgagugcgccugcagagacaacagcuacaccgccaagagacccuucgugaagcugaacguggagaccgacaccgccgagaucagacugaugugcaccgagaccuaccuggacacccccagacccgacgacggcagcaucaccggccccugcgagagcaacggcgacaagggcagcggcggcaucaagggcggcuucgugcaccagagaauggccagcaagaucggcagaugguacagcagaaccaugagcaagaacaagagaaugggcaugggccuguacgugaaguacgacggcgaccccugggccgacagcgacgcccuggcccugagcggcgugauggugagcauggaggagcccggcugguacagcuucggcuucgagaucaaggacaagaagugcgacgugcccugcaucggcaucgagauggugcacgacggcggcaaggagaccuggcacagcgccgccaccgccaucuacugccugaugggcagcggccagcugcugugggacaccgugaccggcguggacauggcccuguga

SEQ ID NO: 189256 - RNA, 1401 nt, Artificial Sequence; identical to SEQ ID NO: 188676
  derived and/or modified CDS sequence (opt4) from neuraminidase__InfluenzaB__AGX16955

SEQ ID NO: 189257 - RNA, 1401 nt, Artificial Sequence; identical to SEQ ID NO: 188674
  derived and/or modified CDS sequence (opt4) from neuraminidase__InfluenzaB__AGX16966

SEQ ID NO: 189258 - RNA, 1401 nt, Artificial Sequence; identical to SEQ ID NO: 188676
  derived and/or modified CDS sequence (opt4) from neuraminidase__InfluenzaB__AGX16977

SEQ ID NO: 189259 - RNA, 1401 nt, Artificial Sequence; identical to SEQ ID NO: 188676
  derived and/or modified CDS sequence (opt4) from neuraminidase__InfluenzaB__AGX16988

SEQ ID NO: 189260 - RNA, 1401 nt, Artificial Sequence; identical to SEQ ID NO: 189220
  derived and/or modified CDS sequence (opt4) from neuraminidase__InfluenzaB__AGX16999

SEQ ID NO: 189261 - RNA, 1401 nt, Artificial Sequence; identical to SEQ ID NO: 188676
  derived and/or modified CDS sequence (opt4) from neuraminidase__InfluenzaB__AGX17010

SEQ ID NO: 189262 - RNA, 1401 nt, Artificial Sequence; identical to SEQ ID NO: 189222
  derived and/or modified CDS sequence (opt4) from neuraminidase__InfluenzaB__AGX17021

SEQ ID NO: 189263 - RNA, 1401 nt, Artificial Sequence
  derived and/or modified CDS sequence (opt4) from neuraminidase__InfluenzaB__AGX17032
augcugcccagcaccauccagacccugacccuguuccugaccagcggcggcgugcugcugagccuguacgugagcgccagccugagcuaccugcuguacagcgacauccugcugaaguucagccccaccgagaucaccgcccccaccaugccccuggacugcgccaacgccagcgacgugcaggccgugaacagaagcgccaccaagggcgugacccugcugcugcccgagcccgaguggaccuaccccagacugagcugccccggcagcaccuuccagaaggcccugcugaucagcccccacagauucggcgagaccaagggcaacagcgccccccugaucaucagagagcccuucaucgccugcggccccaaggagugcaagcacuucgcccugacccacuacgccgcccagcccggcggcuacuacaacagaaccagaggcgacagaaacaagcugagacaccugaucagcgugaagcugggcaagauccccaccguggagaacagcaucuuccacauggccgccuggagcggcagcgccugccacgacggcaaggaguggaccuacaucggcguggacggccccgacaacaacgcccugcugaagaucaaguacggcgaggccuacaccgacaccuaccacagcuacgccaacaacauccugagaacccaggagagcgccugcaacugcaucggcggcaacugcuaccugaugaucaccgacggcagcgccagcggcaucagcgagugcagauuccugaagaucagagagggcagaaucaucaaggagaucuuccccaccggcagagugaagcacaccgaggagugcaccugcggcuucgccagcaacaagaccaucgagugcgccugcagagacaacagcuacaccgccaagagacccuucgugaagcugaacguggagaccgacaccgccgagaucagacugaugugcaccgagaccuaccuggacacccccagacccgacgacggcagcaucaccggccccugcgagagcaacggcgacaagggcagcggcggcaucaagggcggcuucgugcaccagagaauggccagcaagaucggcagaugguacagcagaaccaugagcaagaccaagagaaugggcaugggccuguacgugaaguacgacggcgaccccugggccgacagcgacgcccuggcccugagcggcgugauggugagcauggaggagcccggcugguacagcuucggcuucgagaucaaggacaagaagugcgacgugcccugcaucggcaucgagauggugcacgacggcggcaaggagaccuggcacagcgccgccaccgccaucuacugccugaugggcagcggccagcugcugugggacaccgugaccggcguggacauggcccuguga

SEQ ID NO: 189264 - RNA, 1401 nt, Artificial Sequence; identical to SEQ ID NO: 188674
  derived and/or modified CDS sequence (opt4) from neuraminidase__InfluenzaB__AGX17043

SEQ ID NO: 189265 - RNA, 1401 nt, Artificial Sequence
  derived and/or modified CDS sequence (opt4) from neuraminidase__InfluenzaB__AGX17054
augcugcccagcaccauccagacccugacccuguuccugaccagcggcggcgugcugcugagccuguacgugagcgccagccugagcuaccugcuguacagcgacauccugcugaaguucagccccaccgagaucaccgcccccaccaugccccuggacugcgccaacgccagcaacgugcaggccgugaacagaagcgccaccaagggcgugacccugcugcugcccgagcccgaguggaccuaccccagacugagcugccccggcagcaccuuccagaaggcccugcugaucagcccccacagauucggcgagaccaagggcaacagcgccccccugaucaucagagagcccuucaucgccugcggccccaaggagugcaagcacuucgcccugacccacuacgccgcccagcccggcggcuacuacaacggcaccagaggcgacagaaacaagcugagacaccugaucagcgugaagcugggcaagauccccaccguggagaacagcaucuuccacauggccgccuggagcggcagcgccugccacgacggcaaggaguggaccuacaucggcguggacggccccgacaacaacgcccugcugaagaucaaguacggcgaggccuacaccgacaccuaccacagcuacgccaacaacauccugagaacccaggagagcgccugcaacugcaucggcggcaacugcuaccugaugaucaccgacggcagcgccagcggcaucagcgagugcagauuccugaagaucagagagggcagaaucaucaaggagaucuuccccaccggcagagugaagcacaccgaggagugcaccugcggcuucgccagcaacaagaccaucgagugcgccugcagagacaacagcuacaccgccaagagacccuucgugaagcugaacguggagaccgacaccgccgagaucagacugaugugcaccgagaccuaccuggacacccccagacccgacgacggcagcaucaccggccccugcgagagcaacggcgacaacggcaacggcggcaucaagggcggcuucgugcaccagagaauggccagcaagaucggcagaugguacagcagaaccaugagcaagaccaagagaaugggcaugggccuguacgugaaguacgacggcgaccccugggccgacagcgacgcccuggcccugagcggcgugauggugagcauggaggagcccggcugguacagcuucggcuucgagaucaaggacaagaagugcgacgugcccugcaucggcaucgagauggugcacgacggcggcaaggagaccuggcacagcgccgccaccgccaucuacugccugaugggcagcggccagcugcugugggacaccgugaccggcguggacauggcccuguga

SEQ ID NO: 189266 - RNA, 1401 nt, Artificial Sequence
  derived and/or modified CDS sequence (opt4) from neuraminidase__InfluenzaB__AGX17065
augcugcccagcaccauccagacccugacccuguuccugaccagcggcggcgugcugcugagccuguacgugagcgcccugcugagcuaccugcuguacagcgacauccugcugaaguucagccccaccaagaucaucgcccccaccaccagccuggacagcgccaacgccagcaacuuccaggccgugaaccacagcgccaccaaggagaugaccuuccugcugcccgagcccgaguggaccuaccccagacugagcugccagggcagcaccuuccagaaggcccugcugaucagcccccacagauucggcgaggccaagggcaacagcgccccccugaucaucagagagcccuucaucgccugcggccccaaggagugcaagcacuucgcccugacccacuacgccgcccagcccggcggcuacuacaacggcaccagagaggacagaaacaagcugagacaccugaucagcgugaaccugggcaagauccccaccguggagaacagcaucuuccacauggccgccuggagcggcagcgccugccacgacggcagagaguggaccuacaucggcguggacggccccgacagcaacgcccugaucaagaucaaguacggcgaggccuacaccgacaccuaccacagcuacgccaacaacauccugagaacccaggagagcgccugcaacugcaucggcggcgacugcuaccugaugaucaccgacggcagcgccagcggcaucagcaagugcagauuccugaagaucagagagggcagaaucaucaaggagaucuuccccaccggcagaguggagcacaccgaggagugcaccugcggcuucgccagcaacaagaccaucgagugcgccugcagagacaacagcuacaccgccaagagacccuucgugaagcugaacguggagaccgacaccgccgagaucagacugaugugcaccgagaccuaccuggacacccccagacccgacgacggcagcaucaccggccccugcgagagcaacggcgacaagggcagcggcggcaucaagggcggcuucgugcaccagagaauggccagcaagaucggcagaugguacagcagaaccaucagcaagaccaagagaaugggcauggagcuguacgugaaguacgacggcgaccccuggaccgacagcgacgcccuggcccccagcggcgugauggugagcaucgaggagcccggcugguacagcuucggcuucgagaucaaggacaagaagugcgacgugcccugcaucggcaucgagauggugcacgacggcggcaagaccaccuggcacagcgccgccaccgccaucuacugccugaugggcagcggccagcugcugugggacaccgugaccggcguggacauggcccuguga

SEQ ID NO: 189267 - RNA, 1401 nt, Artificial Sequence
  derived and/or modified CDS sequence (opt4) from neuraminidase__InfluenzaB__AGX17076
augcugcccagcaccauccagacccugacccuguuccugaccagcggcggcgugcugcugagccuguacgugagcgccagccugagcuaccugcuguacagcgacauccugcugaaguucagccccaccgagaucaccgcccccaccaugccccuggacugcgccaacgccagcaacgugcaggccgugaacagaagcgccaccaagggcgugacccugcugcugcccgagcccgaguggaccuaccccagacugagcugccccggcagcaccuuccagaaggcccugcugaucagcccccacagauucggcgagaccaagggcaacagcgccccccugaucaucagagagcccuucaucgccugcggccccaaggagugcaagcacuucgcccugacccacuacgccgcccagcccggcggcuacuacaacggcaccagaggcgacagaaacaagcugagacaccugaucagcgugaagcugggcaagauccccaccguggagaacagcaucuuccacauggccgccuggagcggcagcgccugccacgacggcaaggaguggaccuacaucggcguggacggccccgacaacaacgcccugcugaagaucaaguacggcgaggccuacaccgacaccuaccacagcuacgccaacaacauccugagaacccaggagagcgccugcaacugcaucggcggcaacugcuaccugaugaucaccgacggcagcgccagcggcaucagcgagugcagauuccugaagaucagagagggcagaaucaucaaggagaucuuccccaccggcagagugaagcacaccgaggagugcaccugcggcuucgccagcaacaagaccaucgagugcgccugcagagacaacagcuacaccgccaagagacccuucgugaagcugaacguggagaccgacaccgccgagaucagacugaugugcaccgagaccuaccuggacacccccagacccgacgacggcagcaucaccggccccugcgagagcaacggcgacaagggcagcggcggcaucaagggcggcuucgugcaccagagaauggccagcaagaucggcagaugguacagcagaaccaugagcaagaccaagagaaugggcaugggccuguacgugaaguacgacggcgaccccugggccgacagcgacgcccuggcccugagcggcgugauggugagcauggaggagcccggcugguacagcuucggcuucgagaucagagacaagaagugcgacgugcccugcaucggcaucgagaucgugcacgacggcggcaaggagaccuggcacagcgccgccaccgccaucuacugccugaugggcagcggccagcugcugugggacaccgugaccggcguggacauggcccuguga

SEQ ID NO: 189268 - RNA, 1401 nt, Artificial Sequence; identical to SEQ ID NO: 189222
  derived and/or modified CDS sequence (opt4) from neuraminidase__InfluenzaB__AGX17087

SEQ ID NO: 189269 - RNA, 1401 nt, Artificial Sequence; identical to SEQ ID NO: 189222
  derived and/or modified CDS sequence (opt4) from neuraminidase__InfluenzaB__AGX17098

SEQ ID NO: 189270 - RNA, 1401 nt, Artificial Sequence; identical to SEQ ID NO: 189222
  derived and/or modified CDS sequence (opt4) from neuraminidase__InfluenzaB__AGX17109

SEQ ID NO: 189271 - RNA, 1401 nt, Artificial Sequence; identical to SEQ ID NO: 189222
  derived and/or modified CDS sequence (opt4) from neuraminidase__InfluenzaB__AGX17120

SEQ ID NO: 189272 - RNA, 1401 nt, Artificial Sequence; identical to SEQ ID NO: 188674
  derived and/or modified CDS sequence (opt4) from neuraminidase__InfluenzaB__AGX17131

SEQ ID NO: 189273 - RNA, 1401 nt, Artificial Sequence; identical to SEQ ID NO: 188676
  derived and/or modified CDS sequence (opt4) from neuraminidase__InfluenzaB__AGX17142

SEQ ID NO: 189274 - RNA, 1401 nt, Artificial Sequence
  derived and/or modified CDS sequence (opt4) from neuraminidase__InfluenzaB__AGX17153
augcugcccagcaccauccagacccugacccuguuccugaccagcggcggcgugcugcugagccuguacgugagcgccagccugagcuaccugcuguacagcgacauccugcugaaguucagccccaccgagaucaccgcccccaccaugccccuggacugcgccaacgccagcaacgugcaggccgugaacagaagcgccaccaagggcgugacccugcugcugcccgagcccgaguggaccuaccccagacugagcugccccggcagcaccuuccagaaggcccugcugaucagcccccacagauucggcgagaccaagggcaacagcgccccccugaucaucagagagcccuucaucgccugcggccccaaggagugcaagcacuucgcccugacccacuacgccgcccagcccggcggcuacuacaacggcaccagaggcgacagaaacaagcugagacaccugaucagcgugaagcugggcaagauccccaccguggagaacagcaucuuccacauggccgccuggagcggcagcgccugccacgacggcaaggaguggaccuacaucggcguggacggccccgacaacaacgcccugcugaagaucaaguacggcgaggccuacaccgacaccuaccacagcuacgccaacaacauccugagaacccaggagagcgccugcaacugcaucggcggcaacugcuaccugaugaucaccgacggcagcgccagcggcaucagcgagugcagauuccugaagaucagagagggcagaaucaucaaggagaucuuccccaccggcagagugaagcacaccgaggagugcaccugcggcuucgccagcaacaagaccaucgagugcgccugcagagacaacagcuacaccgccaagagacccuucgugaagcugaacguggagaccgacaccgccgagaucagacugaugugcaccgagaccuaccuggacacccccagacccgacgacggcagcaucaucggccccugcgagagcaacggcgacaagggcagcggcggcaucaagggcggcuucgugcaccagagaauggccagcaagaucggcagaugguacagcagaaccaugagcaagaccaagagaaugggcaugggccuguacgugaaguacgacggcgaccccugggccgacagcgacgcccuggcccugagcggcgugauggugagcauggaggagcccggcugguacagcuucggcuucgagaucaaggacaagaagugcgacgugcccugcaucggcaucgagauggugcacgacggcggcaaggagaccuggcacagcgccgccaccgccaucuacugccugaugggcagcggccagcugcugugggacaccgugaccggcguggacauggcccuguga

SEQ ID NO: 189275 - RNA, 1401 nt, Artificial Sequence; identical to SEQ ID NO: 189222
  derived and/or modified CDS sequence (opt4) from neuraminidase__InfluenzaB__AGX17164

SEQ ID NO: 189276 - RNA, 1404 nt, Artificial Sequence
  derived and/or modified CDS sequence (opt4) from neuraminidase__InfluenzaB__AGX17175
augcugcccagcaccauccagacccugacccuguuccugaccagcggcggcgugcugcugagccuguacgugagcgccagccugagcuaccugcuguacagcgacauccugcugaaguucagccccaccgagaucaccgcccccaccaugccccuggacugcgccaacgccagcaacgugcaggccgugaacagaagcgccaccaagggcgugacccugcugcugcugcccgagcccgaguggaccuaccccagacugagcugccccggcagcaccuuccagaaggcccugcugaucagcccccacagauucggcgagaccaagggcaacagcgccccccugaucaucagagagcccuucaucgccugcggccccaaggagugcaagcacuucgcccugacccacuacgccgcccagcccggcggcuacuacaacggcaccagaggcgacagaaacaagcugagacaccugaucagcgugaagcugggcaagauccccaccguggagaacagcaucuuccacauggccgccuggagcggcagcgccugccacgacggcaaggaguggaccuacaucggcguggacggccccgacaacaacgcccugcugaagaucaaguacggcgaggccuacaccgacaccuaccacagcuacgccaacaacauccugagaacccaggagagcgccugcaacugcaucggcggcaacugcuaccugaugaucaccgacggcagcgccagcggcaucagcgagugcagauuccugaagaucagagagggcagaaucaucaaggagaucuuccccaccggcagagugaagcacaccgaggagugcaccugcggcuucgccagcaacaagaccaucgagugcgccugcagagacaacagcuacaccgccaagagacccuucgugaagcugaacguggagaccgacaccgccgagaucagacugaugugcaccgagaccuaccuggacacccccagacccgacgacggcagcaucaccggccccugcgagagcaacggcgacaagggcagcggcggcaucaagggcggcuucgugcaccagagaauggccagcaagaucggcagaugguacagcagaaccaugagcaagaccaagagaaugggcaugggccuguacgugaaguacgacggcgaccccugggccgacagcgacgcccuggcccugagcggcgugauggugagcauggaggagcccggcugguacagcuucggcuucgagaucagagacaagaagugcgacgugcccugcaucggcaucgagauggugcacgacggcggcaaggagaccuggcacagcgccgccaccgccaucuacugccugaugggcagcggccagcugcugugggacaccgugaccggcguggacauggcccuguga

SEQ ID NO: 189277 - RNA, 1401 nt, Artificial Sequence
  derived and/or modified CDS sequence (opt4) from neuraminidase__InfluenzaB__AGX17186
augcugcccagcaccauccagacccugacccuguuccugaccagcggcggcgugcugcugagccuguacgugagcgccagccugagcuaccugcuguacagcgacauccugcugaaguucagccccaccgagaucaccacccccaccaugccccuggacugcgccaacgccagcaacgugcaggccgugaacagaagcgccaccaagggcgugacccugcugcugcccgagcccgaguggaccuaccccagacugagcugccccggcagcaccuuccagaaggcccugcugaucagcccccacagauucggcgagaccaagggcaacagcgccccccugaucaucagagagcccuucaucgccugcggccccaaggagugcaagcacuucgcccugacccacuacgccgcccagcccggcggcuacuacaacggcaccagaggcgacagaaacaagcugagacaccugaucagcgugaagcugggcaagauccccaccguggagaacagcaucuuccacauggccgccuggagcggcagcgccugccacgacggcaaggaguggaccuacaucggcguggacggccccgacaacaacgcccugcugaagaucaaguacggcgaggccuacaccgacaccuaccacagcuacgccaacaacauccugagaacccaggagagcgccugcaacugcaucggcggcaacugcuaccugaugaucaccgacggcagcgccagcggcaucagcgagugcagauuccugaagaucagagagggcagaaucaucaaggagaucuuccccaccggcagagugaaguacaccgaggagugcaccugcggcuucgccagcaacaagaccaucgagugcgccugcagagacaacagcuacaccgccaagagacccuucgugaagcugaacguggagaccgacaccgccgagaucagacugaugugcaccgagaccuaccuggacacccccagacccgacgacggcagcaucaccggccccugcgagagcaacggcgacaagggcagcggcggcaucaagggcggcuucgugcaccagagaauggccagcaagaucggcagaugguacagcagaaccaugagcaagaccagaagaaugggcaugggccuguacgugaaguacgacggcgaccccugggccgacagcgacgcccuggcccugagcggcgugauggugagcauggaggagcccggcugguacagcuucggcuucgagaucaaggacaagaagugcgacgugcccugcaucggcaucgagauggugcacgacggcggcaaggagaccuggcacagcgccgccaccgccaucuacugccugaugggcagcggccagcugcugugggacaccgugaccggcguggacauggcccuguga

SEQ ID NO: 189278 - RNA, 1401 nt, Artificial Sequence; identical to SEQ ID NO: 189253
  derived and/or modified CDS sequence (opt4) from neuraminidase__InfluenzaB__AGX17197

SEQ ID NO: 189279 - RNA, 1401 nt, Artificial Sequence
  derived and/or modified CDS sequence (opt4) from neuraminidase__InfluenzaB__AGX17208
augcugcccagcaccauccagacccugacccuguuccugaccagcggcggcgugcugcugagccuguacgugagcgccagccugagcuaccugcuguacagcgacauccugcugaaguucagccccaccgagaucaccacccccaccaugccccuggacugcgccaacgccagcaacgugcaggccgugaacagaagcgccaccaagggcgugacccugcugcugcccgagcccgaguggaccuaccccagacugagcugccccggcagcaccuuccagaaggcccugcugaucagcccccacagauucggcgagaccaagggcaacagcgccccccugaucaucagagagcccuucaucgccugcggccccaaggagugcaagcacuucgcccugacccacuacgccgcccagcccggcggcuacuacaacggcaccagaggcgacagaaacaagcugagacaccugaucagcgugaagcugggcaagauccccaccguggagaacagcaucuuccacauggccgccuggagcggcagcgccugccacgacggcaaggaguggaccuacaucggcguggacggccccgacaacaacgcccugcugaagaucaaguacggcgaggccuacaccgacaccuaccacagcuacgccaacaacauccugagaacccaggagagcgccugcaacugcaucggcggcaacugcuaccugaugaucaccgacggcagcgccagcggcaucagcgagugcagauuccugaagaucagagagggcagaaucaucaaggagaucuuccccaccggcagagugaagcacaccgaggagugcaccugcggcuucgccagcaacaagaccaucgagugcgccugcagagacaacagcuacaccgccaagagacccuucgugaagcugaacguggagaccgacaccgccgagaucagacugaugugcaccgagaccuaccuggacacccccagacccgacgacggcagcaucaccggccccugcgagagcaacggcgacaagggcagcggcggcaucaagggcggcuucgugcaccagagaauggccagcaagaucggcagaugguacagcagaaccaugagcaagaccagaagaaugggcaugggccuguacgugaaguacgacggcgaccccugggccgacagcgacgcccuggcccugagcggcgugauggugagcauggaggagcccggcugguacagcuucggcuucgagaucaaggacaagaagugcgacgugcccugcaucggcaucgagauggugcacgacggcggcaaggagaccuggcacagcgccgccaccgccaucuacugccugaugggcagcggccagcugcugugggacaccgugaccggcguggacauggcccuguga

SEQ ID NO: 189280 - RNA, 1401 nt, Artificial Sequence; identical to SEQ ID NO: 189222
  derived and/or modified CDS sequence (opt4) from neuraminidase__InfluenzaB__AGX17219

SEQ ID NO: 189281 - RNA, 1401 nt, Artificial Sequence; identical to SEQ ID NO: 188676
  derived and/or modified CDS sequence (opt4) from neuraminidase__InfluenzaB__AGX17230

SEQ ID NO: 189282 - RNA, 1401 nt, Artificial Sequence; identical to SEQ ID NO: 189222
  derived and/or modified CDS sequence (opt4) from neuraminidase__InfluenzaB__AGX17241

SEQ ID NO: 189283 - RNA, 1401 nt, Artificial Sequence
  derived and/or modified CDS sequence (opt4) from neuraminidase__InfluenzaB__AGX17252
augcugcccagcaccauccagacccugacccuguuccugaccagcggcggcgugcugcugagccuguacgugagcgccagccugagcuaccugcuguacagcgacauccugcugaaguucagccccaccgagaucaccgcccccaccaugccccuggacugcgccaacgccagcaacgugcaggccgugaacagaagcgccaccaagggcgugacccugcugcugcccgagcuggaguggaccuaccccagacugagcugccccggcagcaccuuccagaaggcccugcugaucagcccccacagauucggcgagaccaagggcaacagcgccccccugaucaucagagagcccuucaucgccugcggccccaaggagugcaagcacuucgcccugaccuacuacgccgcccagcccggcggcuacuacaacggcaccagaggcgacagaaacaagcugagacaccugaucagcgugaagcugggcaagauccccaccguggagaacagcaucuuccacauggccgccuggagcggcagcgccugccacgacggcaaggaguggaccuacaucggcguggacggccccgacaacaacgcccugcugaagaucaaguacggcgaggccuacaccgacaccuaccacagcuacgccaacaacauccugagaacccaggagagcgccugcaacugcaucggcggcaacugcuaccugaugaucaccgacggcagcgccagcggcaucagcgagugcagauuccugaagaucagagagggcagaaucaucaaggagaucuuccccaccggcagagugaagcacaccgaggagugcaccugcggcuucgccagcaacaagaccaucgagugcgccugcagagacaacagcuacaccgccaagagacccuucgugaagcugaacguggagaccgacaccgccgagaucagacugaugugcaccgagaccuaccuggacacccccagacccgccgacggcagcaucaccggccccugcgagagcaacggcgacaagggcagcggcggcaucaagggcggcuucgugcaccagagaauggccagcaagaucggcagaugguacagcagaaccaugagcaagaccaagagaaugggcaugggccuguacgugaaguacgacggcgaccccugggccgacagcgacgcccuggcccugagcggcgugauggugagcauggaggagcccggcugguacagcuucggcuucgagaucaaggacaagaagugcgacgugcccugcaucggcaucgagauggugcacgacggcggcaaggagaccuggcacagcgccgccaccgccaucuacugccugaugggcagcggccagcugcugugggacaccgugaccggcguggacauggcccuguga

SEQ ID NO: 189284 - RNA, 1401 nt, Artificial Sequence
  derived and/or modified CDS sequence (opt4) from neuraminidase__InfluenzaB__AGX17263
augcugcccagcaccauccagacccugacccuguuccugaccagcggcggcgugcugcugagccuguacgugagcgccagccugagcuaccugcuguacagcgacauccugcugaagcugagccccaccgagaucaccgcccccaccaugccccuggacugcgccaacgccagcaacgugcaggccgugaacagaagcgccaccaagggcgugacccugcugcugcccgagcccgaguggaccuaccccagacugagcugccccggcagcaccuuccagaaggcccugcugaucagcccccacagauucggcgagaccaagggcaacagcgccccccugaucaucagagagcccuucaucgccugcggccccaaggagugcaagcacuucgcccugacccacuacgccgcccagcccggcggcuacuacaacggcaccagaggcgacagaaacaagcugagacaccugaucagcgugaagcugggcaagauccccaccguggagaacagcaucuuccacauggccgccuggagcggcagcgccugccacgacggcaaggaguggaccuacaucggcguggacggccccgacaacaacgcccugcugaagaucaaguacggcgaggccuacaccgacaccuaccacagcuacgccaacaacauccugagaacccaggagagcgccugcaacugcaucggcggcaacugcuaccugaugaucaccgacggcagcgccagcggcaucagcgagugcagauuccugaagaucagagagggcagaaucaucaaggagaucuuccccaccggcagagugaagcacaccgaggagugcaccugcggcuucgccagcaacaagaccaucgagugcgccugcagagacaacagcuacaccgccaagagacccuucgugaagcugaacguggagaccgacaccgccgagaucagacugaugugcaccgagaccuaccuggacacccccagacccgacgacggcagcaucaccggccccugcgagagcaacggcgacaagggcagcggcggcaucaagggcggcuucgugcaccagagaauggccagcaagaucggcagaugguacagcagaaccaugagcaagaccaagagaaugggcaugggccuguacgugaaguacgacggcgaccccugggccgacagcgacgcccuggcccugagcggcgugauggugagcauggaggagcccggcugguacagcuucggcuucgagaucaaggacaagaagugcgacgugcccugcaucggcaucgagauggugcacgacggcggcaaggagaccuggcacagcgccgccaccgccaucuacugccugaugggcagcggccagcugcugugggacaccgugaccggcguggacauggcccuguga

SEQ ID NO: 189285 - RNA, 1401 nt, Artificial Sequence
  derived and/or modified CDS sequence (opt4) from neuraminidase__InfluenzaB__AGX17274
augcugcccagcaccauccagacccugacccuguuccugaccagcggcggcgugcugcugagccuguacgugagcgccagccugagcuaccugcuguacagcgacauccugcugaaguucagccccaccgagaucaacgcccccaccaugccccuggacugcgccaacgccagcaacgugcaggccgugaacagaagcgccaccaagggcgugacccugcugcugcccgagcccgaguggaccuaccccagacugagcugccccggcagcaccuuccagaaggcccugcugaucagcccccacagauucggcgagaccaagggcaacagcgccccccugaucaucagagagcccuucaucgccugcggccccaaggagugcaagcacuucgcccugacccacuacgccgcccagcccggcggcuacuacaacggcaccagaggcgacagaaacaagcugagacaccugaucagcgugaagcugggcaagauccccaccguggagaacagcaucuuccacauggccgccuggagcggcagcgccugccacgacggcaaggaguggaccuacaucggcguggacggccccgacaacaacgcccugcugaagaucaaguacggcgaggccuacaccgacaccuaccacagcuacgccaacaacauccugagaacccaggagagcgccugcaacugcaucggcggcaacugcuaccugaugaucaccgacggcagcgccagcggcaucagcgagugcagauuccugaagaucagagagggcagaaucaucaaggagaucuuccccaccggcagagugaagcacaccgaggagugcaccugcggcuucgccagcaacaagaccaucgagugcgccugcagagacaacagcuacaccgccaagagacccuucgugaagcugaacguggagaccgacaccgccgagaucagacugaugugcaccgagaccuaccuggacacccccagacccgacgacggcagcaucaccggccccugcgagagcaacggcgacaagggcagcggcggcaucaagggcggcuucgugcaccagagaauggccagcaagaucggcagaugguacagcagaaccaugagcaagaccaagagaaugggcaugggccuguacgugaaguacgacggcgaccccugggccgacagcgacgcccuggcccugagcggcgugauggugagcauggaggagcccggcugguacagcuucggcuucgagaucaaggacaagaagugcgacgugcccugcaucggcaucgagauggugcacgacggcggcaaggagaccuggcacagcgccgccaccgccaucuacugccugaugggcagcggccagcugcugugggacaccgugaccggcguggacauggcccuguga

SEQ ID NO: 189286 - RNA, 1401 nt, Artificial Sequence
  derived and/or modified CDS sequence (opt4) from neuraminidase__InfluenzaB__AGX17285
augcugcccagcaccauccagacccugacccuguuccugaccagcggcggcgugcugcugagccuguacaugagcgccagccugagcuaccugcuguacagcgacauccugcugaaguucagccccaccgagaucaccgcccccaccaugccccuggacugcgccaacgccagcaacgugcaggccgugaacagaagcgccaccaagggcgugacccugcugcugcccgagcccgaguggaccuaccccagacugagcugccccggcagcaccuuccagaaggcccugcugaucagcccccacagauucggcgagaccaagggcaacagcgccccccugaucaucagagagcccuucaucgccugcggccccaaggagugcaagcacuucgcccugacccacuacgccgcccagcccggcggcuacuacaacggcaccagaggcgacagaaacaagcugagacaccugaucagcgugaagcugggcaagauccccaccguggagaacagcaucuuccacauggccgccuggagcggcagcgccugccacgacggcaaggaguggaccuacaucggcguggacggccccgacaacaacgcccugcugaagaucaaguacggcgaggccuacaccgacaccuaccacagcuacgccaacaacauccugagaacccaggagagcgccugcaacugcaucggcggcaacugcuaccugaugaucaccgacggcagcgccagcggcaucagcgagugcagauuccugaagaucagagagggcagaaucaucaaggagaucuuccccaccggcagagugaagcacaccgaggagugcaccugcggcuucgccagcaacaagaccaucgagugcgccugcagagacaacagcuacaccgccaagagacccuucgugaagcugaacguggagaccgacaccgccgagaucagacugaugugcaccgagaccuaccuggacacccccagacccgacgacggcagcaucaccggccccugcgagagcaacggcgacaagggcagcggcggcaucaagggcggcuucgugcaccagagaauggccagcaagaucggcagaugguacagcagaaccaugagcaagaccaagagaaugggcaugggccuguacgugaaguacgacggcgaccccugggccgacagcgacgcccuggcccugagcggcgugauggugagcauggaggagcccggcugguacagcuucggcuucgagaucaaggacaagaagugcgacgugcccugcaucggcaucgagauggugcacgacggcggcaaggagaccuggcacagcgccgccaccgccaucuacugccugaugggcagcggccagcugcugugggacaccgugaccggcguggacauggcccuguga

SEQ ID NO: 189287 - RNA, 1401 nt, Artificial Sequence
  derived and/or modified CDS sequence (opt4) from neuraminidase__InfluenzaB__AGX17296
augcugcccagcaccauccagacccugacccuguuccugaccagcggcggcgugcugcugagccuguacgugagcgccagccugagcuaccugcuguacagcgacauccugcugaaguucagccccaccgagaucaccgcccccaccaugccccuggacugcgccaacgccagcaacgugcaggccgugaacagaagcgccaccaagggcgugacccugcugcugcccgagcccgaguggaccuaccccagacugagcugccccggcagcaccuuccagaaggcccugcugaucagcccccacagauucggcgaggccaagggcaacagcgccccccugaucaucagagagcccuucaucgccugcggccccaaggagugcaagcacuucgcccugacccacuacgccgcccagcccggcggcuacuacaacggcaccagaggcgacagaaacaagcugagacaccugaucagcgugaagcugggcaagauccccaccguggagaacagcaucuuccacauggccgccuggagcggcagcgccugccacgacggcaaggaguggaccuacaucggcguggacggccccgacaacaacgcccugcugaagaucaaguacggcgaggccuacaccgacaccuaccacagcuacgccaacaacauccugagaacccaggagagcgccugcaacugcaucggcggcaacugcuaccugaugaucaccgacggcagcgccagcggcaucagcgagugcagauuccugaagaucagagagggcagaaucaucaaggagaucuuccccaccggcagagugaagcacaccgaggagugcaccugcggcuucgccagcaacaagaccaucgagugcgccugcagagacaacagcuacaccgccaagagacccuucgugaagcugaacguggagaccgacaccgccgagaucagacugaugugcaccgagaccuaccuggacacccccagacccgacgacggcagcaucaccggccccugcgagagcaacggcgacaagggcagcggcggcaucaagggcggcuucgugcaccagagaauggccagcaagaucggcagaugguacagcagaaccaugagcaagaccaagagaaugggcaugggccuguacgugaaguacgacggcgaccccugggccgacagcgacgcccuggcccugagcggcgugauggugagcauggaggagcccggcugguacagcuucggcuucgagaucaaggacaagaagugcgacgugcccugcaucggcaucgagauggugcacgacggcggcaaggagaccuggcacagcgccgccaccgccaucuacugccugaugggcagcggccagcugcugugggacaccgugaccggcguggacauggcccuguga

SEQ ID NO: 189288 - RNA, 1401 nt, Artificial Sequence; identical to SEQ ID NO: 189220
  derived and/or modified CDS sequence (opt4) from neuraminidase__InfluenzaB__AGX17307

SEQ ID NO: 189289 - RNA, 1401 nt, Artificial Sequence; identical to SEQ ID NO: 188674
  derived and/or modified CDS sequence (opt4) from neuraminidase__InfluenzaB__AGX17318

SEQ ID NO: 189290 - RNA, 1401 nt, Artificial Sequence
  derived and/or modified CDS sequence (opt4) from neuraminidase__InfluenzaB__AGX17329
augcugcccagcaccauccagacccugacccuguuccugaccagcggcggcgugcugcugagccuguacgugagcgccagccugagcuaccugcuguacagcgacaugcugcugaaguucagccccaccgagaucaccgcccccaccaugccccuggacugcgccaacgccagcaacgugcaggccgugaacagaagcgccaccaagggcgugacccugcugcugcccgagcccgaguggaccuaccccagacugagcugccccggcagcaccuuccagaaggcccugcugaucagcccccacagauucggcgagaccaagggcaacagcgccccccugaucaucagagagcccuucaucgccugcggccccaaggagugcaagcacuucgcccugacccacuacgccgcccagcccggcggcuacuacagcggcaccagaggcgacagaaacaagcugagacaccugaucagcgugaagcugggcaagauccccaccguggagaacagcaucuuccacauggccgccuggagcggcagcgccugccacgacggcaaggaguggaccuacaucggcguggacggccccgacaacaacgcccugcugaagaucaaguacggcgaggccuacaccgacaccuaccacagcuacgccaacaacauccugagaacccaggagagcgccugcaacugcaucggcggcaacugcuaccugaugaucaccgacggcagcgccagcggcaucagcgagugcagauuccugaagaucagagagggcagaaucaucaaggagaucuuccccaccggcagagugaagcacaccgaggagugcaccugcggcuucgccagcaacaagaccaucgagugcgccugcagagacaacagcuacaccgccaagagacccuucgugaagcugaacguggagaccgacaccgccgagaucagacugaugugcaccgagaccuaccuggacacccccagacccgacgacggcagcaucaccggccccugcgagagcaacggcgacaagggcagcggcggcaucaagggcggcuucgugcaccagagaauggccagcaagaucggcagaugguacagcagaaccaugagcaagaacaagagaaugggcaugggccuguacgugaaguacgacggcgaccccugggccgacagcgacgcccuggcccugagcggcgugauggugagcauggaggagcccggcugguacagcuucggcuucgagaucaaggacaagaagugcgacgugcccugcaucggcaucgagauggugcacgacggcggcaaggagaccuggcacagcgccgccaccgccaucuacugccugaugggcagcggccagcugcugugggacaccgugaccggcguggacauggcccuguga

SEQ ID NO: 189291 - RNA, 1401 nt, Artificial Sequence; identical to SEQ ID NO: 189222
  derived and/or modified CDS sequence (opt4) from neuraminidase__InfluenzaB__AGX17340

SEQ ID NO: 189292 - RNA, 1401 nt, Artificial Sequence
  derived and/or modified CDS sequence (opt4) from neuraminidase__InfluenzaB__AGX17351
augcugcccagcaccauccagacccugacccuguuccugaccagcggcggcgugcugcugagccuguacgugagcgccagccugagcuaccugcuguacagcgacauccugcugaaguucagccccaccgagaucaccgcccccaccaugccccuggacugcgccaacgccagcaacgugcaggccgugaacagaagcgccaccaagggcgugacccugcugcugcccgagcccgaguggaccuaccccagacugagcugccccggcagcaccuuccagaaggcccugcugaucagcccccacagauucggcgagaccaagggcaacagcgccccccugaucaucagagagcccuucaucgccugcggccccaaggagugcaagcacuucgcccugacccacuacgccgcccagcccggcggcuacuacaacggcaccagaggcgacagaaacaagcugagacaccugaucagcgugaagcugggcaagauccccaccguggagaacagcaucuuccacauggccgccuggagcggcagcgccugccacgacggcaaggaguggaccuacaucggcguggacggccccgacaacaacgcccugcugaagaucaaguacggcgaggccuacaccgacaccuaccacagcuacgccaacaacauccugagaacccaggagagcgccugcaacugcaucggcggcaacugcuaccugaugaucaccgacggcagcgccagcggcaucagcgagugcagauuccugaagaucagagagggcagaaucaucaaggagaucuuccccaccggcagagugaagcacaccgaggagugcaccugcggcuucgccagcaacaagaccaucgagugcgccugcagagacaacagcuacaccgccaagagacccuucgugaagcugaacguggagaccgacaccgccgagaucagacugaugugcaccgagaccuaccuggacacccccagacccgacgacggcagcaucaccggccccugcgagaccaacggcgacaagggcagcggcggcaucaagggcggcuucgugcaccagagaauggccagcaagaucggcagaugguacagcagaaccaugagcaagaccaagagaaugggcaugggccuguacgugaaguacgacggcgaccccugggccgacagcgacgcccuggcccugagcggcgugauggugagcauggaggagcccggcugguacagcuucggcuucgagaucaaggacaagaagugcgacgugcccugcaucggcaucgagauggugcacgacggcggcaaggagaccuggcacagcgccgccaccgccaucuacugccugaugggcagcggccagcugcugugggacaccgugaccggcguggacauggcccuguga

SEQ ID NO: 189293 - RNA, 1401 nt, Artificial Sequence
  derived and/or modified CDS sequence (opt4) from neuraminidase__InfluenzaB__AGX17362
augcugcccagcaccauccagacccugacccuguuccugaccagcggcggcgugcugcugagccuguacgugagcgccagccugagcuaccugcuguacagcgacauccugcugaaguucagccccaccgagaucaccgcccccaccaucccccuggacugcgccaacgccagcaacauccaggccgugaacagaagcgccaccaagggcgugacccugcugcugcccgagcccgaguggaccuaccccagacugagcugccccggcagcaccuuccagaaggcccugcugaucagcccccacagauucggcgagaccaagggcaacagcgccccccugaucaucagagagcccuucaucgccugcggccccaaggagugcaagcacuucgcccugacccacuacgccgcccagcccggcggcuacuacaacggcaccagaggcgacagaaacaagcugagacaccugaucagcgugaagcugggcaagauccccaccguggagaacagcaucuuccacauggccgccuggagcggcagcgccugccacgacggcaaggaguggaccuacaucggcguggacggccccgacaacaacgcccugcugaagaucaaguacggcgaggccuacaccgacaccuaccacagcuacgccaacaacauccugagaacccaggagagcgccugcaacugcaucggcggcaacugcuaccugaugaucaccgacggcagcgccagcggcaucagcgagugcagauuccugaagaucagagagggcagaaucaucaaggagaucuuccccaccggcagagugaagcacaccgaggagugcaccugcggcuucgccagcaacaagaccaucgagugcgccugcagagacaacagcuacaccgccaagagacccuucgugaagcugaacguggagaccgacaccgccgagaucagacugaugugcaccgagaccuaccuggacacccccagacccgacgacggcagcaucaccggccccugcgagagcaacggcgacaagggcagcggcggcaucaagggcggcuucgugcaccagagaauggccagcaagaucggcagaugguacagcagaaccaugagcaagaccaagagaaugggcaugggccuguacgugaaguacgacggcgaccccugggccgacagcgacgcccuggcccugagcggcgugauggugagcauggaggagcccggcugguacagcuucggcuucgagaucaaggacaagaagugcgacgugcccugcaucggcaucgagauggugcacgacggcggcaaggagaccuggcacagcgccgccaccgccaucuacugccugaugggcagcggccagcugcugugggacaccgugaccggcguggacauggcccuguga

SEQ ID NO: 189294 - RNA, 1401 nt, Artificial Sequence
  derived and/or modified CDS sequence (opt4) from neuraminidase__InfluenzaB__AGX17373
augcugcccagcaccauccagacccugacccuguuccugaccagcggcggcgugcugcugagccuguacgugagcgccagccugagcuaccugcuguacagcgacauccugcugaaguucagccccaccgagaucaccgcccccaccaugccccuggacugcgccaacgccagcaacgugcaggccgugaacagaagcgccaccaagggcgugacccugcugcugcccgagcccgaguggaccuaccccagacugagcugccccggcagcaccuuccagaaggcccugcugaucagcccccacagauucggcgagaccaagggcaacagcgccccccugaucaucagagagcccuucaucgccugcggccccaaggagugcaagcacuucgcccugacccacuacgccgcccagcccggcggcuacuacaacggcaccagaggcgacagaaacaagcugagacaccugaucagcgugaagcugggcaagauccccaccguggagaacagcaucuuccacauggccgccuggagcggcagcgccugccacgacggcaaggaguggaccuacaucggcguggacggccccgacaacaacgcccugcugaagaucaaguacggcgaggccuacaccgacaccuaccacagcuacgccaacaacauccugagaacccaggagagcgccugcaacugcaucggcggcaacugcuaccugaugaucaccgacggcagcgccagcggcgugagcgagugcagauuccugaagaucagagagggcagaaucaucaaggagaucuuccccaccggcagagugaagcacaccgaggagugcaccugcggcuucgccaacaacaagaccaucgagugcgccugcagagacaacagcuacaccgccaagagacccuucgugaagcugaacguggagaccgacaccgccgagaucagacugaugugcaccgagaccuaccuggacacccccagacccgacgacggcagcaucaccggccccugcgagagcaacggcgacaagggcagcggcggcaucaagggcggcuucgugcaccagagaauggccagcaagaucggcagaugguacagcagaaccaugagcaagaccaagagaaugggcaugggccuguacgugaaguacgacggcgaccccugggccgacagcgacgcccuggcccugagcggcgugauggugagcauggaggagcccggcugguacagcuucggcuucgagaucaaggacaagaagugcgacgugcccugcaucggcaucgagauggugcacgacggcggcaaggagaccuggcacagcgccgccaccgccaucuacugccugaugggcagcggccagcugcugugggacaccgugaccggcgugaacauggcccuguga

SEQ ID NO: 189295 - RNA, 1401 nt, Artificial Sequence; identical to SEQ ID NO: 188674
  derived and/or modified CDS sequence (opt4) from neuraminidase__InfluenzaB__AGX17384

SEQ ID NO: 189296 - RNA, 1401 nt, Artificial Sequence; identical to SEQ ID NO: 188742
  derived and/or modified CDS sequence (opt4) from neuraminidase__InfluenzaB__AGX17395

SEQ ID NO: 189297 - RNA, 1401 nt, Artificial Sequence
  derived and/or modified CDS sequence (opt4) from neuraminidase__InfluenzaB__AGX17404
augcugcccagcaccauccagacccugacccuguuccugaccagcggcggcgugcugcugagccuguacgugagcgccagccugagcuaccugcuguacagcgacauccugcugaaguucagccccaccgagaucaccgcccccaccaugccccuggacugcgccaacgccagcaacgugcaggccgugaacagaagcgccaccaagggcgugacccugcugcugcccgagcccgaguggaccuaccccagacugagcugccccggcagcaccuuccagaaggcccugcugaucagcccccacagauucggcgagaccaagggcaacagcgccccccugaucaucagagagcccuucaucgccugcggccccaaggagugcaagcacuucgcccugacccacuacgccgcccagcccggcggcuacuacaacggcaccagaggcgacagaaacaagcugagacaccugaucagcgugaagcugggcaagauccccaccguggagaacagcaucuuccacauggccgccuggagcggcagcgccugccacgacggcaaggaguggaccuacaucggcguggacggcagcgacaacaacgcccugcugaagaucaaguacggcgaggccuacaccgacaccuaccacagcuacgccaacaacauccugagaacccaggagagcgccugcaacugcaucggcggcaacugcuaccugaugaucaccgacggcagcgccagcggcaucagcgagugcagauuccugaagaucagagagggcagaaucaucaaggagaucuuccccaccggcagagugaagcacaccgaggagugcaccugcggcuucgccagcaacaagaccaucgagugcgccugcagagacaacagcuacaccgccaagagacccuucgugaagcugaacguggagaccgacaccgccgagaucagacugaugugcaccgagaccuaccuggacacccccagacccgacgacggcagcaucaccggccccugcgagagcaacggcgacaagggcagcggcggcaucaagggcggcuucgugcaccagagaauggccagcaagaucggcagaugguacagcagaaccaugagcaagaccaagagaaugggcaugggccuguacgugaaguacgacggcgaccccugggccgacagcgacgcccuggcccugagcggcaucauggugagcauggaggagcccggcugguacagcuucggcuucgagaucaaggacaagaagugcgacgugcccugcaucggcaucgagauggugcacgacggcggcaaggagaccuggcacagcgccgccaccgccaucuacugccugaugggcagcggccagcugcugugggacaccgugaccggcguggacauggcccuguga

SEQ ID NO: 189298 - RNA, 1401 nt, Artificial Sequence
  derived and/or modified CDS sequence (opt4) from neuraminidase__InfluenzaB__AGX17415
augcugcccagcaccauccagacccugacccuguuccugaccagcggcggcgugcugcugagccuguacgugagcgccagccugagcuaccugcuguacagcgacauccugcugaaguucagccccaccgagaucaccgcccccaccaugccccuggacugcgccaacgccagcaacgugcaggccgugaacagaagcgccaccaagggcgugacccugcugcugcccgagcccgacuggaccuaccccagacugagcugccccggcagcaccuuccagaaggcccugcugaucagcccccacagauucggcgagaccaagggcaacagcgccccccugaucaucagagagcccuucaucgccugcggccccaaggagugcaagcacuucgcccugacccacuacgccgcccagcccggcggcuacuacaacggcaccagaggcgacagaaacaagcugagacaccugaucagcgugaagcugggcaagauccccaccguggagaacagcaucuuccacauggccgccuggagcggcagcgccugccacgacggcaaggaguggaccuacaucggcguggacggccccgacaacaacgcccugcugaagaucaaguacggcgaggccuacaccgacaccuaccacagcuacgccaacaacauccugagaacccaggagagcgccugcaacugcaucggcggcaacugcuaccugaugaucaccgacggcagcgccagcggcaucagcgagugcagauuccugaagaucagagagggcagaaucaucaaggagaucuuccccaccggcagagugaagcacaccgaggagugcaccugcggcuucgccagcaacaagaccaucgagugcgccugcagagacaacagcuacaccgccaagagacccuucgugaagcugaacguggagaccgacaccgccgagaucagacugaugugcaccgagaccuaccuggacacccccagacccgacgacggcagcaucaccggccccugcgagagcaacggcgacaagggcagcggcggcaucaagggcggcuucgugcaccagagaauggccagcaagaucggcagaugguacagcagaaccaugagcaagaccaagagaaugggcaugggccuguacgugaaguacgacggcgaccccugggccgacagcgacgcccuggcccugagcggcgugauggugagcauggaggagcccggcugguacagcuucggcuucgagaucaaggacaagaagugcgacgugcccugcaucggcaucgagauggugcacgacggcggcaaggagaccuggcacagcgccgccaccgccaucuacugccugaugggcagcggccagcugcugugggacaccgugaccggcguggacauggcccuguga

SEQ ID NO: 189299 - RNA, 1401 nt, Artificial Sequence
  derived and/or modified CDS sequence (opt4) from neuraminidase__InfluenzaB__AGX17426
augcugcccagcaccauccagacccugacccuguuccugaccagcggcggcgugcugcugagccuguacgugagcgccagccugagcuaccugcuguacagcgacauccugcugaaguucagccccaccgagaucaccgcccccaccaugccccuggacugcgccaacgccagcaacgugcaggccgugaacagaagcgccaccaagggcgugaccuuccugcugcccgagcccgaguggaccuaccccagacugagcugccccggcagcaccuuccagaaggcccugcugaucagcccccacagauucggcgagaccaagggcaacagcgccccccugaucaucagagagcccuucaucgccugcggccccaaggagugcaagcacuucgcccugacccacuacgccgcccagcccggcggcuacuacaacggcaccagaggcgacagaaacaagcugagacaccugaucagcgugaagcugggcaagauccccaccguggagaacagcaucuuccacauggccgccuggagcggcagcgccugccacgacggcaaggaguggaccuacaucggcguggacggccccgacaacaacgcccugcugaagaucaaguacggcgaggccuacaccgacaccuaccacagcuacgccaacaacauccugagaacccaggagagcgccugcaacugcaucggcggcaacugcuaccugaugaucaccgacggcagcgccagcggcaucagcgagugcagauuccugaagaucagagagggcagaaucaucaaggagaucuuccccaccggcagagugaagcacaccgaggagugcaccugcggcuucgccagcaacaagaccaucgagugcgccugcagagacaacagcuacaccgccaagagacccuucgugaagcugaacguggagaccgacaccgccgagaucagacugaugugcaccgagaccuaccuggacacccccagacccgacgacggcagcaucaccggccccugcgagagcaacggcgacaagggcagcggcggcaucaagggcggcuucgugcaccagagaauggccagcaagaucggcagaugguacagcagaaccaugagcaagaccaagagaaugggcaugggccuguacgugaaguacgacggcgaccccugggccgacagcgacgcccuggcccugagcggcgugauggugagcauggaggagcccggcugguacagcuucggcuucgagaucagagacaagaagugcgacgugcccugcaucggcaucgagauggugcacgacggcggcaaggagaccuggcacagcgccgccaccgccaucuacugccugaugggcagcggccagcugcugugggacaccgugaccggcguggacauggcccuguga

SEQ ID NO: 189300 - RNA, 1401 nt, Artificial Sequence
  derived and/or modified CDS sequence (opt4) from neuraminidase__InfluenzaB__AGX17437
augcugcccagcaccauccagacccugacccuguuccugaccagcggcggcgugcugcugagccuguacgugagcgugagccugagcuaccugcuguacagcgacauccugcugaaguucagccccaccgagaucaccgcccagaccaugccccuggacuucgccaacgccagcaacgugcaggccgugaacagaagcgccaccaagggcgugacccugcugcugcccgagcccgaguggaccuaccccagacugagcugccccggcagcaccuuccagaaggcccugcugaucagcccccacagauucggcgagaccaagggcaacagcgccccccugaucaucagagagcccuucaucgccugcggccccaaggagugcaagcacuucgcccugacccacuacgccgcccagcccggcggcuacuacaacggcaccagaggcgacagaaacaagcugagacaccugaucagcgugaagcugggcaagauccccaccguggagaacagcaucuuccacauggccgccuggagcggcagcgccugccacgacggcaaggaguggaccuacaucggcguggacggccccgacaacaacgcccugcugaagaucaaguacggcgaggccuacaccgacaccuaccacagcuacgccaacaacauccugagaacccaggagagcgccugcaacugcaucggcggcaacugcuaccugaugaucaccgacggcagcgccagcggcaucagcgagugcagauuccugaagaucagagagggcagaaucaucaaggagaucuuccccaccggcagagugaagcacaccgaggagugcaccugcggcuucgccagcaacaagaccaucgagugcgccugcagagacaacagcuacaccgccaagagacccuucgugaagcugaacguggagaccgacaccgccgagaucagacugaugugcaccgagaccuaccuggacacccccagacccgacgacggcagcaucaccggccccugcgagagcaacggcgacaagggcagcggcggcaucaagggcggcuucgugcaccagagaauggccagcaagaucggcagaugguacagcagaaccaugagcaagaccaagagaaugggcaugggccuguacgugaaguacgacggcgaccccugggccgacagcgacgcccuggcccugagcggcgugauggugagcauggaggagcccggcugguacagcuucggcuucgagaucagagacaagaagugcgacgugcccugcaucggcaucgagauggugcacgacggcggcaaggagaccuggcacagcgccgccaccgccaucuacugccugaugggcagcggccagcugcugugggacaccgugaccggcguggacauggcccuguga

SEQ ID NO: 189301 - RNA, 1401 nt, Artificial Sequence
  derived and/or modified CDS sequence (opt4) from neuraminidase__InfluenzaB__AGX17448
augcugcccagcaccauccagacccugacccuguuccugaccagcggcggcgugcugcugagccuguacgugagcgccagccugagcuaccugcuguacagcgacauccugcugaaguucagccccaccgagaucaccgcccccaccaugccccuggacugcgccaacgccagcaacgugcaggccgugaacagaagcgccaccaagggcgugacccugcugcugcccgagcccgaguggaccuaccccagacugagcugccccggcagcaccuuccagaaggcccugcugaucagcccccacagauucggcgagaccaagggcaacagcgccccccugaucaucagagagcccuucaucgccugcggccccaaggagugcaagcacuucgcccugacccacuacgccgcccagcccggcggcuacuacaacggcaccagaggcgacagaaacaagcugagacaccugaucagcgugaagcugggcaagauccccaccguggagaacagcaucuuccacauggccgccuggagcggcagcgccugccacgacggcaaggaguggaccuacaucggcguggacggccccgacaacaacgcccugcugaagaucaaguacggcgaggccuacaccgacaccuaccacagcuacgccaacaacauccugagaacccaggagagcgccugcaacugcaucggcggcaacugcuaccugaugaucaccgacggcagcgccagcggcaucagcgagugcagauuccugaagaucagagagggcagaaucaucaaggagaucuuccccaccggcagagugaagcacaccgaggagugcaccugcggcuucgccagcaacaagaccaucgagugcgccugcagagacaacagcuacaccgccaagagacccuucgugaagcugaacguggagaccgacaccgccgagaucagacugaugugcaccgagaccuaccuggacacccccagacccgacgacggcagcaucaccggccccugcgagaccaacggcgacaagggcagcggcggcaucaagggcggcuucgugcaccagagaauggccagcaagaucggcagaugguacagcagaaccaugagcaagaccaagagaaugggcaugggccuguacgugaaguacgacggcgaccccugggccgacagcgacgcccuggugcugagcggcgugauggugagcauggaggagcccggcugguacagcuucggcuucgagaucaaggacaagaagugcgacgugcccugcaucggcaucgagauggugcacgacggcggcaaggagaccuggcacagcgccgccaccgccaucuacugccugaugggcagcggccagcugcugugggacaccgugaccggcguggacauggcccuguga

SEQ ID NO: 189302 - RNA, 1401 nt, Artificial Sequence
  derived and/or modified CDS sequence (opt4) from neuraminidase__InfluenzaB__AGX17459
augcugcccagcaccauccagacccugacccuguuccugaccagcggcggcgugcugcugagccuguacgugagcgccagccugagcuaccugcuguacagcgacauccugcugaaguucagccccaccgagaucaccgccagcaccaugccccuggacugcgccaacgccagcaacgugcaggccgugaacagaagcgccaccaagggcgugacccugcugcugcccgagcccgacuggaccuaccccagacugagcugccccggcagcaccuuccagaaggcccugcugaucagcccccacagauucggcgagaccaagggcaacagcgccccccugaucaucagagagcccuucaucgccugcggccccaaggagugcaagcacuucgcccugacccacuacgccgcccagcccggcggcuacuacaacggcaccagaggcgacagaaacaagcugagacaccugaucagcgugaagcugggcaagauccccaccguggagaacagcaucuuccacauggccgccuggagcggcagcgccugccacgacggcaaggaguggaccuacaucggcguggacggccccgacaacaacgcccugcugaagaucaaguacggcgaggccuacaccgacaccuaccacagcuacgccaacaacauccugagaacccaggagagcgccugcaacugcaucggcggcaacugcuaccugaugaucaccgacggcagcgccagcggcaucagcgagugcagauuccugaagaucagagagggcagaaucaucaaggagaucuuccccaccggcagagugaagcacaccgaggagugcaccugcggcuucgccagcaacaagaccaucgagugcgccugcagagacaacagcuacaccgccaagagacccuucgugaagcugaacguggagaccgacaccgccgagaucagacugaugugcaccgagaccuaccuggacacccccagacccgacgacggcagcaucaccggccccugcgagagcaacggcgacaagggcagcggcggcaucaagggcggcuucgugcaccagagaauggccagcaagaucggcagaugguacagcagaaccaugagcaagaccaagagaaugggcaugggccuguacgugaaguacgacggcgaccccugggccgacagcgacgcccuggcccugagcggcgugauggugagcauggaggagcccggcugguacagcuucggcuucgagaucaaggacaagaagugcgacgugcccugcaucggcaucgagauggugcacgacggcggcaaggagaccuggcacagcgccgccaccgccaucuacugccugaugggcagcggccagcugcugugggacaccgugaccggcguggacauggcccuguga

SEQ ID NO: 189303 - RNA, 1401 nt, Artificial Sequence; identical to SEQ ID NO: 188674
  derived and/or modified CDS sequence (opt4) from neuraminidase__InfluenzaB__AGX17470

SEQ ID NO: 189304 - RNA, 1401 nt, Artificial Sequence
  derived and/or modified CDS sequence (opt4) from neuraminidase__InfluenzaB__AGX17481
augcugcccagcaccauccagacccugacccuguuccugaccagcggcggcgugcugcugagccuguacgugagcgccagccugagcuaccugcuguacagcgacauccugcugaaguucagccccaccgagaucaccgcccccaccaugccccuggacugcgccaacgccagcaacgugcaggccgugaacagaagcgccaccaagggcgugacccugauccugcccgagcccgaguggaccuaccccagacugagcugccccggcagcaccuuccagaaggcccugcugaucagcccccacagauucggcgagaccaagggcaacagcgccccccugaucaucagagagcccuucaucgccugcggccccaaggagugcaagcacuucgcccugacccacuacgccgcccagcccggcggcuacuacaacggcaccagaggcgacagaaacaagcugagacaccugaucagcgugaagcugggcaagauccccaccguggagaacagcaucuuccacauggccgccuggagcggcagcgccugccacgacggcaaggaguggaccuacaucggcguggacggccccgacaacaacgcccugcugaagaucaaguacggcgaggccuacaccgacaccuaccacagcuacgccaacaacauccugagaacccaggagagcgccugcaacugcaucggcggcaacugcuaccugaugaucaccgacggcagcgccagcggcaucagcgagugcagauuccugaagaucagagagggcagaaucaucaaggagaucuuccccaccggcagagugaagcacaccgaggagugcaccugcggcuucgccagcaacaagaccaucgagugcgccugcagagacaacagcuacaccgccaagagacccuucgugaagcugaacguggagaccgacaccgccgagaucagacugaugugcaccgagaccuaccuggacacccccagacccgacgacggcagcaucaccggccccugcgagagcaacggcgacaagggcagcggcggcaucaagggcggcuucgugcaccagagaauggccagcaagaucggcagaugguacagcagaaccaugagcaagaccaagagaaugggcaugggccuguacgugaaguacgacggcgaccccugggccgacagcgacgcccuggcccugagcggcgugauggugagcguggaggagcccggcugguacagcuucggcuucgagaucaaggacaagaagugcgacgugcccugcaucggcaucgagauggugcacgacggcggcaaggagaccuggcacagcgccgccaccgccaucuacugccugaugggcagcggccagcugcugugggacaccgugaccggcguggacauggcccuguga

SEQ ID NO: 189305 - RNA, 1401 nt, Artificial Sequence
  derived and/or modified CDS sequence (opt4) from neuraminidase__InfluenzaB__AGX17492
augcugcccagcaccauccagacccugacccuguuccugaccagcggcggcgugcugcugagccuguacgugagcgccagccugagcuaccugcuguacagcgacauccugcugaaguucagccccaccgagaucaccgcccccaccaugccccuggacugcgccaacgccagcaacgugcaggccgugaacagaagcgccaccaagggcgugacccugcugcugcccgagcccgaguggaccuaccccagacugagcugccccggcagcaccuuccagaaggcccugcugaucagcccccacagauucggcgagaccaagggcaacagcgccccccugaucaucagagagcccuucaucgccugcggccccaaggagugcaagcacuucgcccugacccacuacgccgcccagcccggcggcuacuacaacggcaccagaggcgacagaaacaagcugagacaccugaucagcgugaagcugggcaagauccccaccguggagaacagcaucuuccacauggccgccuggagcggcagcgccugccacgacggcaaggaguggaccuacaucggcguggacggccccgacaacaacgcccugcugaagaucaaguacggcgaggccuacaccgacaccuaccacagcuacgccaacaacauccugagaacccaggagagcgccugcaacugcaucggcggcaacugcuaccugaugaucaccgacggcagcgccagcggcaucagcgagugcagauuccugaagaucagagagggcagaaucaucaaggagaucuuccccaccggcagagugaagcacaccgaggagugcaccugcggcuucgccagcaacaagaccaucgagugcgccugcagagacaacagcuacaccgccaagagacccuucgugaagcugaacguggagaccgacaccgccgagaucagacugaugugcaccgagaccuaccuggacacccccagacccgacgacggcagcaucaccggccccugcgagagcaacggcgacaagggcagcggcggcaucaagggcggcuucgugcaccagagaauggccagcaagaucggcagaugguacagcagaaccaugagcaagaccaagagaaugggcaugggccuguacgugaaguacgacggcgaccccugggccgacagcgacgcccuggcccugagcggcgugauggugagcauggaggagcccggcugguacagcuucggcuucgagaucaaggacaagaagugcgacgugcccugcaucggcaucgagauggugcacgacggcggcaaggagaccuggcacagcgccgccaccgccaucuacugccugaugggcagcggccagcugcugugggacaccgugaccggcguggacaucgcccuguga

SEQ ID NO: 189306 - RNA, 1401 nt, Artificial Sequence
  derived and/or modified CDS sequence (opt4) from neuraminidase__InfluenzaB__AGX17503
augcugcccagcaccauccagacccugacccuguuccugaccagcggcggcgugcugcugagccuguacgugagcgccagccugagcuaccugcuguacagcgacauccugcugaaguucagccccaccgagaucaccgcccccaccaugccccuggacugcgccaacgccagcaacgugcaggccgugaacagaagcgccaccaagggcgugacccugcugcugcccgagcccgaguggaccuaccccagacugagcugccccggccugaccuuccagaaggcccugcugaucagcccccacagauucggcgagaccaagggcaacagcgccccccugaucaucagagagcccuucaucgccugcggccccaaggagugcaagcacuucgcccugacccacuacgccgcccagcccggcggcuacuacaacggcaccagaggcgacagaaacaagcugagacaccugaucagcgugaagcugggcaagauccccaccguggagaacagcaucuuccacauggccgccuggagcggcagcgccugccacgacggcaaggaguggaccuacaucggcguggacggccccgacaacaacgcccugcugaagaucaaguacggcgaggccuacaccgacaccuaccacagcuacgccaacaacauccugagaacccaggagagcgccugcaacugcaucggcggcaacugcuaccugaugaucaccgacggcagcgccagcggcaucagcgagugcagauuccugaagaucagagagggcagaaucaucaaggagaucuuccccaccggcagagugaagcacaccgaggagugcaccugcggcuucgccagcaacaagaccaucgagugcgccugcagagacaacagcuacaccgccaagagacccuucgugaagcugaacguggagaccgacaccgccgagaucagacugaugugcaccgagaccuaccuggacacccccagacccgacgacggcagcaucaccggccccugcgagagcaacggcgacaagggcagcggcggcaucaagggcggcuucgugcaccagagaauggccagcaagaucggcagaugguacagcagaaccaugagcaagaccaagagaaugggcaugggccuguacgugaaguacgacggcgaccccugggccgacagcgacgcccuggcccugagcggcgugauggugagcauggaggagcccggcugguacagcuucggcuucgagaucaaggacaagaagugcgacgugcccugcaucggcaucgagauggugcacgacggcggcaaggagaccuggcacagcgccgccaccgccaucuacugccugaugggcagcggccagcugcugugggacaccgugaccggcguggacauggcccuguga

SEQ ID NO: 189307 - RNA, 1401 nt, Artificial Sequence; identical to SEQ ID NO: 188674
  derived and/or modified CDS sequence (opt4) from neuraminidase__InfluenzaB__AGX17514

SEQ ID NO: 189308 - RNA, 1401 nt, Artificial Sequence
  derived and/or modified CDS sequence (opt4) from neuraminidase__InfluenzaB__AGX17525
augcugcccagcaccauccagacccugacccuguuccugaccagcggcggcgugcugcugagccuguacgugagcgccagccugagcuaccugcuguacagcgacauccugcugaaguucagccccaccgagaucaccgcccccaccaugccccuggacugcgccaacgccagcaacgugcaggccgugaacagaagcgccaccaagggcgugacccugcugcugcccgagcccgaguggaccuaccccagacugagcugccccggcagcaccuuccagaaggcccugcugaucagcccccacagauucggcgagaccaagggcaacagcgccccccugaucaucagagagcccuucaucgccugcggccccaaggagugcaagcacuucgcccugacccacuacgccgcccagcccggcggcuacuacaacggcaagagaggcgacagaaacaagcugagacaccugaucagcgugaagcugggcaagauccccaccguggagaacagcaucuuccacauggccgccuggagcggcagcgccugccacgacggcaaggaguggaccuacaucggcguggacggccccgacaacaacgcccugcugaagaucaaguacggcgaggccuacaccgacaccuaccacagcuacgccaacaacauccugagaacccaggagagcgccugcaacugcaucggcggcaacugcuaccugaugaucaccgacggcagcgccagcggcaucagcgagugcagauuccugaagaucagagagggcagaaucaucaaggagaucuuccccaccggcagagugaagcacaccgaggagugcaccugcggcuucgccagcaacaagaccaucgagugcgccugcagagacaacagcuacaccgccaagagacccuucgugaagcugaacguggagaccgacaccgccgagaucagacugaugugcaccgagaccuaccuggacacccccagacccgacgacggcagcaucaccggccccugcgagagcaacggcgacaagggcagcggcggcaucaagggcggcuucgugcaccagagaauggccagcaagaucggcagaugguacagcagaaccaugagcaagaccaagagaaugggcaugggccuguacgugaaguacgacggcgaccccugggccgacagcgacgcccuggcccugagcggcgugauggugagcauggaggagcccggcugguacagcuucggcuucgagaucagagacaagaagugcgacgugcccugcaucggcaucgagauggugcacgacggcggcaaggagaccuggcacagcgccgccaccgccaucuacugccugaugggcagcggccagcugcugugggacaccgugaccggcguggacauggcccuguga

SEQ ID NO: 189309 - RNA, 1401 nt, Artificial Sequence; identical to SEQ ID NO: 189253
  derived and/or modified CDS sequence (opt4) from neuraminidase__InfluenzaB__AGX17536

SEQ ID NO: 189310 - RNA, 1401 nt, Artificial Sequence; identical to SEQ ID NO: 189284
  derived and/or modified CDS sequence (opt4) from neuraminidase__InfluenzaB__AGX17547

SEQ ID NO: 189311 - RNA, 1401 nt, Artificial Sequence
  derived and/or modified CDS sequence (opt4) from neuraminidase__InfluenzaB__AGX17558
augcugcccagcaccauccagacccugacccuguuccugaccagcggcggcgugcugcugagccuguacgugagcgccagccugagcuaccugcuguacagcgacgugcugcugaaguucagccccgccgagaucaccgcccccaccaugccccuggacugcgccaacgccagcaacgugcaggccgugaacagaagcgccaccaagggcgugacccugcugcugcccgagcccgaguggaccuaccccagacugagcugccccggcagcaccuuccagaaggcccugcugaucagcccccacagauucggcgagaccaagggcaacagcgccccccugaucaucagagagcccuucaucgccugcggccccaaggagugcaagcacuucgcccugacccacuacgccgcccagcccggcggcuacuacaacggcaccagaggcgacagaaacaagcugagacaccugaucagcgugaagcugggcaagauccccaccguggagaacagcaucuuccacauggccgccuggagcggcagcgccugccacgacggcaaggaguggaccuacaucggcguggacggccccgacaacaacgcccugcugaagaucaaguacggcgaggccuacaccgacaccuaccacagcuacgccaacaacauccugagaacccaggagagcgccugcaacugcaucggcggcaacugcuaccugaugaucaccgacggcagcgccagcggcgugagcgagugcagauuccugaagaucagagagggcagaaucaucaaggagaucuuccccaccggcagagugaagcacaccgaggagugcaccugcggcuucgccagcaacaagaccaucgagugcgccugcagagacaacagcuacaccgccaagagacccuucgugaagcugaacguggagaccgacaccgccgagaucagacugaugugcaccgagaccuaccuggacacccccagacccgacgacggcagcaucaccggccccugcgagagcaacggcgacaagggcagcggcggcaucaagggcggcuucgugcaccagagaauggccagcaagaucggcagaugguacagcagaaccaugagcaagaccaagagaaugggcaugggccuguacgugaaguacgacggcgaccccugggccgacagcgacgcccuggcccugagcggcgugauggugagcauggaggagcccggcugguacagcuucggcuucgagaucaaggacaagaagugcgacgugcccugcaucggcaucgagauggugcacgacggcggcaaggagaccuggcacagcgccgccaccgccaucuacugccugaugggcagcggccagcugcugugggacaccgugaccggcguggacauggcccuguga

SEQ ID NO: 189312 - RNA, 1401 nt, Artificial Sequence; identical to SEQ ID NO: 188803
  derived and/or modified CDS sequence (opt4) from neuraminidase__InfluenzaB__AGX17569

SEQ ID NO: 189313 - RNA, 1401 nt, Artificial Sequence; identical to SEQ ID NO: 188730
  derived and/or modified CDS sequence (opt4) from neuraminidase__InfluenzaB__AGX17580

SEQ ID NO: 189314 - RNA, 1401 nt, Artificial Sequence
  derived and/or modified CDS sequence (opt4) from neuraminidase__InfluenzaB__AGX17591
augcugcccagcaccauccagacccugacccuguuccugaccagcggcggcgugcugcugagccuguacgugagcgccagccugagcuaccugcuguacagcgacauccugcugaaguucccccccaccgagaucaccgcccccaccaugccccuggacugcgccaacgccagcaacgugcaggccgugaacagaagcgccaccaagggcgugacccugcugcugcccgagcccgaguggaccuaccccagacugagcugccccggcagcaccuuccagaaggcccugcugaucagcccccacagauucggcgagaccaagggcaacagcgccccccugaucaucagagagcccuucaucgccugcggccccaaggagugcaagcacuucgcccugacccacuacgccgcccagcccggcggcuacuacaacggcaccagaggcgacagaaacaagcugagacaccugaucagcgugaagcugggcaagauccccaccguggagaacagcaucuuccacauggccgccuggagcggcagcgccugccacgacggcaaggaguggaccuacaucggcguggacggccccgacaacaacgcccugcugaagaucaaguacggcgaggccuacaccgacaccuaccacagcuacgccaacaacauccugagaacccaggagagcgccugcaacugcaucggcggcaacugcuaccugaugaucaccgacggcagcgccagcggcgugagcgagugcagauuccugaagaucagagagggcagaaucaucaaggagaucuuccccaccggcagagugaagcacaccgaggagugcaccugcggcuucgccagcaacaagaccaucgagugcgccugcagagacaacagcuacaccgccaagagacccuucgugaagcugaacguggagaccgacaccgccgagaucagacugaugugcaccgagaccuaccuggacacccccagacccgacgacggcagcaucaccggccccugcgagagcaacggcgacaagggcagcggcggcaucaagggcggcuucgugcaccagagaauggccagcaagaucggcagaugguacagcagaaccaugagcaagaccaagagaaugggcaugggccuguacgugaaguacgacggcgaccccugggccgacagcgacgcccuggccuucagcggcgugauggugagcauggaggagcccggcugguacagcuucggcuucgagaucaaggacaagaagugcgacgugcccugcaucggcaucgagauggugcacgacggcggcaaggagaccuggcacagcgccgccaccgccaucuacugccugaugggcagcggccagcugcugugggacaccgugaccggcgugaacauggcccuguga

SEQ ID NO: 189315 - RNA, 1401 nt, Artificial Sequence; identical to SEQ ID NO: 188728
  derived and/or modified CDS sequence (opt4) from neuraminidase__InfluenzaB__AGX17602

SEQ ID NO: 189316 - RNA, 1401 nt, Artificial Sequence; identical to SEQ ID NO: 189314
  derived and/or modified CDS sequence (opt4) from neuraminidase__InfluenzaB__AGX17613

SEQ ID NO: 189317 - RNA, 1401 nt, Artificial Sequence; identical to SEQ ID NO: 188901
  derived and/or modified CDS sequence (opt4) from neuraminidase__InfluenzaB__AGX17624

SEQ ID NO: 189318 - RNA, 1401 nt, Artificial Sequence
  derived and/or modified CDS sequence (opt4) from neuraminidase__InfluenzaB__AGX17635
augcugcccagcaccauccagacccugacccuguuccugaccagcggcggcgugcugcugagccuguacgugagcgccagccugagcuaccugcuguacagcgacauccugcugaaguucccccccaccgagaucaccgcccccaccaugccccuggacugcgccaacgccagcaacgugcaggccgugaacagaagcgccaccaagggcgugacccugcugcugcccgagcccgaguggaccuaccccagacugagcugccccggcagcaccuuccagaaggcccugcugaucagcccccacagauucggcgagaccaagggcaacagcgccccccugaucaucagagagcccuucaucgccugcggccccaaggagugcaagcacuucgcccugacccacuacgccgcccagcccggcggcuacuacaacggcaccagaggcgacagaaacaagcugagacaccugaucagcgugaagcugggcaagauccccaccguggagaacagcaucuuccacauggccgccuggagcggcagcgccugccacgacggcaaggaguggaccuacaucggcguggacggccccgacaacaacgcccugcugaagaucaaguacggcgaggccuacaccgacaccuaccacagcuacgccaacaacauccugagaacccaggagagcgccugcaacugcaucggcggcaacugcuaccugaugaucaccgacggcagcgccagcggcaucagcgagugcagauuccugaagaucagagagggcagaaucaucaaggagaucuuccccaccggcagagugaagcacaccgaggagugcaccugcggcuucgccagcaacaagaccaucgagugcgccugcagagacaacagcuacaccgccaagagacccuucgugaagcugaacguggagaccgacaccgccgagaucagacugaugugcaccgagaccuaccuggacacccccagacccgacgacggcagcaucaccggccccugcgagagcaacggcgacaagggcagcggcggcaucaagggcggcuucgugcaccagagaauggccagcaagaucggcagaugguacagcagaaccaugagcaagaccaagagaaugggcaugggccuguacgugaaguacgacggcgaccccugggccgacagcgacgcccuggccuucagcggcgugauggugagcauggaggagcccggcugguacagcuucggcuucgagaucaaggacaagaagugcgacgugcccugcaucggcaucgagauggugcacgacggcggcaaggagaccuggcacagcgccgccaccgccaucuacugccugaugggcagcggccagcugcugugggacaccgugaccggcgugaacauggcccuguga

SEQ ID NO: 189319 - RNA, 1401 nt, Artificial Sequence; identical to SEQ ID NO: 188901
  derived and/or modified CDS sequence (opt4) from neuraminidase__InfluenzaB__AGX17657

SEQ ID NO: 189320 - RNA, 1401 nt, Artificial Sequence; identical to SEQ ID NO: 189314
  derived and/or modified CDS sequence (opt4) from neuraminidase__InfluenzaB__AGX17668

SEQ ID NO: 189321 - RNA, 1401 nt, Artificial Sequence
  derived and/or modified CDS sequence (opt4) from neuraminidase__InfluenzaB__AGX17679
augcugcccagcaccauccagacccugacccuguuccugaccagcggcggcgugcugcugagccuguacgugagcgccagccugagcuaccugcuguacagcgacauccugcugaaguucagccccaccgagaucaccgcccccaccaugccccuggacugcgccaacgccagcaacgugcaggccgugaacagaagcgccaccaagggcgugacccugcugcugcccgagcccgaguggaccuaccccagacugagcugccccggcagcaccuuccagaaggcccugcugaucagcccccacagauucggcgagaccaagggcaacagcgccccccugaucaucagagagcccuucaucgccugcggccccaacgagugcaagcacuucgcccugacccacuacgccgcccagcccggcggcuacuacaacggcaccagaggcgacagaaacaagcugagacaccugaucagcgugaagcugggcaagauccccaccguggagaacagcaucuuccacauggccgccuggagcggcagcgccugccacgacggcaaggaguggaccuacaucggcguggacggccccgacaacaacgcccugcugaagaucaaguacggcgaggccuacaccgacaccuaccacagcuacgccaacaacauccugagaacccaggagagcgccugcaacugcaucggcggcaacugcuaccugaugaucaccgacggcagcgccagcggcgugagcgagugcagauuccugaagaucagagagggcagaaucaucaaggagaucuuccccaccggcagagugaagcacaccgaggagugcaccugcggcuucgccagcaacaagaccaucgagugcgccugcagagacaacagcuacaccgccaagagacccuucgugaagcugaacguggagaucgacaccgccgagaucagacugaugugcaccgacaccuaccuggacacccccagacccgacgacggcagcaucaccggccccugcgagagcaacggcgacaagggcagcggcggcaucaagggcggcuucgugcaccagagaauggccagcaagaucggcagaugguacagcagaaccaugagcaagaccgagagaaugggcaugggccuguacgugaaguacgacggcgaccccugggccgacagcgacgcccuggccuucagcggcgugauggugagcaugaaggagcccggcugguacagcuucggcuucgagaucaaggacaagaagugcgacgugcccugcaucggcaucgagauggugcacgacggcggcaaggagaccuggcacagcgccgccaccgccaucuacugccugaugggcagcggccagcugcugugggacaccgugaccggcguggacauggcccuguga

SEQ ID NO: 189322 - RNA, 1401 nt, Artificial Sequence; identical to SEQ ID NO: 188901
  derived and/or modified CDS sequence (opt4) from neuraminidase__InfluenzaB__AGX17690

SEQ ID NO: 189323 - RNA, 1401 nt, Artificial Sequence
  derived and/or modified CDS sequence (opt4) from neuraminidase__InfluenzaB__AGX17701
augcugcccagcaccauccagacccugacccuguuccugaccagcggcggcgugcugcugagccuguacgugagcgccagccugagcuaccugcuguacagcgacauccugcugaaguucccccccaccgagaucaccgcccccaccaugccccuggacugcgccaacgccagcaacgugcaggccgugaacagaagcgccaccaagggcgugacccugcugcugcccgagcccgaguggaccuaccccagacugagcugccccggcagcaccuuccagaaggcccugcugaucagcccccacagauucggcgagaccaagggcaacagcgccccccugaucaucagagagcccuucaucgccugcggccccaaggagugcaagcacuucgcccugacccacuacgccgcccagcccggcggcuacuacaacggcaagagaggcgacagaaacaagcugagacaccugaucagcgugaagcugggcaagauccccaccguggagaacagcaucuuccacauggccgccuggagcggcagcgccugccacgacggcaaggaguggaccuacaucggcguggacggccccgacaacaacgcccugcugaagaucaaguacggcgaggccuacaccgacaccuaccacagcuacgccaacaacauccugagaacccaggagagcgccugcaacugcaucggcggcaacugcuaccugaugaucaccgacggcagcgccagcggcgugagcgagugcagauuccugaagaucagagagggcagaaucaucaaggagaucuuccccaccggcagagugaagcacaccgaggagugcaccugcggcuucgccagcaacaagaccaucgagugcgccugcagagacaacagcuacaccgccaagagacccuucgugaagcugaacguggagaccgacaccgccgagaucagacugaugugcaccgagaccuaccuggacacccccagacccgacgacggcagcaucaccggccccugcgagagcaacggcgacaagggcagcggcggcaucaagggcggcuucgugcaccagagaauggccagcaagaucggcagaugguacagcagaaccaugagcaagaccaagagaaugggcaugggccuguacgugaaguacgacggcgaccccugggccgacagcgacgcccuggccuucagcggcgugauggugagcauggaggagcccggcugguacagcuucggcuucgagaucaaggacaagaagugcgacgugcccugcaucggcaucgagauggugcacgacggcggcaaggagaccuggcacagcgccgccaccgccaucuacugccugaugggcagcggccagcugcugugggacaccgugaccggcgugaacauggcccuguga

SEQ ID NO: 189324 - RNA, 1401 nt, Artificial Sequence; identical to SEQ ID NO: 188901
  derived and/or modified CDS sequence (opt4) from neuraminidase__InfluenzaB__AGX17723

SEQ ID NO: 189325 - RNA, 1401 nt, Artificial Sequence; identical to SEQ ID NO: 189321
  derived and/or modified CDS sequence (opt4) from neuraminidase__InfluenzaB__AGX17734

SEQ ID NO: 189326 - RNA, 1401 nt, Artificial Sequence
  derived and/or modified CDS sequence (opt4) from neuraminidase__InfluenzaB__AGX17745
augcugcccagcaccauccagacccugacccuguuccugaccagcggcggcgugcugcugagccuguacgugagcgccagccugagcuaccugcuguacagcgacauccugcugaaguucccccccaccgagaucaccgcccccaccaugccccuggacugcgccaacgccagcaacgugcaggccgugaacagaagcgccaccaagggcgugacccugcugcugcccgagcccgaguggaccuaccccagacugagcugcagcggcagcaccuuccagaaggcccugcugaucagcccccacagauucggcgagaucaagggcaacagcgccccccugaucaucagagagcccuucaucgccugcggccccaaggagugcaagcacuucgcccugacccacuacgccgcccagcccggcggcuacuacaacggcaccagaggcgacagaaacaagcugagacaccugaucagcgugaagcugggcaagauccccaccguggagaacagcaucuuccacauggccgccuggagcggcagcgccugccacgacggcaaggaguggaccuacaucggcguggacggccccgacaacaacgcccugcugaagaucaaguacggcgaggccuacaccgacaccuaccacagcuacgccaacaacauccugagaacccaggagagcgccugcaacugcaucggcggcaacugcuaccugaugaucaccgacggcagcgccagcggcgugagcgagugcagauuccugaagaucagagagggcagaaucaucaaggagaucuuccccaccggcagagugaagcacaccgaggagugcaccugcggcuucgccagcaacaagaccaucgagugcgccugcagagacaacagcuacaccgccaagagacccuucgugaagcugaacguggagaccgacaccgccgagaucagacugaugugcaccgagaccuaccuggacacccccagacccgacgacggcagcaucaccggccccugcgagagcaacggcgacaagggcagcggcggcaucaagggcggcuucgugcaccagagaauggccagcaagaucggcagaugguacagcagaaccaugagcaagaccaagagaaugggcaugggccuguacgugaaguacgacggcgaccccugggccgacagcgacgcccuggccuucagcggcgugauggugagcauggaggagcccggcugguacagcuucggcuucgagaucaaggacaagaagugcgacgugcccugcaucggcaucgagauggugcacgacggcggcaaggagaccuggcacagcgccgccaccgccaucuacugccugaugggcagcggccagcugcugugggacaccgugaccggcgugaacauggcccuguga

SEQ ID NO: 189327 - RNA, 1401 nt, Artificial Sequence
  derived and/or modified CDS sequence (opt4) from neuraminidase__InfluenzaB__AGX17756
augcugcccagcaccauccagacccugacccuguuccugaccagcggcggcgugcugcugagccuguacgugagcgccagccugagcuaccugcuguacagcgacauccugcugaaguucagccccaccgagaucaccgcccccaccaugccccuggacugcgccaacgccagcaacgugcacgccgugaacagaagcgccaccaagggcgugacccugcugcugcccgagcccgaguggaccuaccccagacugagcugccccggcagcaccuuccagaaggcccugcugaucagcccccacagauucggcgagaccaagggcaacagcgccccccugaucaucagagagcccuucaucgccugcggccccaacgagugcaagcacuucgcccugacccacuacgccgccagacccggcggcuacuacaacggcaccagaggcgacagaaacaagcugagacaccugaucagcgugaagcugggcaagauccccaccguggagaacagcaucuuccacauggccgccuggagcggcagcgccugccacgacggcaaggaguggaccuacaucggcguggacggccccgacaacaacgcccugcugaagaucaaguacggcgaggccuacaccgacaccuaccacagcuacgccaacaacauccugagaacccaggagagcgccugcaacugcaucggcggcaacugcuaccugaugaucaccgacggcagcgccagcggcgugagcgagugcagauuccugaagaucagagagggcagaaucaucaaggagaucuuccccaccggcagagugaagcacaccgaggagugcaccugcggcuucgccagcaacaagaccaucgagugcgccugcagagacaacagcuacaccgccaagagacccuucgugaagcugaacguggagaccgacaccgccgagaucagacugaugugcaccgacaccuaccuggacacccccagacccgacgacggcagcaucaccggccccugcgagagcaacggcgacaagggcagcggcggcaucaagggcggcuucgugcaccagagaauggccagcaagaucggcagaugguacagcagaaccaugagcaagaccgagagaaugggcaugggccuguacgugaaguacgacggcgaccccugggccgacagcgacgcccuggccuucagcggcgugauggugagcaugaaggagcccggcugguacagcuucggcuucgagaucaaggacaagaagugcgacgugcccugcaucggcaucgagauggugcacgacggcggcaaggagaccuggcacagcgccgccaccgccaucuacugccugaugggcagcggccagcugcugugggacaccgugaccggcguggacauggcccuguga

SEQ ID NO: 189328 - RNA, 1401 nt, Artificial Sequence; identical to SEQ ID NO: 188948
  derived and/or modified CDS sequence (opt4) from neuraminidase__InfluenzaB__AGX17767

SEQ ID NO: 189329 - RNA, 1401 nt, Artificial Sequence
  derived and/or modified CDS sequence (opt4) from neuraminidase__InfluenzaB__AGX17778
augcugcccagcaccauccagacccugacccuguuccugaccagcggcggcgugcugcugagccuguacgugagcgccagccugagcuaccugcuguacagcgacauccugcugaaguucagccccaccgagaucaccgcccccaccaugccccuggacugcgccaacgccagcaacgugcacgccgugaacagaagcgccaccaagggcgugacccugcugcugcccgagcccgaguggaccuaccccagacugagcugccccggcagcaccuuccagaaggcccugcugaucagcccccacagauucggcgagaccaagggcaacagcgccccccugaucaucagagagcccuucaucgccugcggccccaacgagugcaagcacuucgcccugacccacuacgccgcccagcccggcggcuacuacaacggcaccagaggcgacagaaacaagcugagacaccugaucagcgugaagcugggcaagauccccaccguggagaacagcaucuuccacauggccgccuggagcggcagcgccugccacgacggcaaggaguggaccuacaucggcguggacggccccgacaacaacgcccugcugaagaucaaguacggcgaggccuacaccgacaccuaccacagcuacgccaacaacauccugagaacccaggagagcgccugcaacugcaucggcggcaacugcuaccugaugaucaccgacggcagcgccagcggcgugagcgagugcagauuccugaagaucagagagggcagaaucaucaaggagaucuuccccaccggcagagugaagcacaccgaggagugcaccugcggcuucgccagcaacaagaccaucgagugcgccugcagagacaacagcuacaccgccaagagacccuucgugaagcugaacguggagaccgacaccgccgagaucagacugaugugcaccgacaccuaccuggacacccccagacccgacgacggcagcaucaccggccccugcgagagcaacggcgacaagggcagcggcggcaucaagggcggcuucgugcaccagagaauggccagcaagaucggcagaugguacagcagaaccaugagcaagaccgagagaaugggcaugggccuguacgugaaguacgacggcgaccccugggccgagagcgacgcccuggccuucagcggcgugauggugagcaugaaggagcccggcugguacagcuucggcuucgagaucaaggacaagaagugcgacgugcccugcaucggcaucgagauggugcacgacggcggcaaggagaccuggcacagcgccgccaccgccaucuacugccugaugggcagcggccagcugcugugggacaccgugaccggcguggacauggcccuguga

SEQ ID NO: 189330 - RNA, 1401 nt, Artificial Sequence
  derived and/or modified CDS sequence (opt4) from neuraminidase__InfluenzaB__AGX17789
augcugcccagcaccauccagacccugacccuguuccugaccagcggcggcgugcugcugagccuguacgugagcgccagccugagcuaccugcuguacagcgacauccugcugaaguucagccccaccgagaucaccgcccccaccaugccccuggacugcgccaacgccagcaacgugcaggccgugaacagaagcgccaccaagggcgugacccugcugcugcccgagcccgaguggaccuaccccagacugagcugccccggcagcaccuuccagaaggcccugcugaucagcccccacagauucggcgagaccaagggcaacagcgccccccugaucaucagagagcccuucaucgccugcggccccaacgagugcaagcacuucgcccugacccacuacgccgcccagcccggcggcuacuacaacggcaccagaggcgacagaaacaagcugagacaccugaucagcgugaagcugggcaagauccccaccguggagaacagcaucuuccacauggccgccuggagcggcagcgccugccacgacggcaaggaguggaccuacaucggcguggacggccccgacaacaacgcccugcugaagaucaaguacggcgaggccuacaccgacaccuaccacagcuacgccaacaacauccugagaacccaggagagcgccugcaacugcaucggcggcaacugcuaccugaugaucaccgacggcagcgccagcggcgugagcgagugcagauuccugaagaucagagagggcagaaucaucaaggagaucuuccccaccggcagagugaagcacaccgaggagugcaccugcggcuucgccagcaacaagaccaucgagugcgccugcagagacaacagcuacaccgccaagagacccuucgugaagcugaacguggagaucgacaccgccgagaucagacugaugugcaccgacaccuaccuggacacccccagacccgacgacggcagcaucaccggccccugcgagagcaacggcgacaagggcagcggcggcaucaagggcggcuucgugcaccagagaauggccagcaagaucggcagaugguacagcagaaccaugagcaagaccgagagaaugggcaugggccuguacgugaaguacgacggcgaccccugggccgacagcgacgcccugguguucagcggcgugauggugagcaugaaggagcccggcugguacagcuucggcuucgagaucaaggacaagaagugcgacgugcccugcaucggcaucgagauggugcacgacggcggcaaggagaccuggcacagcgccgccaccgccaucuacugccugaugggcagcggccagcugcugugggacaccgugaccggcguggacauggcccuguga

SEQ ID NO: 189331 - RNA, 1401 nt, Artificial Sequence; identical to SEQ ID NO: 188901
  derived and/or modified CDS sequence (opt4) from neuraminidase__InfluenzaB__AGX17800

SEQ ID NO: 189332 - RNA, 1401 nt, Artificial Sequence
  derived and/or modified CDS sequence (opt4) from neuraminidase__InfluenzaB__AGX17811
augcugcccagcaccauccagacccugacccuguuccugaccagcggcggcgugcugcugagccuguacgugagcgccagccugagcuaccugcuguacagcgacauccugcugaaguucccccccaccgagaucaccgcccccaccaugccccuggacugcgccaacgccagcaacgugcaggccgugaacagaagcgccaccaagggcgugacccugcugcugcccgagcccgaguggaccuaccccagacugagcugccccggcagcaccuuccagaaggcccugcugaucagcccccacagauucggcgagaccaagggcaacagcgccccccugaucaucagagagcccuucaucgccugcggccccaaggagugcaagcacuucgcccugacccacuacgccgcccagcccggcggcuacuacaacggcaccagaggcgacagaaacaagcugagacaccugaucagcgugaagcugggcaagauccccaccguggagaacagcaucuuccacauggccgccuggagcggcagcgccugccacgacggcaaggaguggaccuacaucggcguggacggccccgacaacaacgcccugcugaagaucaaguacggcgaggccuacaccgacaccuaccacagcuacgccaacaacauccugagaacccaggagagcgccugcaacugcaucggcggcaacugcuaccugaugaucaccgacggcagcgccagcggcgugagcgagugcagauuccugaagaucagagagggcagaaucaucaaggagaucuuccccaccggcagagugaagcacaccgaggagugcaccugcggcuucgccagcaacaagaccaucgagugcgccugcagagacaacagcuacaccgccaagagacccuucgugaagcugaacguggagaccgacaccgccgagaucagacugaugugcaccgagaccuaccuggacacccccagacccgacgacggcagcaucaccggccccugcgagagcaacggcgacaagggcagcggcggcaucaagggcggcuucgugcaccagagaauggccagcaagaucggcagaugguacagcagaaccaugagcaagaccaagagaaugggcaugggccuguacgugaaguacgacggcgaccccugggccgacagcgacgcccuggccuucagcggcgugauggugagcauggaggagcccggcugguacagcuucggcuucgagaucaaggacaagaagugcgacgugcccugcaucggcaucgagauggugcacgacggcggcaaggagaccuggcacagcgccgccaccgccaucuacugccugaugggcagcggccagcugcugugggacaccgugaccggcgugaacauggcccaguga

SEQ ID NO: 189333 - RNA, 1401 nt, Artificial Sequence; identical to SEQ ID NO: 189314
  derived and/or modified CDS sequence (opt4) from neuraminidase__InfluenzaB__AGX17822

SEQ ID NO: 189334 - RNA, 1401 nt, Artificial Sequence
  derived and/or modified CDS sequence (opt4) from neuraminidase__InfluenzaB__AGX17833
augcugcccagcaccauccagacccugacccuguuccugaccagcggcggcgugcugcugagccuguacgugagcgccagccugagcuaccugcuguacagcgacauccugcugaaguucccccccaccgagaucaccgcccccaccaugccccuggacugcgccaacgccagcaacgugcaggccgugaacagaagcgccaccaagggcgugacccugcugcugcccgagcccgaguggaccuaccccagacugagcugccccggcagcaccuuccagaaggcccugcugaucagcccccacagauucggcgagaccaagggcaacagcgccccccugaucaucagagagcccuucaucgccugcggccccaaggagugcaagcacuucgcccugacccacuacgccgcccagcccggcggcuacuacaacggcaccagaggcgacagaaacaagcugagacaccugaucagcaucaagcugggcaagauccccaccguggagaacagcaucuuccacauggccgccuggagcggcagcgccugccacgacggcaaggaguggaccuacaucggcguggacggccccgacaacaacgcccugcugaagaucaaguacggcgaggccuacaccgacaccuaccacagcuacgccaacaacauccugagaacccaggagagcgccugcaacugcaucggcggcaacugcuaccugaugaucaccgacggcagcgccagcggcgugagcgagugcagauuccugaagaucagagagggcagaaucaucaaggagaucuuccccaccggcagagugaagcacaccgaggagugcaccugcggcuucgccagcaacaagaccaucgagugcgccugcagagacaacagcuacaccgccaagagacccuucgugaagcugaacguggagaccgacaccgccgagaucagacugaugugcaccgagaccuaccuggacacccccagacccgacgacggcagcaucaccggccccugcgagagcaacggcgacaagggcagcggcggcaucaagggcggcuucgugcaccagagaauggccagcaagaucggcagaugguacagcagaaccaugagcaagaccaagagaaugggcaugggccuguacgugaaguacgacggcgaccccugggccgacagcgacgcccuggccuucagcggcgugauggugagcauggaggagcccggcugguacagcuucggcuucgagaucaaggacaagaagugcgacgugcccugcaucggcaucgagauggugcacgacggcggcaaggagaccuggcacagcgccgccaccgccaucuacugccugaugggcagcggccagcugcugugggacaccgugaccggcgugaacauggcccuguga

SEQ ID NO: 189335 - RNA, 1401 nt, Artificial Sequence; identical to SEQ ID NO: 189321
  derived and/or modified CDS sequence (opt4) from neuraminidase__InfluenzaB__AGX17844

SEQ ID NO: 189336 - RNA, 1401 nt, Artificial Sequence; identical to SEQ ID NO: 189329
  derived and/or modified CDS sequence (opt4) from neuraminidase__InfluenzaB__AGX17855

SEQ ID NO: 189337 - RNA, 1401 nt, Artificial Sequence; identical to SEQ ID NO: 188948
  derived and/or modified CDS sequence (opt4) from neuraminidase__InfluenzaB__AGX17866

SEQ ID NO: 189338 - RNA, 1401 nt, Artificial Sequence; identical to SEQ ID NO: 189314
  derived and/or modified CDS sequence (opt4) from neuraminidase__InfluenzaB__AGX17877

SEQ ID NO: 189339 - RNA, 1401 nt, Artificial Sequence; identical to SEQ ID NO: 189321
  derived and/or modified CDS sequence (opt4) from neuraminidase__InfluenzaB__AGX17888

SEQ ID NO: 189340 - RNA, 1401 nt, Artificial Sequence; identical to SEQ ID NO: 189314
  derived and/or modified CDS sequence (opt4) from neuraminidase__InfluenzaB__AGX17899

SEQ ID NO: 189341 - RNA, 1401 nt, Artificial Sequence; identical to SEQ ID NO: 189321
  derived and/or modified CDS sequence (opt4) from neuraminidase__InfluenzaB__AGX17910

SEQ ID NO: 189342 - RNA, 1401 nt, Artificial Sequence; identical to SEQ ID NO: 189321
  derived and/or modified CDS sequence (opt4) from neuraminidase__InfluenzaB__AGX17921

SEQ ID NO: 189343 - RNA, 1401 nt, Artificial Sequence; identical to SEQ ID NO: 188948
  derived and/or modified CDS sequence (opt4) from neuraminidase__InfluenzaB__AGX17932

SEQ ID NO: 189344 - RNA, 1401 nt, Artificial Sequence
  derived and/or modified CDS sequence (opt4) from neuraminidase__InfluenzaB__AGX17943
augcugcccagcaccauccagacccugacccuguuccugaccagcggcggcgugcugcugagccuguacgugagcgccagccugagcuaccugcuguacagcgacauccugcugaaguucccccccaccgagaucaccgcccccaccaugccccuggacugcgccaacgccagcaacgugcaggccgugaacagaagcgccaccaagggcgugacccugcugcugcccgagcccgaguggaccuaccccagacugagcugccccggcagcaccuuccagaaggcccugcugaucagcccccacagauucggcgagaccaagggcaacagcgccccccugaucaucagagagcccuucaucgccugcggccccaaggagugcaagcacuucgcccugacccacuacgccgcccagcccggcggcuacuacaacggcaccagaggcgacagaaacaagcugagacaccugaucagcgugagacugggcaagauccccaccguggagaacagcaucuuccacauggccgccuggagcggcagcgccugccacgacggcaaggaguggaccuacaucggcguggacggccccgacaacaacgcccugcugaagaucaaguacggcgaggccuacaccgacaccuaccacagcuacgccaacaacauccugagaacccaggagagcgccugcaacugcaucggcggcaacugcuaccugaugaucaccgacggcagcgccagcggcgugagcgagugcagauuccugaagaucagagagggcagaaucaucaaggagaucuuccccaccggcagagugaagcacaccgaggagugcaccugcggcuucgccagcaacaagaccaucgagugcgccugcagagacaacagcuacaccgccaagagacccuucgugaagcugaacguggagaccgacaccgccgagaucagacugaugugcaccgagaccuaccuggacacccccagacccgacgacggcagcaucaccggccccugcgagagcaacggcgacaagggcagcggcggcaucaagggcggcuucgugcaccagagaauggccagcaagaucggcagaugguacagcagaaccaugagcaagaccaagagaaugggcaugggccuguacgugaaguacgacggcgaccccugggccgacagcgacgcccuggccuucagcggcgugauggugagcauggaggagcccggcugguacagcuucggcuucgagaucaaggacaagaagugcgacgugcccugcaucggcaucgagauggugcacgacggcggcaaggagaccuggcacagcgccgccaccgccaucuacugccugaugggcagcggccagcugcugugggacaccgugaccggcgugaacauggcccuguga

SEQ ID NO: 189345 - RNA, 1401 nt, Artificial Sequence; identical to SEQ ID NO: 189314
  derived and/or modified CDS sequence (opt4) from neuraminidase__InfluenzaB__AGX17954

SEQ ID NO: 189346 - RNA, 1401 nt, Artificial Sequence
  derived and/or modified CDS sequence (opt4) from neuraminidase__InfluenzaB__AGX17976
augcugcccagcaccauccagacccugacccuguuccugaccagcggcggcgugcugcugagccuguacgugagcgccagccugagcuaccugcuguacagcgacauccugcugaaguucagccccaccgagaucaccgcccccaccaugccccuggacugcgccaacgccagcaacgugcacgccgugaacagaagcgccaccaagggcgugaccccccugcugcccgagcccgaguggaccuaccccagacugagcugccccggcagcaccuuccagaaggcccugcugaucagcccccacagauucggcgagaccaagggcaacagcgccccccugaucaucagagagcccuucaucgccugcggccccaacgagugcaagcacuucgcccugacccacuacgccgcccagcccggcggcuacuacaacggcaccagaggcgacagaaacaagcugagacaccugaucagcgugaagcugggcaagauccccaccguggagaacagcaucuuccacauggccgccuggagcggcagcgccugccacgacggcaaggaguggaccuacaucggcguggacggccccgacaacaacgcccugcugaagaucaaguacggcgaggccuacaccgacaccuaccacagcuacgccaacaacauccugagaacccaggagagcgccugcaacugcaucggcggcaacugcuaccugaugaucaccgacggcagcgccagcggcgugagcgagugcagauuccugaagaucagagagggcagaaucaucaaggagaucuuccccaccggcagagugaagcacaccgaggagugcaccugcggcuucgccagcaacaagaccaucgagugcgccugcagagacaacagcuacaccgccaagagacccuucgugaagcugaacguggagaccgacaccgccgagaucagacugaugugcaccgacaccuaccuggacacccccagacccgacgacggcagcaucaccggccccugcgagagcaacggcgacaagggcagcggcggcaucaagggcggcuucgugcaccagagaauggccagcaagaucggcagaugguacagcagaaccaugagcaagaccgagagaaugggcaugggccuguacgugaaguacgacggcgaccccugggccgacagcgacgcccuggccuucagcggcgugauggugagcaugaaggagcccggcugguacagcuucggcuucgagaucaaggacaagaagugcgacgugcccugcaucggcaucgagauggugcacgacggcggcaaggagaccuggcacagcgccgccaccgccaucuacugccugaugggcagcggccagcugcugugggacaccgugaccggcguggacauggcccuguga

SEQ ID NO: 189347 - RNA, 1401 nt, Artificial Sequence
  derived and/or modified CDS sequence (opt4) from neuraminidase__InfluenzaB__AGX17987
augcugcccagcaccauccagacccugacccuguuccugaccagcggcggcgugcugcugagccuguacgugagcgugagccugagcuaccugcuguacagcgacauccugcugaaguucccccccaccgagaucaccgcccccaccaugccccuggacugcgccaacgccagcaacgugcaggccgugaacagaagcgccaccaagggcgugacccugcugcugcccgagcccgaguggaccuaccccagacugagcugccccggcagcaccuuccagaaggcccugcugaucagcccccacagauucggcgagaccaagggcaacagcgccccccugaucaucagagagcccuucaucgccugcggccccaaggagugcaagcacuucgcccugacccacuacgccgcccagcccggcggcuacuacaacggcaccagaggcgacagaaacaagcugagacaccugaucagcgugaagcugggcaagauccccaccguggagaacagcaucuuccacauggccgccuggagcggcagcgccugccacgacggcaaggaguggaccuacaucggcguggacggccccgacaacaacgcccugcugaagaucaaguacggcgaggccuacaccgacaccuaccacagcuacgccaacaacauccugagaacccaggagagcgccugcaacugcaucggcggcaacugcuaccugaugaucaccgacggcagcgccagcggcgugagcgagugcagauuccugaagaucagagagggcagaaucaucaaggagaucuuccccaccggcagagugaagcacaccgaggagugcaccugcggcuucgccagcaacaagaccaucgagugcgccugcagagacaacagcuacaccgccaagagacccuucgugaagcugaacguggagaccgacaccgccgagaucagacugaugugcaccgagaccuaccuggacacccccagacccgacgacggcagcaucaccggccccugcgagagcaacggcgacaagggcagcggcggcaucaagggcggcuucgugcaccagagaauggccagcaagaucggcagaugguacagcagaaccaugagcaagaccaagagaaugggcaugggccuguacgugaaguacgacggcgaccccugggccgacagcgacgcccuggccuucagcggcgugauggugagcauggaggagcccggcugguacagcuucggcuucgagaucaaggacaagaagugcgacgugcccugcaucggcaucgagauggugcacgacggcggcaaggagaccuggcacagcgccgccaccgccaucuacugccugaugggcagcggccagcugcugugggacaccgugaccggcgugaacauggcccuguga

SEQ ID NO: 189348 - RNA, 1401 nt, Artificial Sequence; identical to SEQ ID NO: 189321
  derived and/or modified CDS sequence (opt4) from neuraminidase__InfluenzaB__AGX17998

SEQ ID NO: 189349 - RNA, 1401 nt, Artificial Sequence; identical to SEQ ID NO: 189314
  derived and/or modified CDS sequence (opt4) from neuraminidase__InfluenzaB__AGX18009

SEQ ID NO: 189350 - RNA, 1401 nt, Artificial Sequence; identical to SEQ ID NO: 189347
  derived and/or modified CDS sequence (opt4) from neuraminidase__InfluenzaB__AGX18020

SEQ ID NO: 189351 - RNA, 1401 nt, Artificial Sequence; identical to SEQ ID NO: 189314
  derived and/or modified CDS sequence (opt4) from neuraminidase__InfluenzaB__AGX18031

SEQ ID NO: 189352 - RNA, 1401 nt, Artificial Sequence
  derived and/or modified CDS sequence (opt4) from neuraminidase__InfluenzaB__AGX18042
augcugcccagcaccauccagacccugacccuguuccugaccagcggcggcgugcugcugagccuguacgugagcgccagccugagcuaccugcuguacagcgacauccugcugaaguucagccccaccgagaucaccgcccccaccaugccccugaacugcgccaacgccagcaacgugcaggccgugaacagaagcgccaccaagggcgugacccugcugcugcccgagcccgaguggaccuaccccagacugagcugccccggcagcaccuuccagaaggcccugcugaucagcccccacagauucggcgagaccaagggcaacagcgccccccugaucaucagagagcccuucaucgccugcggccccaacgagugcaagcacuucgcccugacccacuacgccgcccagcccggcggcuacuacaacggcaccagaggcgacagaaacaagcugagacaccugaucagcgugaagcugggcaagauccccaccguggagaacagcaucuuccacauggccgccuggagcggcagcgccugccacgacggcaaggaguggaccuacaucggcguggacggccccgacaacaacgcccugcugaagaucaaguacggcgaggccuacaccgacaccuaccacagcuacgccaacaacauccugagaacccaggagagcgccugcaacugcaucggcggcaacugcuaccugaugaucaccgacggcagcgccagcggcgugagcgagugcagauuccugaagaucagagagggcagaaucaucaaggagaucuuccccaccggcagagugaagcacaccgaggagugcaccugcggcuucgccagcaacaagaccaucgagugcgccugcagagacaacagcuacaccgccaagagacccuucgugaagcugaacguggagaucgacaccgccgagaucagacugaugugcaccgacaccuaccuggacacccccagacccgacgacggcagcaucaccggccccugcgagagcaacggcgacaagggcagcggcggcaucaagggcggcuucgugcaccagagaauggccagcaagaucggcagaugguacagcagaaccaugagcaagaccgagagaaugggcaugggccuguacgugaaguacgacggcgaccccugggccgacagcgacgcccuggccuucagcggcgugauggugagcaugaaggagcccggcugguacagcuucggcuucgagaucaaggacaagaagugcgacgugcccugcaucggcaucgagauggugcacgacggcggcaaggagaccuggcacagcgccgccaccgccaucuacugccugaugggcagcggccagcugcugugggacaccgugaccggcguggacauggcccuguga

SEQ ID NO: 189353 - RNA, 1401 nt, Artificial Sequence; identical to SEQ ID NO: 189321
  derived and/or modified CDS sequence (opt4) from neuraminidase__InfluenzaB__AGX18053

SEQ ID NO: 189354 - RNA, 1401 nt, Artificial Sequence; identical to SEQ ID NO: 189321
  derived and/or modified CDS sequence (opt4) from neuraminidase__InfluenzaB__AGX18064

SEQ ID NO: 189355 - RNA, 1401 nt, Artificial Sequence
  derived and/or modified CDS sequence (opt4) from neuraminidase__InfluenzaB__AGX18075
augcugcccagcaccauccagacccugacccuguuccugaccagcggcggcgugcugcugagccuguacgugagcgccagccugagcuaccugcuguacagcgacauccugcugaaguucccccccaccgagaucaccgcccccaccaugccccuggacugcgccaacgccagcaacgugcaggccgugaacagaagcgccaccaagggcgugacccugcugcugcccgagcccgaguggaccuaccccagacugagcugccccggcagcaccuuccagaaggcccugcugaucagcccccacagauucggcgagaccaagggcaacagcgccccccugaucaucagagagcccuucaucgccugcggccccaaggagugcaagcacuucgcccugacccacuacgccgcccagcccggcggcuacuacaacggcaccagaggcgacagaaacaagcugagacaccugaucagcgugaagcugggcaagauccccaccguggagaacagcaucuuccacauggccgccuggagcggcagcagcugccacgacggcaaggaguggaccuacaucggcguggacggccccgacaacaacgcccugcugaagaucaaguacggcgaggccuacaccgacaccuaccacagcuacgccaacaacauccugagaacccaggagagcgccugcaacugcaucggcggcaacugcuaccugaugaucaccgacggcagcgccagcggcgugagcgagugcagauuccugaagaucagagagggcagaaucaucaaggagaucuuccccaccggcagagugaagcacaccgaggagugcaccugcggcuucgccagcaacaagaccaucgagugcgccugcagagacaacagcuacaccgccaagagacccuucgugaagcugaacguggagaccgacaccgccgagaucagacugaugugcaccgagaccuaccuggacacccccagacccgacgacggcagcaucaccggccccugcgagagcaacggcgacaagggcagcggcggcaucaagggcggcuucgugcaccagagaauggccagcaagaucggcagaugguacagcagaaccaugagcaagaccaagagaaugggcaugggccuguacgugaaguacgacggcgaccccugggccgacagcgacgcccuggccuucagcggcgugauggugagcauggaggagcccggcugguacagcuucggcuucgagaucaaggacaagaagugcgacgugcccugcaucggcaucgagauggugcacgacggcggcaaggagaccuggcacagcgccgccaccgccaucuacugccugaugggcagcggccagcugcugugggacaccgugaccggcgugaacauggcccuguga

SEQ ID NO: 189356 - RNA, 1401 nt, Artificial Sequence; identical to SEQ ID NO: 188948
  derived and/or modified CDS sequence (opt4) from neuraminidase__InfluenzaB__AGX18086

SEQ ID NO: 189357 - RNA, 1401 nt, Artificial Sequence; identical to SEQ ID NO: 188948
  derived and/or modified CDS sequence (opt4) from neuraminidase__InfluenzaB__AGX18097

SEQ ID NO: 189358 - RNA, 1401 nt, Artificial Sequence; identical to SEQ ID NO: 188901
  derived and/or modified CDS sequence (opt4) from neuraminidase__InfluenzaB__AGX18108

SEQ ID NO: 189359 - RNA, 1401 nt, Artificial Sequence
  derived and/or modified CDS sequence (opt4) from neuraminidase__InfluenzaB__AGX18119
augcugcccagcaccauccagacccugacccuguuccugaccagcggcggcgugcugcugagccuguacgugagcgccagccugagcuaccugcuguacagcgacauccugcugaaguucagccccaccgagaucaccgcccccaccaugccccuggacugcgccaacaccagcaacgugcaggccgugaacagaagcgccaccaagggcgugacccugcugcugcccgagcccgaguggaccuaccccagacugagcugccccggcagcaccuuccagaaggcccugcugaucagcccccacagauucggcgagaccaagggcaacagcgccccccugaucaucagagagcccuucaucgccugcggccccaacgagugcaagcacuucgcccugacccacuacgccgcccagcccggcggcuacuacaacggcaccagaggcgacagaaacaagcugagacaccugaucagcgugaagcugggcaagauccccaccguggagaacagcaucuuccacauggccgccuggagcggcagcgccugccacgacggcaaggaguggaccuacaucggcguggacggccccgacaacaacgcccugcugaagaucaaguacggcgaggccuacaccgacaccuaccacagcuacgccaacaacauccugagaacccaggagagcgccugcaacugcaucggcggcaacugcuaccugaugaucaccgacggcagcgccagcggcgugagcgagugcagauuccugaagaucagagagggcagaaucaucaaggagaucuuccccaccggcagagugaagcacaccgaggagugcaccugcggcuucgccagcaacaagaccaucgagugcgccugcagagacaacagcuacaccgccaagagacccuucgugaagcugaacauggagaccgacaccgccgagaucaagcugaugugcaccgacaccuaccuggacacccccagacccgacgacggcagcaucaccggccccugcgagagcaacggcgacaagggcagcggcggcaucaagggcggcuucgugcaccagagaauggccagcaagaucggcagaugguacagcagaaccaugagcaagaccgagagaaugggcaugggccuguacgugaaguacgacggcgaccccugggccgacagcgacgcccuggccuucagcggcgugauggugagcaugaaggagcccggcugguacagcuucggcuucgagaucaaggacaagaagugcgacgugcccugcaucggcaucgagauggugcacgacggcggcaaggagaccuggcacagcgccgccaccgccaucuacugccugaugggcagcggccagcugcugugggacaccgugaccggcguggacauggcccuguga

SEQ ID NO: 189360 - RNA, 1401 nt, Artificial Sequence
  derived and/or modified CDS sequence (opt4) from neuraminidase__InfluenzaB__AGX18130
augcugcccagcaccauccagacccugacccuguuccugaccagcggcggcgugcugcugagccuguacgugagcgccagccugagcuaccugcuguacagcgacauccugcugaaguucagccccaccgagaucaccgcccccaccaugccccuggacugcgccaacgccagcaacgugcaggccgugaacagaagcgccaccaagggcgugacccugcugcugcccgagcccgaguggaccuaccccagacugagcugccccggcagcaccuuccagaaggcccugcugaucagcccccacagauucggcgagaccaagggcaacagcgccccccugaucaucagagagcccuucaucgccugcggccccaacgagugcaagcacuucgcccugacccacuacgccgcccagcccggcggcuacuacaacggcaccagaggcgacagaaacaagcugagacaccugaucagcgugaagcugggcaagauccccaccguggagaacagcaucuuccacauggccgccuggagcggcagcgccugccacgacggcaaggaguggaccuacaucggcguggacggccccgacaacaacgcccugcugaagaucaaguacggcgaggccuacaccgacaccuaccacagcuacgccaacaacauccugagaacccaggagagcgccugcaacugcaucggcggcaacugcuaccugaugaucaccgacggcagcgccagcggcgugagcgagugcagauuccugaagaucagagagggcagaaucaucaaggagaucuuccccaccggcagagugaagcacaccgaggagugcaccugcggcuucgccagcaacaagaccaucgagugcgccugcagagacaacagcuacaccgccaagagacccuucgugaagcugaacguggagaucgacaccgccgagaucagacugaugugcaccgacaccuaccuggacacccccagacccgacgacggcagcaucaccggccccugcgagagcaacggcgacaagggcagcggcggcaucaagggcggcuucgugcaccagagaauggccagcaagaucggcagaugguacagcagaaccaugagcagaaccgagagaaugggcaugggccuguacgugaaguacgacggcgaccccugggccgacagcgacgcccuggccuucagcggcgugauggugagcaugaaggagcccggcugguacagcuucggcuucgagaucaaggacaagaagugcgacgugcccugcaucggcaucgagauggugcacgacggcggcaaggagaccuggcacagcgccgccaccgccaucuacugccugaugggcagcggccagcugcugugggacaccgugaccggcguggacauggcccuguga

SEQ ID NO: 189361 - RNA, 1401 nt, Artificial Sequence
  derived and/or modified CDS sequence (opt4) from neuraminidase__InfluenzaB__AGX18141
augcugcccagcaccauccagacccugacccuguuccugaccagcggcggcgugcugcugagccuguacgugagcgccagccugagcuaccugcuguacagcgacauccugcugaaguuccccagcaccgagaucaccgcccccaccaugccccuggacugcgccaacgccagcaacgugcaggccgugaacagaagcgccaccaagggcaugacccugcugcugcccgagcccgaguggaccuaccccagacugagcugccccggcagcaccuuccagaaggcccugcugaucagcccccacagauucggcgagaccaagggcaacagcgccccccugaucaucagagagcccuucaucgccugcggccccaaggagugcaagcacuucgcccugacccacuacgccgcccagcccggcggcuacuacaacggcaccagaggcgacagaaacaagcugagacaccugaucagcgugaagcugggcaagauccccaccguggagaacagcaucuuccacauggccgccuggagcggcagcgccugccacgacggcaaggaguggaccuacaucggcguggacggccccgacaacaacgcccugcugaagaucaaguacggcgaggccuacaccgacaccuaccacagcuacgccaacaacauccugagaacccaggagagcgccugcaacugcaucggcggcaacugcuaccugaugaucaccgacggcagcgccagcggcgugagcgagugcagauuccugaagaucagagagggcagaaucaucaaggagaucuuccccaccggcagaaucaagcacaccgaggagugcaccugcggcuucgccagcaacaagaccaucgagugcgccugcagagacaacagcuacaccgccaagagacccuucgugaagcugaacguggagaccgacaccgccgagaucagacugaugugcaccgagaccuaccuggacacccccagacccgacgacggcagcaucaccggccccugcgagagcaacggcgacaagggcagcggcggcaucaagggcggcuucgugcaccagagaauggccagcaagaucggcagaugguacagcagaaccaugagcaagaccgagagaaugggcaugggccuguacgugaaguacgacggcgaccccugggccgagagcgacgcccuggccuucagcggcgugauggugagcauggaggagcccggcugguacagcuucggcuucgagaucaaggacaagaagugcgacgugcccugcaucggcaucgagauggugcacgacggcggcaaggagaccuggcacagcgccgccaccgccaucuacugccugaugggcagcggccagcugcugugggacaccgugaccggcgugaacauggcccuguga

SEQ ID NO: 189362 - RNA, 1401 nt, Artificial Sequence; identical to SEQ ID NO: 188948
  derived and/or modified CDS sequence (opt4) from neuraminidase__InfluenzaB__AGX18152

SEQ ID NO: 189363 - RNA, 1401 nt, Artificial Sequence
  derived and/or modified CDS sequence (opt4) from neuraminidase__InfluenzaB__AGX18163
augcugcccagcaccauccagacccugacccuguuccugaccagcggcggcgugcugcugagccuguacgugagcgccagccugagcuaccugcuguacagcgacauccugcugaaguuccccagcaccgagaucaccgcccccaccaugccccuggacugcgccaacgccagcaacgugcaggccgugaacagaagcgccaccaagggcgugacccugcugcugcccgagcccgaguggaccuaccccagacugagcugccccggcagcaccuuccagaaggcccugcugaucagcccccacagauucggcgagaccaagggcaacagcgccccccugaucaucagagagcccuucaucgccugcggccccaaggagugcaagcacuucgcccugacccacuacgccgcccagcccggcggcuacuacaacggcaagagaggcgacagaaacaagcugagacaccugaucagcgugaagcugggcaagauccccaccguggagaacagcaucuuccacauggccgccuggagcggcagcgccugccacgacggcaaggaguggaccuacaucggcguggacggccccgacaacaacgcccugcugaagaucaaguacggcgaggccuacaccgacaccuaccacagcuacgccaacaacauccugagaacccaggagagcgccugcaacugcaucggcggcaacugcuaccugaugaucaccgacggcagcgccagcggcgugagcgagugcagauuccugaagaucagagagggcagaaucaucaaggagaucuuccccaccggcagaaucaagcacaccgaggagugcaccugcggcuucgccagcaacaagaccaucgagugcgccugcagagacaacagcuacaccgccaagagacccuucgugaagcugaacguggagaccgacaccgccgagaucagacugaugugcaccgagaccuaccuggacacccccagacccgacgacggcagcaucaccggccccugcgagagcaacggcgacaagggcagcggcggcaucaagggcggcuucgugcaccagagaauggccagcaagaucggcagaugguacagcagaaccaugagcaagaccgagagaaugggcaugggccuguacgugaaguacgacggcgaccccugggccgacagcgacgcccuggccuucagcggcgugauggugagcauggaggagcccggcugguacagcuucggcuucgagaucaaggacaagaagugcgacgugcccugcaucggcaucgagauggugcacgacggcggcaaggagaccuggcacagcgccgccaccgccaucuacugccugaugggcagcggccagcugcugugggacaccgugaccggcgugaacauggcccuguga

SEQ ID NO: 189364 - RNA, 1401 nt, Artificial Sequence; identical to SEQ ID NO: 189314
  derived and/or modified CDS sequence (opt4) from neuraminidase__InfluenzaB__AGX18174

SEQ ID NO: 189365 - RNA, 1401 nt, Artificial Sequence; identical to SEQ ID NO: 188948
  derived and/or modified CDS sequence (opt4) from neuraminidase__InfluenzaB__AGX18185

SEQ ID NO: 189366 - RNA, 1401 nt, Artificial Sequence; identical to SEQ ID NO: 188901
  derived and/or modified CDS sequence (opt4) from neuraminidase__InfluenzaB__AGX18196

SEQ ID NO: 189367 - RNA, 1401 nt, Artificial Sequence
  derived and/or modified CDS sequence (opt4) from neuraminidase__InfluenzaB__AGX18207
augcugcccagcaccauccagacccugacccuguuccugaccagcggcggcgugcugcugagccuguacgugagcgccagccugagcuaccugcuguacagcgacauccugcugaaguucccccccaccgagaucaccgcccccaccaugccccuggacugcgccaacgccagcaacgugcaggccgugaacagaagcgccaccaagggcgugacccugcugcugcccgagcccgaguggaccuaccccagacugagcugccccggcagcaccuuccagaaggcccugcugaucagcccccacagauucggcgagaccaagggcaacagcgccccccugaucaucagagagcccuucaucgccugcggccccaaggagugcaagcacuucgcccugacccacuacgccgcccagcccggcggcuacuacaacggcaccagaggcgacagaaacaagcugagacaccugaucagcgugaagcugggcaagauccccaccguggagaccagcaucuuccacauggccgccuggagcggcagcgccugccacgacggcaaggaguggaccuacaucggcguggacggccccgacaacaacgcccugcugaagaucaaguacggcgaggccuacaccgacaccuaccacagcuacgccaacaacauccugagaacccaggagagcgccugcaacugcaucggcggcaacugcuaccugaugaucaccgacggcagcgccagcggcgugagcgagugcagauuccugaagaucagagagggcagaaucaucaaggagaucuuccccaccggcagagugaagcacaccgaggagugcaccugcggcuucgccagcaacaagaccaucgagugcgccugcagagacaacagcuacaccgccaagagacccuucgugaagcugaacguggagaccgacaccgccgagaucagacugaugugcaccgagaccuaccuggacacccccagacccgacgacggcagcaucaccggccccugcgagagcaacggcgacaagggcagcggcggcaucaagggcggcuucgugcaccagagaauggccagcaagaucggcagaugguacagcagaaccaugagcaagaccaagagaaugggcaugggccuguacgugaaguacgacggcgaccccugggccgacagcgacgcccuggccuucagcggcgugauggugagcauggaggagcccggcugguacagcuucggcuucgagaucaaggacaagaagugcgacgugcccugcaucggcaucgagauggugcacgacggcggcaaggagaccuggcacagcgccgccaccgccaucuacugccugaugggcagcggccagcugcugugggacaccgugaccggcgugaacauggcccuguga

SEQ ID NO: 189368 - RNA, 1401 nt, Artificial Sequence
  derived and/or modified CDS sequence (opt4) from neuraminidase__InfluenzaB__AGX18218
augcugcccagcaccauccagacccugacccuguuccugaccagcggcggcgugcugcugagccuguacgugagcgccagccugagcuaccugcuguacagcgacauccugcugaagcugagccccaccgagaucaccgcccccaccaugccccuggacugcgccaacaccagcaacgugcaggccgugaacagaagcgccaccaagggcgugacccugcugcugcccgagcccgaguggaccuaccccagacugagcugccccggcagcaccuuccagaaggcccugcugaucagcccccacagauucggcgagaccaagggcaacagcgccccccugaucaucagagagcccuucaucgccugcggccccaacgagugcaagcacuucgcccugacccacuacgccgcccagcccggcggcuacuacaacagaaccagaggcgacagaaacaagcugagacaccugaucagcgugaagcugggcaagauccccaccguggagaacagcaucuuccacauggccgccuggagcggcagcgccugccacgacggcaaggaguggaccuacaucggcguggacggccccgacaacaacgcccugcugaagaucaaguacggcgaggccuacaccgacaccuaccacagcuacgccaacaacauccugagaacccaggagagcgccugcaacugcaucggcggcaacugcuaccugaugaucaccgacggcagcgccagcggcgugagcgagugcagauuccugaagaucagagagggcagaaucaucaaggagaucuuccccaccggcagagugaagcacaccgaggagugcaccugcggcuucgccagcaacaagaccaucgagugcgccugcagagacaacagcuacaccgccaagagacccuucgugaagcugaacauggagaccgacaccgccgagaucagacugaugugcaccgacaccuaccuggacacccccagacccgacgacggcagcaucaccggccccugcgagagcaacggcgacaagggcagcggcggcaucaagggcggcuucgugcaccagagaauggccagcaagaucggcagaugguacagcagaaccaugagcaagaccgagagaaugggcaugggccuguacgugaaguacgacggcgaccccugggccgacagcgacgcccuggccuucagcggcgugauggugagcaugaaggagcccggcugguacagcuucggcuucgagaucaaggacaagaagugcgacgugcccugcaucggcaucgagauggugcacgacggcggcaaggagaccuggcacagcgccgccaccgccaucuacugccugaugggcagcggccagcugcugugggacaccgugaccggcguggacauggcccuguga

SEQ ID NO: 189369 - RNA, 1401 nt, Artificial Sequence; identical to SEQ ID NO: 189321
  derived and/or modified CDS sequence (opt4) from neuraminidase__InfluenzaB__AGX18229

SEQ ID NO: 189370 - RNA, 1401 nt, Artificial Sequence
  derived and/or modified CDS sequence (opt4) from neuraminidase__InfluenzaB__AGX18240
augcugcccagcaccauccagacccugacccuguuccugaccagcggcggcgugcugcugagccuguacgugagcgccagccugagcuaccugcuguacagcgacauccugcugaaguucagccccaccgagaucaccgcccccaccaugccccuggacugcgccaacgccagcaacgugcagaccgugaacagaagcgccaccaagggcgugacccugcugcugcccgagcccgaguggaccuaccccagacugagcugccccggcagcaccuuccagaaggcccugcugaucagcccccacagauucggcgagaccaagggcaacagcgccccccugaucaucagagagcccuucaucgccugcggccccaacgagugcaagcacuucgcccugacccacuacgccgcccagcccggcggcuacuacaacggcaccagaggcgacagaaacaagcugagacaccugaucagcgugaagcugggcaagauccccaccguggagaacagcaucuuccacauggccgccuggagcggcagcgccugccacgacggcaaggaguggaccuacaucggcguggacggccccgacaacaacgcccugcugaagaucaaguacggcgaggccuacaccgacaccuaccacagcuacgccaacaacauccugagaacccaggagagcgccugcaacugcaucggcggcaacugcuaccugaugaucaccgacggcagcgccagcggcgugagcgagugcagauuccugaagaucagagagggcagaaucaucaaggagaucuuccccaccggcagagugaagcacaccgaggagugcaccugcggcuucgccagcaacaagaccaucgagugcgccugcagagacaacagcuacaccgccaagagacccuucgugaagcugaacguggagaucgacaccgccgagaucagacugaugugcaccgacaccuaccuggacacccccagacccgacgacggcagcaucaccggccccugcgagagcaacggcgacaagggcagcggcggcaucaagggcggcuucgugcaccagagaauggccagcaagaucggcagaugguacagcagaaccaugagcaagaccgagagaaugggcaugggccuguacgugaaguacgacggcgaccccugggccgacagcgacgcccuggccuucagcggcgugauggugagcaugaaggagcccggcugguacagcuucggcuucgagaucaaggacaagaagugcgacgugcccugcaucggcaucgagauggugcacgacggcggcaaggagaccuggcacagcgccgccaccgccaucuacugccugaugggcagcggccagcugcugugggacaccgugaccggcguggacauggcccuguga

SEQ ID NO: 189371 - RNA, 1401 nt, Artificial Sequence; identical to SEQ ID NO: 189314
  derived and/or modified CDS sequence (opt4) from neuraminidase__InfluenzaB__AGX18251

SEQ ID NO: 189372 - RNA, 1401 nt, Artificial Sequence
  derived and/or modified CDS sequence (opt4) from neuraminidase__InfluenzaB__AGX18262
augcugcccagcaccauccagacccugacccuguuccugaccagcggcggcgugcugcugagccuguacgugagcgccagccugagcuaccugcuguacagcaacauccugcugaaguucagccccaccgagaucaccgcccccaccaugccccuggacugcgccaacgccagcaacgugcaggccgugaacagaagcgccaccaagggcgugacccugcugcugcccgagcccgaguggaccuaccccagacugagcugccccggcagcaccuuccagaaggcccugcugaucagcccccacagauucggcgagaccaagggcaacagcgccccccugaucaucagagagcccuucaucgccugcggccccaacgagugcaagcacuucgcccugacccacuacgccgcccagcccggcggcuacuacaacggcaccagaggcgacagaaacaagcugagacaccugaucagcgugaagcugggcaagauccccaccguggagaacagcaucuuccacauggccgccuggagcggcagcgccugccacgacggcaaggaguggaccuacaucggcguggacggccccgacaacaacgcccugcugaagaucaaguacggcgaggccuacaccgacaccuaccacagcuacgccaacaacauccugagaacccaggagagcgccugcaacugcaucggcggcaacugcuaccugaugaucaccgacggcagcgccagcggcgugagcgagugcagauuccugaagaucagagagggcagaaucaucaaggagaucuuccccaccggcagagugaagcacaccgaggagugcaccugcggcuucgccagcaacaagaccaucgagugcgccugcagagacaacagcuacaccgccaagagacccuucgugaagcugaacguggagaccgacaccgccgagaucagacugaugugcaccgacaccuaccuggacacccccagacccgacgacggcagcaucaccggccccugcgagagcaacggcgacaagggcagcggcggcaucaagggcggcuucgugcaccagagaauggccagcaaggugggcagaugguacagcagaaccaugagcaagaccgagagaaugggcaugggccuguacgugaaguacgacggcgaccccugggccgacagcgacgcccuggccuucagcggcgugauggugagcaugaaggagcccggcugguacagcuucggcuucgagaucaaggacaagaagugcgacgugcccugcaucggcaucgagauggugcacgacggcggcaaggagaccuggcacagcgccgccaccgccaucuacugccugaugggcagcggccagcugcugugggacaccgugaccggcguggacauggcccuguga

SEQ ID NO: 189373 - RNA, 1401 nt, Artificial Sequence; identical to SEQ ID NO: 189321
  derived and/or modified CDS sequence (opt4) from neuraminidase__InfluenzaB__AGX18273

SEQ ID NO: 189374 - RNA, 1401 nt, Artificial Sequence; identical to SEQ ID NO: 189346
  derived and/or modified CDS sequence (opt4) from neuraminidase__InfluenzaB__AGX18284

SEQ ID NO: 189375 - RNA, 1401 nt, Artificial Sequence; identical to SEQ ID NO: 189321
  derived and/or modified CDS sequence (opt4) from neuraminidase__InfluenzaB__AGX18295

SEQ ID NO: 189376 - RNA, 1401 nt, Artificial Sequence; identical to SEQ ID NO: 188948
  derived and/or modified CDS sequence (opt4) from neuraminidase__InfluenzaB__AGX18306

SEQ ID NO: 189377 - RNA, 1401 nt, Artificial Sequence
  derived and/or modified CDS sequence (opt4) from neuraminidase__InfluenzaB__AGX18317
augcugcccagcaccauccagacccugacccuguuccugaccagcggcggcgugcugcugagccuguacgugagcgccagccugagcuaccugcuguacagcgacauccugcugaaguuccccagcaccgagaucaccgcccccaccaugccccuggacugcgccaacgccagcaacgugcaggccgugaacagaagcgccaccaagggcgugacccugcugcugcccgagcccgaguggaccuaccccagacugagcugccccggcagcaccuuccagaaggcccugcugaucagcccccacagauucggcgagaccaagggcaacagcgccccccugaucaucagagagcccuucaucgccugcggccccaaggagugcaagcacuucgcccugacccacuacgccgcccagcccggcggcuacuacaacgagaccagaggcgacagaaacaagcugagacaccugaucagcgugaagcugggcaagauccccaccguggagaacagcaucuuccacauggccgccuggagcggcagcgccugccacgacggcaaggaguggaccuacaucggcguggacggccccgacaacaacgcccugcugaagaucaaguacggcgaggccuacaccgacaccuaccacagcuacgccaacaacauccugagaacccaggagagcgccugcaacugcaucggcggcaacugcuaccugaugaucaccgacggcagcgccagcggcgugagcgagugcagauuccugaagaucagagagggcagaaucaucaaggagaucuuccccaccggcagaaucaagcacaccgaggagugcaccugcggcuucgccagcaacaagaccaucgagugcgccugcagagacaacagcuacaccgccaagagacccuucgugaagcugaacguggagaccgacaccgccgagaucagacugaugugcaccgagaccuaccuggacacccccagacccgacgacggcagcaucaccggccccugcgagagcaacggcgacaagggcagcggcggcaucaagggcggcuucgugcaccagagaauggccagcaagaucggcagaugguacagcagaaccaugagcaagaccaagagaaugggcaugggccuguacgugaaguacgacggcgaccccugggccgacagcgacgcccuggccuucagcggcgugauggugagcauggaggagcccggcugguacagcuucggcuucgagaucaaggacaagaagugcgacgugcccugcaucggcaucgagauggugcacgacggcggcaaggagaccuggcacagcgccgccaccgccaucuacugccugaugggcagcggccagcugcugugggacaccgugaccggcgugaacauggcccuguga

SEQ ID NO: 189378 - RNA, 1401 nt, Artificial Sequence; identical to SEQ ID NO: 189321
  derived and/or modified CDS sequence (opt4) from neuraminidase__InfluenzaB__AGX18328

SEQ ID NO: 189379 - RNA, 1401 nt, Artificial Sequence
  derived and/or modified CDS sequence (opt4) from neuraminidase__InfluenzaB__AGX18339
augcugcccagcaccauccagacccugacccuguuccugaccagcggcggcgugcugcugagccuguacgugagcgccagccugagcuaccugcuguacagcgacauccugcugaaguucagccccaccgagaucaccgcccccaccaugccccuggacugcgccaacgccagcaacgugcaggccgugaacagaagcgccaccaagggcgugacccugcugcugcccgagcccgaguggaccuaccccagacugagcugccccggcagcaccuuccagaaggcccugcugaucagcccccacagauucggcgagaccaagggcaacagcgccccccugaucaucagagagcccuucaucgccugcggccccaacgagugcaagcacuucgcccugacccacuacgccgcccagcccggcggcuacuacaacggcaccagaggcgacagaaacaagcugagacaccugaucagcgugaagcugggcaagauccccaccguggagaacagcaucuuccacauggccgccuggagcggcagcgccugccacgacggcaaggaguggaccuacaucggcguggacggccccgacaacaacgcccugcugaagaucaaguacggcgaggccuacaccgacaccuaccacagcuacgccaacaacauccugagaacccaggagagcgccugcaacugcaucggcggcaacugcuaccugaugaucaccgacggcagcgccagcggcgugagcgagugcagauuccugaagaucagagagggcagaaucaucaaggagaucuuccccaccggcagagugaagcacaccgaggagugcaccugcggcuucgccagcaacaagaccaucgagugcgccugcagagacaacagcuacaccgccaagagacccuucgugaagcugaacguggagaccgacaccgccgagaucagacugaugugcaccgacaccuaccuggacacccccagacccgacgacggcagcaucaccggccccugcgagagcaacggcgacaagggcagcggcggcaucaagggcggcuucgugcaccagagaauggccagcaaggugggcagaugguacagcagaaccaugagcaagaccgagagaaugggcaugggccuguacgugaaguacgacggcgaccccugggccgacagcgacgcccuggccuucggcggcgugauggugagcaugaaggagcccggcugguacagcuucggcuucgagaucaaggacaagaagugcgacgugcccugcaucggcaucgagauggugcacgacggcggcaaggagaccuggcacagcgccgccaccgccaucuacugccugaugggcagcggccagcugcugugggacaccgugaccggcguggacauggcccuguga

SEQ ID NO: 189380 - RNA, 1401 nt, Artificial Sequence
  derived and/or modified CDS sequence (opt4) from neuraminidase__InfluenzaB__AGX18350
augcugcccagcaccauccagacccugacccuguuccugaccagcggcggcgugcugcugagccuguacgugagcgccagccugagcuaccugcuguacagcgacauccugcugaaguucagccccaccgagaucaccgcccccaccaugccccuggacugcgccaacgccagcaacgugcaggccaugaacagaagcgccaccaagggcgugacccugcugcugcccgagcccgaguggaccuaccccagacugagcugccccggcagcaccuuccagaaggcccugcugaucagcccccacagauucggcgagaccaagggcaacagcgccccccugaucaucagagagcccuucaucgccugcggccccaacgagugcaagcacuucgcccugacccacuacgccgcccagcccggcggcuacuacaacggcaccagaggcgacagaaacaagcugagacaccugaucagcgugaagcugggcaagauccccaccguggagaacagcaucuuccacauggccgccuggagcggcagcgccugccacgacggcaaggaguggaccuacaucggcguggacggccccgacaacaacgcccugcugaagaucaaguacggcgaggccuacaccgacaccuaccacagcuacgccaacaacauccugagaacccaggagagcgccugcaacugcaucggcggcaacugcuaccugaugaucaccgacggcagcgccagcggcgugagcgagugcagauuccugaagaucagagagggcagaaucaucaaggagaucuuccccaccggcagagugaagcacaccgaggagugcaccugcggcuucgccagcaacaagaccaucgagugcgccugcagagacaacagcuacaccgccaagagacccuucgugaagcugaacguggagaucgacaccgccgagaucagacugaugugcaccgacaccuaccuggacacccccagacccgacgacggcagcaucaccggccccugcgagagcaacggcgacaagggcagcggcggcaucaagggcggcuucgugcaccagagaauggccagcaagaucggcagaugguacagcagaaccaugagcaagaccgagagaaugggcaugggccuguacgugaaguacgacggcgaccccugggccgacagcgacgcccuggccuucagcggcgugauggugagcaugaaggagcccggcugguacagcuucggcuucgagaucaaggacaagaagugcgacgugcccugcaucggcaucgagauggugcacgacggcggcaaggagaccuggcacagcgccgccaccgccaucuacugccugaugggcagcggccagcugcugugggacaccgugaccggcguggacauggcccuguga

SEQ ID NO: 189381 - RNA, 1401 nt, Artificial Sequence; identical to SEQ ID NO: 189346
  derived and/or modified CDS sequence (opt4) from neuraminidase__InfluenzaB__AGX18361

SEQ ID NO: 189382 - RNA, 1401 nt, Artificial Sequence
  derived and/or modified CDS sequence (opt4) from neuraminidase__InfluenzaB__AGX18383
augcugcccagcaccauccagacccugacccuguuccugaccagcggcggcgugcugcugagccuguacgugagcgccagccugagcuaccugcuguacagcgacauccugcugaaguucagccccaccgagaucaccgcccccaccaugccccuggacugcgccaacaccagcaacgugcaggccgugaacagaagcgccaccaagggcgugacccugcugcugcccgagcccgaguggaccuaccccagacugagcugccccggcagcaccuuccagaaggcccugcugaucagcccccacagauucggcgagaccaagggcaacagcgccccccugaucaucagagagcccuucaucgccugcggccccaacgagugcaagcacuucgcccugacccacuacgccgcccagcccggcggcuacuacaacggcaccagaggcgacagaaacaagcugagacaccugaucagcgugaagcugggcaagauccccaccguggagaacagcaucuuccacauggccgccuggagcggcagcgccugccacgacggcaaggaguggaccuacaucggcguggacggccccgacaacaacgcccugcugaagaucaaguacggcgaggccuacaccgacaccuaccacagcuacgccaacaacauccugagaacccaggagagcgccugcaacugcaucggcggcaacugcuaccugaugaucaccgacggcagcgccagcggcgugagcgagugcagauuccugaagaucagagagggcagaaucaucaaggagaucuuccccaccggcagagugaagcacaccgaggagugcaccugcggcuucgccagcaacaagaccaucgagugcgccugcagagacaacagcuacaccgccaagagacccuucgugaagcugaacauggagaccgacaccgccgagaucagacugaugugcaccgacaccuaccuggacacccccagacccgacgacggcagcaucaccggccccugcgagagcaacggcgacaagggcagcggcggcaucaagggcggcuucgugcaccagagaauggccagcaagaucggcagaugguacagcagaaccaugagcaagaccgagagaaugggcaugggccuguacgugaaguacgacggcgaccccugggccgacagcgacgcccugguguucagcggcgugauggugagcaugaaggagcccggcugguacagcuucggcuucgagaucaaggacaagaagugcgacgugcccugcaucggcaucgagauggugcacggcggcggcaaggagaccuggcacagcgccgccaccgccaucuacugccugaugggcagcggccagcugcugugggacaccgugaccggcguggacauggcccuguga

SEQ ID NO: 189383 - RNA, 1401 nt, Artificial Sequence; identical to SEQ ID NO: 188948
  derived and/or modified CDS sequence (opt4) from neuraminidase__InfluenzaB__AGX18394

SEQ ID NO: 189384 - RNA, 1401 nt, Artificial Sequence
  derived and/or modified CDS sequence (opt4) from neuraminidase__InfluenzaB__AGX18405
augcugcccagcaccauccagacccugacccuguuccugaccagcggcggcgugcugcugagccuguacgugagcgccagccugagcuaccugcuguacagcgacauccugcugaaguucagccccaccgagaucaccgcccccaccaugccccuggacugcgccaacgccagcaacgugcacgccgugaacagaagcgccaccaagggcgugaccccccugcugcccgagcccgaguggaccuaccccagacugagcugccccggcagcaccuuccagaaggcccugcugaucagcccccacagauucggcgagaccaagggcaacagcgccccccugaucaucagagagcccuucaucgccugcggccccaacgagugcaagcacuucgcccugacccacuacgccgcccagcccggcggcuacuacaacggcaccagaggcgacagaaacaagcugagacaccugaucagcgugaagcugggcaagauccccaccguggagaacagcaucuuccacauggccgccuggagcggcagcgccugccacgacggcaaggaguggaccuacaucggcguggacggccccgacaacaacgcccugcugaagaucaaguacggcgaggccuacaccgacaccuaccacagcuacgccaacaacauccugagaacccaggagagcgccugcaacugcaucggcggcaacugcuaccugaugaucaccgacggcagcgccagcggcgugagcgagugcagauuccugaagaucagagagggcagaaucaucaaggagaucuuccccaccggcagagugaagcacaccgaggagugcaccugcggcuucgccagcaacaagaccaucgagugcgugugcagagacaacagcuacaccgccaagagacccuucgugaagcugaacguggagaccgacaccgccgagaucagacugaugugcaccgacaccuaccuggacacccccagacccgacgacggcagcaucaccggccccugcgagagcaacggcgacaagggcagcggcggcaucaagggcggcuucgugcaccagagaauggccagcaagaucggcagaugguacagcagaaccaugagcaagaccgagagaaugggcaugggccuguacgugaaguacgacggcgaccccugggccgacagcgacgcccuggccuucagcggcgugauggugagcaugaaggagcccggcugguacagcuucggcuucgagaucaaggacaagaagugcgacgugcccugcaucggcaucgagauggugcacgacggcggcaaggagaccuggcacagcgccgccaccgccaucuacugccugaugggcagcggccagcugcugugggacaccgugaccggcguggacauggcccuguga

SEQ ID NO: 189385 - RNA, 1401 nt, Artificial Sequence
  derived and/or modified CDS sequence (opt4) from neuraminidase__InfluenzaB__AGX18416
augcugcccagcaccauccagacccugacccuguuccugaccagcggcggcgugcugcugagccuguacgugagcgccagccugagcuaccugcuguacagcgacauccugcugaaguucagccccaccgagaucaccgcccccaccaugccccuggacugcgccaacgccagcaacgugcaggccgugaacagaagcgccaccaagggcgugacccugcugcugcccgagcccgaguggaccuaccccagacugagcugccccggcagcaccuuccagaaggcccugcugaucagcccccacagauucggcgagaccaagggcaacagcgccccccugaucaucagagagcccuucaucgccugcggccccaacgagugcaagcacuucgcccugacccacuacgccgcccagcccggcggcuacuacaacggcaccagaggcgacagaaacaagcugagacaccugaucagcgugaagcugggcaagauccccaccguggagaacagcaucuuccacauggccgccuggagcggcagcgccugccacgacggcaaggaguggaccuacaucggcguggacggccccgacaacaacgcccugcugaagaucaaguacggcgaggccuacaccgacaccuaccacagcuacgccaacaacauccugagaacccaggagagcgccugcaacugcaucggcggcaacugcuaccugaugaucaccgacggcagcgccagcggcgugagcgagugcagauuccugaagaucagagagggcagaaucaucaaggagaucuuccccaccggcagagugaagcacaccgaggagugcaccugcggcuucgccagcaacaagaccaucgagugcgccugcagagacaacagcuacaccgccaagagacccuucgugaagcugaacguggagaucgacaccgccgagaucagacugaugugcaccgacaccuaccuggacacccccagacccgacgacggcagcaucaccggcagcugcgagagcaacggcgacaagggcagcggcggcaucaagggcggcuucgugcaccagagaauggccagcaagaucggcagaugguacagcagaaccaugagcaagaccgagagaaugggcaugggccuguacgugaaguacgacggcgaccccugggccgacagcgacgcccuggccuucagcggcgugauggugagcaugaaggagcccggcugguacagcuucggcuucgagaucaaggacaagaagugcgacgugcccugcaucggcaucgagauggugcacgacggcggcaaggagaccuggcacagcgccgccaccgccaucuacugccugaugggcagcggccagcugcugugggacaccgugaccggcguggacauggcccuguga

SEQ ID NO: 189386 - RNA, 1401 nt, Artificial Sequence
  derived and/or modified CDS sequence (opt4) from neuraminidase__InfluenzaB__AGX18428
augcugcccagcaccauccagacccugacccuguuccugaccagcggcggcgugcugcugagccuguacgugagcgccagccugagcuaccugcuguacagcgacauccugcugaaguucagcaccaccgagaucaccgcccccaccaugccccuggacugcgccaacgccagcaacgugcaggccgugaacagaagcgccaccaagggcgugacccugcugcugcccgagcccgaguggaccuaccccagacugagcugccccggcagcaccuuccagaaggcccugcugaucagcccccacagauucggcgagaccaagggcaacagcgccccccugaucaucagagagcccuucaucgccugcggccccaaggagugcaagcacuucgcccugacccacuacgccgcccagcccggcggcuacuacaacggcaccagagaggacagaaacaagcugagacaccugaucagcgugaagcugggcaagauccccaccguggagaacagcaucuuccacauggccgccuggagcggcagcgccugccacgacggcaaggaguggaccuacaucggcguggacggccccgacagcaacgcccugcugaagaucaaguacggcgaggccuacaccgacaccuaccacagcuacgccaacaacauccugagaacccaggagagcgccugcaacugcaucggcggcaacugcuaccugaugaucaccgacggcagcgccagcggcaucagcgagugcagauuccugaagaucagagagggcagaaucaucaaggagaucuuccccaccggcagagugaagcacaccgaggagugcaccugcggcuucgccagcaacaagaccaucgagugcgccugcagagacaacagcuacaccgccaagagacccuucgugaagcugaacguggagaccgacaccgccgagaucagacugaugugcaccgagaccuaccuggacacccccagacccgacgacggcagcaucaccggccccugcgagagcaacggcaacaagggcagcggcggcaucaagggcggcuucgugcaccagagaauggccagcaagaucggcagaugguacagcagaaccaugagcaagaccaagagaaugggcaugggccuguacgugaaguacgacggcgaccccuggaucgacagcgacgcccuggcccugagcggcgugauggugagcauggaggagcccggcugguacagcuucggcuucgagaucaaggacaagaagugcgacgugcccugcaucggcaucgagauggugcacgacggcggcaaggagaccuggcacagcgccgccaccgccaucuacugccugaugggcagcggccagcugcugugggacaccgugaccggcguggacauggcccuguga

SEQ ID NO: 189387 - RNA, 1401 nt, Artificial Sequence
  derived and/or modified CDS sequence (opt4) from neuraminidase__InfluenzaB__AGX18439
augcugcccagcaccauccagacccugacccuguuccugaccagcggcggcgugcugcugagccuguacgugagcgccagccugagcuaccugcuguacagcgacauccugcugaaguucagccccaccgagaucaccgcccccaccaugccccuggacugcgccaacgccagcaacgugcaggccgugaacagaagcgccaccaagggcgugacccugcugcugcccgagcccgaguggaccuaccccagacugagcugccccggcagcaccuuccagaaggcccugcugaucagcccccacagauucggcgagaccaagggcaacagcgccccccugaucaucagagagcccuucaucgccugcggccccaacgagugcaagcacuucgcccugacccacuacgccgcccagcccggcggcuacuacaacggcaccagaggcgacagaaacaagcugagacaccugaucagcgugaagcugggcaagauccccaccguggagaacagcaucuuccacauggccgccuggagcggcagcgccugccacgacggcaaggaguggaccuacaucggcguggacggccccgacaacaacgcccugcugaagaucaaguacggcgaggccuacaccgacaccuaccacagcuacgccaacaacauccugagaacccaggagagcgccugcaacugcaucggcggcaacugcuaccugaugaucaccgacggcagcgccagcggcgugagcgagugcagauuccugaagaucagagagggcagaaucaucaaggagaucuuccccaccggcagagugaagcacaccgaggagugcaccugcggcuucgccagcaacaagaccaucgagugcgccugcagagacaacagcuacaccgccaagagacccuucgugaagcugaacguggagaucgacaccgccgagaucagacugaugugcaccgacaccuaccuggacacccccagacccgacgacggcagcaucaccggccccugcgagagcaacggcgacaagggcagcggcggcaucaagggcggcuucgugcaccagagaauggccagcaagaucggcagaugguacagcagaaccaugagcaagaccgagagaaugggcaugggccuguacgugaaguacgacggcgaccccugggccgacagcgacgcccuggccuucagcggccugauggugagcaugaaggagcccggcugguacagcuucggcuucgagaucaaggacaagaagugcgacgugcccugcaucggcaucgagauggugcacgacggcggcaaggagaccuggcacagcgccgccaccgccaucuacugccugaugggcagcggccagcugcugugggacaccgugaccggcguggacauggcccuguga

SEQ ID NO: 189388 - RNA, 1401 nt, Artificial Sequence
  derived and/or modified CDS sequence (opt4) from neuraminidase__InfluenzaB__AGX18450
augcugcccagcaccauccagacccugacccuguuccugaccagcggcggcgugcugcugagccuguacgugagcgccagccugagcuaccugcuguacagcgacauccugcugaaguucagccccaccgagaucaccgccagcaccaugccccuggacugcgccaacgccagcaacgugcaggccgugaacagaagcgccaccaagggcgugacccugcugcugcccgagcccgaguggaccuaccccagacugagcugccccggcagcaccuuccagaaggcccugcugaucagcccccacagauucggcgagaccaagggcaacagcgccccccugaucaucagagagcccuucaucgccugcggccccaacgagugcaagcacuucgcccugacccacuacgccgcccagcccggcggcuacuacaacggcaccagaggcgacagaaacaagcugagacaccugaucagcgugaagcugggcaagauccccaccguggagaacagcaucuuccacauggccgccuggagcggcagcgccugccacgacggcaaggaguggaccuacaucggcguggacggccccgacaacaacgcccugcugaagaucaaguacggcgaggccuacaccgacaccuaccacagcuacgccaacaacauccugagaacccaggagagcgccugcaacugcaucggcggcaacugcuaccugaugaucaccgacggcagcgccagcggcgugagcgagugcagauuccugaagaucagagagggcagaaucaucaaggagaucuuccccaccggcagagugaagcacaccgaggagugcaccugcggcuucgccagcaacaagaccaucgagugcgccugcagagacaacagcuacaccgccaagagacccuucgugaagcugaacguggagaucgacaccgccgagaucagacugaugugcaccgacaccuaccuggacacccccagacccgacgacggcagcaucaccggccccugcgagagcaacggcgacaagggcagcggcggcaucaagggcggcuucgugcaccagagaauggccagcaagaucggcagaugguacagcagaaccaugagcaagaccgagagaaugggcaugggccuguacgugaaguacgacggcgaccccugggccgacagcgacgcccuggccuucagcggcgugauggugagcaugaaggagcccggcugguacagcuucggcuucgagaucaaggacaagaagugcgacgugcccugcaucggcaucgagauggugcacgacggcggcaaggagaccuggcacagcgccgccaccgccaucuacugccugaugggcagcggccagcugcugugggacaccgugaccggcguggacauggcccuguga

SEQ ID NO: 189389 - RNA, 1401 nt, Artificial Sequence; identical to SEQ ID NO: 188948
  derived and/or modified CDS sequence (opt4) from neuraminidase__InfluenzaB__AGX18461

SEQ ID NO: 189390 - RNA, 1401 nt, Artificial Sequence
  derived and/or modified CDS sequence (opt4) from neuraminidase__InfluenzaB__AGX18472
augcugcccagcaccauccagacccugacccuguuccugaccagcggcggcgugcugcugagccuguacgugagcgccagccugagcuaccugcuguacagcgacauccugcugaaguucagccccaccgagaucaccgcccccaccaugccccuggacugcgccaacgccagcaacgugcacgccgugaaccacagcgccaccaagggcgugaccccccugcugcccgagcccgaguggaccuaccccagacugagcugccccggcagcaccuuccagaaggcccugcugaucagcccccacagauucggcgagaccaagggcaacagcgccccccugaucaucagagagcccuucaucgccugcggccccaacgagugcaagcacuucgcccugacccacuacgccgcccagcccggcggcuacuacaacggcaccagaggcgacagaaacaagcugagacaccugaucagcgugaagcugggcaagauccccaccguggagaacagcaucuuccacauggccgccuggagcggcagcgccugccacgacggcaaggaguggaccuacaucggcguggacggccccgacaacaacgcccugcugaagaucaaguacggcgaggccuacaccgacaccuaccacagcuacgccaacaacauccugagaacccaggagagcgccugcaacugcaucggcggcaacugcuaccugaugaucaccgacggcagcgccagcggcgugagcgagugcagauuccugaagaucagagagggcagaaucaucaaggagaucuuccccaccggcagagugaagcacaccgaggagugcaccugcggcuucgccagcaacaagaccaucgagugcgccugcagagacaacagcuacaccgccaagagacccuucgugaagcugaacguggagaccgacaccgccgagaucagacugaugugcaccgacaccuaccuggacacccccagacccgacgacggcagcaucaccggccccugcgagagcaacggcgacaagggcagcggcggcaucaagggcggcuucgugcaccagagaauggccagcaagaucggcagaugguacagcagaaccaugagcaagaccgagagaaugggcaugggccuguacgugaaguacgacggcgaccccugggccgacagcgacgcccuggccuucagcggcgugauggugagcaugaaggagcccggcugguacagcuucggcuucgagaucaaggacaagaagugcgacgugcccugcaucggcaucgagauggugcacgacggcggcaaggagaccuggcacagcgccgccaccgccaucuacugccugaugggcagcggccagcugcugugggacaccgugaccggcguggacauggcccuguga

SEQ ID NO: 189391 - RNA, 1401 nt, Artificial Sequence; identical to SEQ ID NO: 188948
  derived and/or modified CDS sequence (opt4) from neuraminidase__InfluenzaB__AGX18483

SEQ ID NO: 189392 - RNA, 1401 nt, Artificial Sequence; identical to SEQ ID NO: 188695
  derived and/or modified CDS sequence (opt4) from neuraminidase__InfluenzaB__AGX18494

SEQ ID NO: 189393 - RNA, 1401 nt, Artificial Sequence
  derived and/or modified CDS sequence (opt4) from neuraminidase__InfluenzaB__AGX18505
augcugcccagcaccauccagacccugacccuguuccugaccagcggcggcgugcugcugagccuguacgugagcgccagccugagcuaccugcuguacagcgacauccugcugaaguucagccccaccgagaucaccgcccccaccaugccccuggacugcgccaacgccagcaacgugcaggccgugaacagaagcgccaccaagggcgugacccugcugcugcccgagcccgaguggaccuaccccagacugagcugccccggcagcaccuuccagaaggcccugcugaucagcccccacagauucggcgagaccaagggcaacagcgccccccugaucaucagagagcccuucaucgccugcggccccaacgagugcaagcacuucgcccugacccacuacgccgcccagcccggcggcuacuacaacggcaccagaggcgacagaaacaagcugagacaccugaucagcgugaagcugggcaagauccccaccguggagaacagcaucuuccacauggccgccuggagcggcagcgccugccacgacggcaaggaguggaccuacaucggcguggacggccccgacaacaacgcccugcugaagaucaaguacggcgaggccuacaccgacaccuaccacagcuacgccaacaagauccugagaacccaggagagcgccugcaacugcaucggcggcaacugcuaccugaugaucaccgacggcagcgccagcggcgugagcgagugcagauuccugaagaucagagagggcagaaucaucaaggagaucuuccccaccggcagagugaagcacaccgaggagugcaccugcggcuucgccagcaacaagaccaucgagugcgccugcagagacaacagcuacaccgccaagagacccuucgugaagcugaacguggagaccgacaccgccgagaucagacugaugugcaccgacaccuaccuggacacccccagacccgacgacggcagcaucaccggccccugcgagagcaacggcgacaagggcagcggcggcaucaagggcggcuucgugcaccagagaauggccagcaagaucggcagaugguacagcagaaccaucagcaagaccgagagaaugggcaugggccuguacgugaaguacgacggcgaccccugggccgacagcgacgcccuggccuucagcggcgugauggugagcaugaaggagcccggcugguacagcuucggcuucgagaucaaggacaagaagugcgacgugcccugcaucggcaucgagauggugcacgacggcggcaaggagaccuggcacagcgccgccaccgccaucuacugccugaugggcagcggccagcugcugugggacaccgugaccggcguggacauggcccuguga

SEQ ID NO: 189394 - RNA, 1401 nt, Artificial Sequence
  derived and/or modified CDS sequence (opt4) from neuraminidase__InfluenzaB__AGX18516
augcugcccagcaccauccagacccugacccuguuccugaccagcggcggcgugcugcugagccuguacgugagcgccagccugagcuaccugcuguacagcgacauccugcugaaguucagccccaccgagaucaccgcccccaccaugccccuggacugcgccaacgccagcaacgugcaggccgugaacagaagcgccaccaagggcgugacccugcugcugcccgagcccgaguggaccuaccccagacugagcugccccggcagcaccuuccagaaggcccugcugaucagcccccacagauucggcgagaccaagggcaacagcgccccccugaucaucagagagcccuucaucgccugcggccccaacgagugcaagcacuucgcccugacccacuacgccgcccagcccggcggcuacuacaacggcaccagaggcgacagaaacaagcugagacaccugaucagcgugaagcugggcaagauccccaccguggagaacagcaucuuccacauggccgccuggagcggcagcgccugccacgacggcaaggaguggaccuacaucggcguggacggccccgacaacaacgcccugcugaagaucaaguacggcgaggccuacaccgacaccuaccacagcuacgccaacaagauccugagaacccaggagagcgccugcaacugcaucggcggcaacugcuaccugaugaucaccgacggcagcgccagcggcgugagcgagugcagauuccugaagaucagagagggcagaaucaucaaggagaucuuccccaccggcagagugaagcacaccgaggagugcaccugcggcuucgccagcaacaagaccaucgagugcgccugcagagacaacagcuacaccgccaagagacccuucgugaagcugaacguggagaccgacaccgccgagaucagacugaugugcaccgacaccuaccuggacacccccagacccgacgacggcagcaucaccggccccugcgagagcaacggcgacaagggcagcggcggcaucaagggcggcuucgugcaccagagaauggccagcaagaucggcagaugguacagcagaaccaucagcaagaccgagagaaugggcaugggccuguacgugaaguacgacggcgaccccugggccgacagcgacgcccuggccuucagcggcgugauggugagcaugaaggagcccggcugguacagcuucggcuucgagaucaaggacaagaagugcgacgugcccugcaucggcaucgagauggugcacggcggcggcaaggagaccuggcacagcgccgccaccgccaucuacugccugaugggcagcggccagcugcugugggacaccgugaccggcguggacauggcccuguga

SEQ ID NO: 189395 - RNA, 1401 nt, Artificial Sequence; identical to SEQ ID NO: 188695
  derived and/or modified CDS sequence (opt4) from neuraminidase__InfluenzaB__AGX18527

SEQ ID NO: 189396 - RNA, 1401 nt, Artificial Sequence; identical to SEQ ID NO: 188695
  derived and/or modified CDS sequence (opt4) from neuraminidase__InfluenzaB__AGX18538

SEQ ID NO: 189397 - RNA, 1401 nt, Artificial Sequence; identical to SEQ ID NO: 188695
  derived and/or modified CDS sequence (opt4) from neuraminidase__InfluenzaB__AGX18549

SEQ ID NO: 189398 - RNA, 1401 nt, Artificial Sequence; identical to SEQ ID NO: 188695
  derived and/or modified CDS sequence (opt4) from neuraminidase__InfluenzaB__AGX18560

SEQ ID NO: 189399 - RNA, 1401 nt, Artificial Sequence; identical to SEQ ID NO: 188695
  derived and/or modified CDS sequence (opt4) from neuraminidase__InfluenzaB__AGX18571

SEQ ID NO: 189400 - RNA, 1401 nt, Artificial Sequence
  derived and/or modified CDS sequence (opt4) from neuraminidase__InfluenzaB__AGX18582
augcugcccagcaccauccagacccugacccuguuccugaccagcggcggcgugcugcugagccuguacgugcuggccagccugagcuaccugcuguacagcgacauccugcugaaguucagccccaccgagaucaccgcccccaccaugccccuggacugcgccaacgccagcaacgugcacgccgugaacagaagcgccaccaagggcgugacccugcugcugcccgagcccgagugggccuaccccagacugagcugccccggcagcaccuuccagaaggcccugcugaucagcccccacagauucggcgagaccaagggcaacagcgccccccugaucaucagagagcccuucaucgccugcggccccaacgagugcaagcacuucgcccugacccacuacgccgcccagcccggcggcuacuacaacggcaccagaggcgacagaaacaagcugagacaccugaucagcgugaagcugggcaagauccccaccguggagaacagcaucuuccacauggccgccuggagcggcagcgccugccacgacggcaaggaguggaccuacaucggcguggacggccccgacaacaacgcccugcugaagaucaaguacggcgaggccuacaccgacaccuaccacagcuacgccaacaacauccugagaacccaggagagcgccugcaacugcaucggcggcaacugcuaccugaugaucaccgacggcagcgccagcggcgugagcgagugcagauuccugaagaucagagagggcagaaucaucaaggagaucuuccccaccggcagagugaagcacaccgaggagugcaccugcggcuucgccagcaacaagaccaucgagugcgccugcagagacaacagcuacaccgccaagagacccuucgugaagcugaacguggagaccgacaccgccgagaucagacugaugugcaccgacaccuaccuggacacccccagacccgacgacggcagcaucaccggccccugcgagagcaacggcgacaagggcagcggcggcaucaagggcggcuucgugcaccagagaauggccagcaagaucggcagaugguacagcagaaccaugagcaagaccgagagaaugggcaugggccuguacgugaaguacgacggcgaccccugggccgacagcgacgcccuggccuucagcggcgugauggugagcaugaaggagcccggcugguacagcuucggcuucgagaucaaggacaagaagugcgacgugcccugcaucggcaucgagauggugcacgacggcggcaaggagaccuggcacagcgccgccaccgccaucuacugccugaugggcagcggccagcugcugugggacaccgugaccggcguggacauggcccuguga

SEQ ID NO: 189401 - RNA, 1401 nt, Artificial Sequence; identical to SEQ ID NO: 188695
  derived and/or modified CDS sequence (opt4) from neuraminidase__InfluenzaB__AGX18593

SEQ ID NO: 189402 - RNA, 1401 nt, Artificial Sequence; identical to SEQ ID NO: 188695
  derived and/or modified CDS sequence (opt4) from neuraminidase__InfluenzaB__AGX18604

SEQ ID NO: 189403 - RNA, 1401 nt, Artificial Sequence
  derived and/or modified CDS sequence (opt4) from neuraminidase__InfluenzaB__AGX18615
augcugcccagcaccauccagacccugacccuguuccugaccagcggcggcgugcugcugagccuguacgugagcgccagccugagcuaccugcuguacagcgacauccugcugaaguucagccccaccgagaucaccgcccccaccaugccccuggacugcgccaacgccagcaacgugcaggccgugaacagaagcgccaccaagggcgugacccugcugcugcccgagcccgaguggaccuaccccagacugagcugccccggcagcaccuuccagaaggcccugcugaucagcccccacagauucggcgagaccaagggcaacagcgccccccugaucaucagagagcccuucaucgccugcggccccaacgagugcaagcacuucgcccugacccacuacgccgcccagcccggcggcuacuacaacggcaccagaggcgacagaaacaagcugagacaccugaucagcgugaagcugggcaagauccccaccguggagaacagcaucuuccacauggccgccuggagcggcagcgccugccacgacggcaaggaguggaccuacaucggcguggacggccccgacaacaacgcccugcugaagaucaaguacggcgaggccuacaccgacaccuaccacagcuacgccaacaagauccugagaacccaggagagcgccugcaacugcaucggcggcaacugcuaccugaugaucaccgacggcagcgccagcggcgugagcgagugcagauuccugaagaucagagagggcagaaucaucaaggagaucuuccccaccggcagagugaagcacaccgaggagugcaccugcggcuucgccagcaacaagaccaucgagugcgccugcagagacaacagcuacaccgccaagagacccuucgugaagcugaacguggagaccgacaccgccgagaucagacugaugugcaccgacaccuaccuggacacccccagacccgacgacggcagcaucaccggccccugcgagagcaacggcaacaagggcagcggcggcaucaagggcggcuucgugcaccagagaauggccagcaagaucggcagaugguacagcagaaccaugagcaagaccgagagaaugggcaugggccuguacgugaaguacgacggcgaccccugggccgacagcgacgcccuggccuucagcggcgugauggugagcaugaaggagcccggcugguacagcuucggcuucgagaucaaggacaagaagugcgacgugcccugcaucggcaucgagauggugcacgacggcggcaaggagaccuggcacagcgccgccaccgccaucuacugccugaugggcagcggccagcugcugugggacaccgugaccggcguggacauggcccuguga

SEQ ID NO: 189404 - RNA, 1401 nt, Artificial Sequence
  derived and/or modified CDS sequence (opt4) from neuraminidase__InfluenzaB__AGX18626
augcugcccagcaccauccagacccugacccuguuccugaccagcggcggcgugcugcugagccuguacgugagcgccagccugagcuaccugcuguacagcgacauccugcugaaguucagccccaccgagaucaccgcccccaccaugccccuggacugcgccaacgccagcaacgugcaggccgugaacagaagcgccaccaagggcgugacccugcugcugcccgagcccgaguggaccuaccccagacugagcugccccggcagcaccuuccagaaggcccugcugaucagcccccacagauucggcgagaccaagggcaacagcgccccccugauccugagagagcccuucaucgccugcggccccaacgagugcaagcacuucgcccugacccacuacgccgcccagcccggcggcuacuacaacggcaccagaggcgacagaaacaagcugagacaccugaucagcgugaagcugggcaagauccccaccguggagaacagcaucuuccacauggccgccuggagcggcagcgccugccacgacggcaaggaguggaccuacaucggcguggacggccccgacaacaacgcccugcugaagaucaaguacggcgaggccuacaccgacaccuaccacagcuacgccaacaagauccugagaacccaggagagcgccugcaacugcaucggcggcaacugcuaccugaugaucaccgacggcagcgccagcggcgugagcgagugcagauuccugaagaucagagagggcagaaucaucaaggagaucuuccccaccggcagagugaagcacaccgaggagugcaccugcggcuucgccagcaacaagaccaucgagugcgccugcagagacaacagcuacaccgccaagagacccuucgugaagcugaacguggagaccgacaccgccgagaucagacugaugugcaccgacaccuaccuggacacccccagacccgacgacggcagcaucaccggccccugcgagagcaacggcgacaagggcagcggcggcaucaagggcggcuucgugcaccagagaauggccagcaagaucggcagaugguacagcagaaccaugagcaagaccgagagaaugggcaugggccuguacgugaaguacgacggcgaccccugggccgacagcgacgcccuggccuucagcggcgugauggugagcaugaaggagcccggcugguacagcuucggcuucgagaucaaggacaagaagugcgacgugcccugcaucggcaucgagauggugcacgacggcggcaaggagaccuggcacagcgccgccaccgccaucuacugccugaugggcagcggccagcugcugugggacaccgugaccggcguggacauggcccuguga

SEQ ID NO: 189405 - RNA, 1401 nt, Artificial Sequence; identical to SEQ ID NO: 188695
  derived and/or modified CDS sequence (opt4) from neuraminidase__InfluenzaB__AGX18637

SEQ ID NO: 189406 - RNA, 1401 nt, Artificial Sequence; identical to SEQ ID NO: 188695
  derived and/or modified CDS sequence (opt4) from neuraminidase__InfluenzaB__AGX18648

SEQ ID NO: 189407 - RNA, 1401 nt, Artificial Sequence; identical to SEQ ID NO: 188695
  derived and/or modified CDS sequence (opt4) from neuraminidase__InfluenzaB__AGX18659

SEQ ID NO: 189408 - RNA, 1401 nt, Artificial Sequence; identical to SEQ ID NO: 188695
  derived and/or modified CDS sequence (opt4) from neuraminidase__InfluenzaB__AGX18670

SEQ ID NO: 189409 - RNA, 1401 nt, Artificial Sequence
  derived and/or modified CDS sequence (opt4) from neuraminidase__InfluenzaB__AGX18681
augcugcccagcaccauccagacccugacccuguuccugaccagcggcggcgugcugcugagccuguacgugagcgccagccugagcuaccugcuguacagcgacauccugcugaaguucagccccaccgagaucaccgcccccaccaugccccuggacugcgccaacgccagcaacgugcaggccgugaacagaagcgccaccaagggcgugacccugcugcugcccgagcccgaguggaccuaccccagacugagcugccccggcagcaccuuccagaaggcccugcugaucagcccccacagauucggcgagaccaagggcaacagcgccccccugaucgugagagagcccuucaucgccugcggccccaacgagugcaagcacuucgcccugacccacuacgccgcccagcccggcggcuacuacaacggcaccagaggcgacagaaacaagcugagacaccugaucagcgugaagcugggcaagauccccaccguggagaacagcaucuuccacauggccgccuggagcggcagcgccugccacgacggcaaggaguggaccuacaucggcguggacggccccgacaacaacgcccugcugaagaucaaguacggcgaggccuacaccgacaccuaccacagcuacgccaacaagauccugagaacccaggagagcgccugcaacugcaucggcggcaacugcuaccugaugaucaccgacggcagcgccagcggcgugagcgagugcagauuccugaagaucagagagggcagaaucaucaaggagaucuuccccaccggcagagugaagcacaccgaggagugcaccugcggcuucgccagcaacaagaccaucgagugcgccugcagagacaacagcuacaccgccaagagacccuucgugaagcugaacguggagaccgacaccgccgagaucagacugaugugcaccgacaccuaccuggacacccccagacccgacgacggcagcaucaccggccccugcgagagcaacggcgacaagggcagcggcggcaucaagggcggcuucgugcaccagagaauggccagcaagaucggcagaugguacagcagaaccaugagcaagaccgagagaaugggcaugggccuguacgugaaguacgacggcgaccccugggccgacagcgacgcccuggccuucagcggcgugauggugagcaugaaggagcccggcugguacagcuucggcuucgagaucaaggacaagaagugcgacgugcccugcaucggcaucgagauggugcacgacggcggcaaggagaccuggcacagcgccgccaccgccaucuacugccugaugggcagcggccagcugcugugggacaccgugaccggcguggacauggcccuguga

SEQ ID NO: 189410 - RNA, 1401 nt, Artificial Sequence; identical to SEQ ID NO: 188695
  derived and/or modified CDS sequence (opt4) from neuraminidase__InfluenzaB__AGX18692

SEQ ID NO: 189411 - RNA, 1401 nt, Artificial Sequence
  derived and/or modified CDS sequence (opt4) from neuraminidase__InfluenzaB__AGX18703
augcugcccagcaccauccagacccugacccuguuccugaccagcggcggcgugcugcugagccuguacgugagcgccagccugagcuaccugcuguacagcgacauccugcugaaguuccccagcaccgagaucaccgcccccaccaugccccuggacugcgccaacgccagcaacgugcaggccgugaaccugagcgccaccaagggcgugacccugcugcugcccgagcccgaguggaccuaccccagacugagcugccccggcagcaccuuccagaaggcccugcugaucagcccccacagauucggcgagaccaagggcaacagcgccccccugaucaucagagagcccuucaucgccugcggccccaaggagugcaagcacuucgcccugacccacuacgccgcccagcccggcggcuacuacaacggcaccagaggcgacagaaacaagcugagacaccugaucagcgugaagcugggcaagauccccaccguggagaacagcaucuuccacauggccgccuggagcggcagcgccugccacgacggcaaggaguggaccuacaucggcguggacggccccgacaacaacgcccugcugaagaucaaguacggcgaggccuacaccgacaccuaccacagcuacgccaacaacauccugagaacccaggagagcgccugcaacugcaucggcggcaacugcuaccugaugaucaccgacggcagcgccagcggcgugagcgagugcagauuccugaagaucagagagggcagaaucaucaaggagaucuuccccaccggcagaaucaagcacaccgaggagugcaccugcggcuucgccagcaacaagaccaucgagugcgccugcagagacaacagcuacaccgccaagagacccuucgugaagcugaacguggagaccgacaccgccgagaucagacugaugugcaccgagaccuaccuggacacccccagacccgacgacggcagcaucaccggccccugcgagagcaacggcgacaagggcagcggcggcaucaagggcggcuucgugcaccagagaauggccagcaagaucggcagaugguacagcagaaccaugagcaagaccgagagaaugggcaugggccuguacgugaaguacgacggcgaccccugggccgacagcgacgcccuggccuucagcggcgugauggugagcauggaggagcccggcugguacagcuucggcuucgagaucaaggacaagaagugcgacgugcccugcaucggcaucgagauggugcacgacggcggcaaggagaccuggcacagcgccgccaccgccaucuacugccugaugggcagcggccagcugcugugggacaccgugaccggcgugaacauggcccuguga

SEQ ID NO: 189412 - RNA, 1401 nt, Artificial Sequence; identical to SEQ ID NO: 188695
  derived and/or modified CDS sequence (opt4) from neuraminidase__InfluenzaB__AGX18714

SEQ ID NO: 189413 - RNA, 1401 nt, Artificial Sequence; identical to SEQ ID NO: 188695
  derived and/or modified CDS sequence (opt4) from neuraminidase__InfluenzaB__AGX18725

SEQ ID NO: 189414 - RNA, 1401 nt, Artificial Sequence
  derived and/or modified CDS sequence (opt4) from neuraminidase__InfluenzaB__AGX18736
augcugcccagcaccauccagacccugacccuguuccugaccagcggcggcgugcugcugagccuguacgugagcgccagccugagcuaccugcuguacagcgacauccugcugaaguucagccccaccgagaucaccgcccccaccaugccccuggacugcgccaacgccagcaacgugcaggccgugaacagaagcgccaccaagggcgugacccugcugcugcccgagcccgaguggaccuaccccagacugagcugccccggcagcaccuuccagaaggcccugcugaucagcccccacagauucggcgagaccaagggcaacagcgccccccugaucaucagagagcccuucaucgccugcggccccaacgagugcaagcacuucgcccugacccacuacgccgcccagcccggcggcuacuacaacggcaccggcggcgacagaaacaagcugagacaccugaucagcgugaagcugggcaagauccccaccguggagaacagcaucuuccacauggccgccuggagcggcagcgccugccacgacggcaaggaguggaccuacaucggcguggacggccccgacaacaacgcccugcugaagaucaaguacggcgaggccuacaccgacaccuaccacagcuacgccaacaagauccugagaacccaggagagcgccugcaacugcaucggcggcaacugcuaccugaugaucaccgacggcagcgccagcggcgugagcgagugcagauuccugaagaucagagagggcagaaucaucaaggagaucuuccccaccggcagagugaagcacaccgaggagugcaccugcggcuucgccagcaacaagaccaucgagugcgccugcagagacaacagcuacaccgccaagagacccuucgugaagcugaacguggagaccgacaccgccgagaucagacugaugugcaccgacaccuaccuggacacccccagacccgacgacggcagcaucaccggccccugcgagagcaacggcgacaagggcagcggcggcaucaagggcggcuucgugcaccagagaauggccagcaagaucggcagaugguacagcagaaccaugagcaagaccgagagaaugggcaugggccuguacgugaaguacgacggcgaccccugggccgacagcgacgcccuggccuucagcggcgugauggugagcaugaaggagcccggcugguacagcuucggcuucgagaucaaggacaagaagugcgacgugcccugcaucggcaucgagauggugcacgacggcggcaaggagaccuggcacagcgccgccaccgccaucuacugccugaugggcagcggccagcugcugugggacaccgugaccggcguggacauggcccuguga

SEQ ID NO: 189415 - RNA, 1401 nt, Artificial Sequence; identical to SEQ ID NO: 188695
  derived and/or modified CDS sequence (opt4) from neuraminidase__InfluenzaB__AGX18758

SEQ ID NO: 189416 - RNA, 1401 nt, Artificial Sequence; identical to SEQ ID NO: 188695
  derived and/or modified CDS sequence (opt4) from neuraminidase__InfluenzaB__AGX18769

SEQ ID NO: 189417 - RNA, 1401 nt, Artificial Sequence; identical to SEQ ID NO: 189154
  derived and/or modified CDS sequence (opt4) from neuraminidase__InfluenzaB__AGX18780

SEQ ID NO: 189418 - RNA, 1401 nt, Artificial Sequence; identical to SEQ ID NO: 188695
  derived and/or modified CDS sequence (opt4) from neuraminidase__InfluenzaB__AGX18791

SEQ ID NO: 189419 - RNA, 1401 nt, Artificial Sequence; identical to SEQ ID NO: 188695
  derived and/or modified CDS sequence (opt4) from neuraminidase__InfluenzaB__AGX18802

SEQ ID NO: 189420 - RNA, 1401 nt, Artificial Sequence
  derived and/or modified CDS sequence (opt4) from neuraminidase__InfluenzaB__AGX18813
augcugcccagcaccauccagacccugacccuguuccugaccagcggcggcgugcugcugagccuguacgugagcgccagccugagcuaccugcuguacagcgacauccugcugaaguuccccagcaccgagaucaccgcccccaccaugccccuggacugcgccaacgccagcaacgugcaggccgugaacagaagcgccaccaagggcgugacccugcugcugcccgagcccgaguggaccuaccccagacugagcugccccggcagcaccuuccagaaggcccugcugaucagcccccacagauucggcgagaccaagggcaacagcgccccccugaucaucagagagcccuucaucgccugcggccccaaggagugcaagcacuucgcccugacccacuacgccgcccagcccggcggcuacuacaacggcaccagaggcgacagaaacaagcugagacaccugaucagcgugaagcugggcaagauccccaccguggagaacagcaucuuccacauggccgccuggagcggcagcgccugccacgacggcaaggaguggaccuacaucggcguggacggccccgacaacaacgcccugcugaagaucaaguacggcgaggccuacaccgacaccuaccacagcuacgccaacaacauccugagaacccaggagagcgccugcaacugcaucggcggcaacugcuaccugaugaucaccgacggcagcgccagcggcgugagcgagugcagauuccugaagaucagagagggcagaaucaucaaggagaucuuccccaccggcagaaucaagcacaccgaggagugcaccugcggcuucgccagcaacaagaccaucgagugcgccugcagagacaacagcuacaccgccaagagacccuucgugaagcugaacguggagaccgacaccgccgagaucagacugaugugcaccgagaccuaccuggacacccccagacccgacgacggcagcaucaccggccccugcgagagcaacggcgacaagggcagcggcggcaucaagggcggcuucgugcaccagagaauggccagcaagaucggcagaugguacagcagaaccaugagcaagaccgagagaaugggcaugggccuguacgugaaguacgacggcgaccccugggccgacagcgacgcccugguguucagcggcgugauggugagcauggaggagcccggcugguacagcuucggcuucgagaucaaggacaagaagugcgacgugcccugcaucggcaucgagauggugcacgacggcggcaaggagaccuggcacagcgccgccaccgccaucuacugccugaugggcagcggccagcugcugugggacaccgugaccggcgugaacauggcccuguga

SEQ ID NO: 189421 - RNA, 1401 nt, Artificial Sequence; identical to SEQ ID NO: 189154
  derived and/or modified CDS sequence (opt4) from neuraminidase__InfluenzaB__AGX18824

SEQ ID NO: 189422 - RNA, 1401 nt, Artificial Sequence
  derived and/or modified CDS sequence (opt4) from neuraminidase__InfluenzaB__AGX18846
augcugcccagcaccauccagacccugacccuguuccugaccagcggcggcgugcugcugagccuguacgugagcgccagccugagcuaccugcuguacagcgacauccugcugaaguucagccccaccgagaucaccgcccccaccaugccccuggacugcgccaacgccagcaacgugcaggccgugaacagaagcgccaccaagggcgugacccugcugcugagcgagcccgaguggaccuaccccagacugagcugccccggcagcaccuuccagaaggcccugcugaucagcccccacagauucggcgagaccaagggcaacagcgccccccugaucaucagagagcccuucaucgccugcggccccaacgagugcaagcacuucgcccugacccacuacgccgcccagcccggcggcuacuacaacggcaccagaggcgacagaaacaagcugagacaccugaucagcgugaagcugggcaagauccccaccguggagaacagcaucuuccacauggccgccuggagcggcagcgccugccacgacggcaaggaguggaccuacaucggcguggacggccccgacaacaacgcccugcugaagaucaaguacggcgaggccuacaccgacaccuaccacagcuacgccaacaagauccugagaacccaggagagcgccugcaacugcaucggcggcaacugcuaccugaugaucaccgacggcagcgccagcggcgugagcgagugcagauuccugaagaucagagagggcagaaucaucaaggagaucuuccccaccggcagagugaagcacaccgaggagugcaccugcggcuucgccagcaacaagaccaucgagugcgccugcagagacaacagcuacaccgccaagagacccuucgugaagcugaacguggagaccgacaccgccgagaucagacugaugugcaccgacaccuaccuggacacccccagacccgacgacggcagcaucaccggccccugcgagagcaacggcgacaagggcagcggcggcaucaagggcggcuucgugcaccagagaauggccagcaagaucggcagaugguacagcagaaccaugagcaagaccgagagaaugggcaugggccuguacgugaaguacgacggcgaccccugggccgacagcgacgcccuggccuucagcggcgugauggugagcaugaaggagcccggcugguacagcuucggcuucgagaucaaggacaagaagugcgacgugcccugcaucggcaucgagauggugcacgacggcggcaaggagaccuggcacagcgccgccaccgccaucuacugccugaugggcagcggccagcugcugugggacaccgugaccggcguggacauggcccuguga

SEQ ID NO: 189423 - RNA, 1401 nt, Artificial Sequence; identical to SEQ ID NO: 188695
  derived and/or modified CDS sequence (opt4) from neuraminidase__InfluenzaB__AGX18857

SEQ ID NO: 189424 - RNA, 1401 nt, Artificial Sequence; identical to SEQ ID NO: 189422
  derived and/or modified CDS sequence (opt4) from neuraminidase__InfluenzaB__AGX18868

SEQ ID NO: 189425 - RNA, 1401 nt, Artificial Sequence; identical to SEQ ID NO: 189422
  derived and/or modified CDS sequence (opt4) from neuraminidase__InfluenzaB__AGX18879

SEQ ID NO: 189426 - RNA, 1401 nt, Artificial Sequence
  derived and/or modified CDS sequence (opt4) from neuraminidase__InfluenzaB__AGX18890
augcugcccagcaccauccagacccugacccuguuccugaccagcggcggcgugcugcugagccuguacgugagcgccagccugagcuaccugcuguacagcgacauccugcugaaguuccccagcaccgagaucaccgcccccaccaugccccuggacugcgccaacgccagcaacgugcaggccgugaacagaagcgccaccaagggcgugacccugcugcugcccgagcccgaguggaccuaccccagacugagcugccccggcagcaccuuccagaaggcccugcugaucagcccccacagauucggcgagaccaagggcaacagcgccccccugaucaucagagagcccuucaucgccugcggccccaaggagugcaagcacuucgcccugacccacuacgccgcccagcccggcggcuacuacaacggcaccagaggcgacagaaacaagcugagacaccugaucagcgugaagcugggcaagauccccaccguggagaacagcaucuuccacauggccgccuggagcggcagcgccugccacgacggcaaggaguggaccuacaucggcguggacggccccgacaacaacgcccugcugaagaucaaguacggcgaggccuacaccgacaccuaccacagcuacgccaacaacauccugagaacccaggagagcgccugcaacugcaucggcggcaacugcuaccugaugaucaccgacggcagcgccagcggcgugagcgagugcagauuccugaagaucagagagggcagaaucaucaaggagaucuuccccaccggcagaaucaagcacaccgaggagugcaccugcggcuucgccagcaacaagaccaucgagugcgccugcagagacaacagcuacaccgccaagagacccuucgugaagcugaacguggagaccgacaccgccgagaucagacugaugugcaccgagaccuaccuggacacccccagacccgacgacggcagcaucaccggccccugcgagagcaacggcgacaagggcagcggcggcaucaagggcggcuucgugcaccagagaauggccagcaagaucggcagaugguacagcagaaccaugagcaagaccgagagaaugggcaugggccuguacgugaaguacgacggcgaccccugggccgacagcgacgcccuggccuucagcggcgugauggugagcauggaggagcccggcugguacagcuucggcuucgagaucaaggacaagaagugcgacgugcccugcaucggcaucgagauggugcacgacggcggcaaggagaccuggcacagcgccgccaccaccaucuacugccugaugggcagcggccagcugcugugggacaccgugaccggcgugaacauggcccuguga

SEQ ID NO: 189427 - RNA, 1401 nt, Artificial Sequence; identical to SEQ ID NO: 188695
  derived and/or modified CDS sequence (opt4) from neuraminidase__InfluenzaB__AGX18912

SEQ ID NO: 189428 - RNA, 1401 nt, Artificial Sequence
  derived and/or modified CDS sequence (opt4) from neuraminidase__InfluenzaB__AGX18923
augcugcccagcaccauccagacccugacccuguuccugaccagcggcggcgugcugcugagccuguacgugagcgccagccugagcuaccugcuguacagcgacauccugcugaaguucagccccaccgagaucaccgcccccaccaugccccuggacugcgccaacgccagcaacgugcaggccgugaacagaagcgccaccaagggcgugacccugcugcugcccgagcccgaguggaccuaccccagacugagcugccccggcagcaccuuccagaaggcccugcugaucagcccccacagauucggcgagaccaagggcaacagcgccccccugaucaucagagagcccuucaucgccugcggccccaacgagugcaagcacuucgcccugacccacuacgccgcccagcccggcggcuacuacaacagaaccagaggcgacagaaacaagcugagacaccugaucagcgugaagcugggcaagauccccaccguggagaacagcaucuuccacauggccgccuggagcggcagcgccugccacgacggcaaggaguggaucuacaucggcguggacggccccgacaacaacgcccugcugaagaucaaguacggcgaggccuacaccgacaccuaccacagcuacgccaacaagauccugagaacccaggagagcgccugcaacugcaucggcggcaacugcuaccugaugaucaccgacggcagcgccagcggcgugagcgagugcagauuccugaagaucagagagggcagaaucaucaaggagaucuuccccaccggcagagugaagcacaccgaggagugcaccugcggcuucgccagcaacaagaccaucgagugcgccugcagagacaacagcuacaccgccaagagacccuucgugaagcugaacguggagaccgacaccgccgagaucagacugaugugcaccgacaccuaccuggacacccccagacccgacgacggcagcaucaccggccccugcgagagcaacggcgacaagggcagcggcggcaucaagggcggcuucgugcaccagagaauggccagcaagaucggcagaugguacagcagaaccaugagcaagaccgagagaaugggcaugggccuguacgugaaguacgacggcgaccccugggccgacagcgacgcccuggccuucagcggcgugauggugagcaugaaggagcccggcugguacagcuucggcuucgagaucaaggacaagaagugcgacgugcccugcaucggcaucgagauggugcacgacggcggcaaggagaccuggcacagcgccgccaccgccaucuacugccugaugggcagcggccagcugcugugggacaccgugaccggcguggacauggcccuguga

SEQ ID NO: 189429 - RNA, 1401 nt, Artificial Sequence; identical to SEQ ID NO: 188695
  derived and/or modified CDS sequence (opt4) from neuraminidase__InfluenzaB__AGX18934

SEQ ID NO: 189430 - RNA, 1401 nt, Artificial Sequence
  derived and/or modified CDS sequence (opt4) from neuraminidase__InfluenzaB__AGX18956
augcugcccagcaccauccagacccugacccuguuccugaccagcggcggcgugcugcugagccuguacgugagcgccagccugagcuaccugcuguacagcgacauccugcugaaguucagccccaccgagaucaccgcccccaccaugccccuggacugcgccaacgccagcaacgugcaggccgugaacagaagcgccaccaagggcgugacccugcugcugcccgagcccgaguggaccuaccccagacugagcugccccggcagcaccuuccagaaggcccugcugaucagcccccacagauucggcgagaccaagggcaacagcgccccccugaucaucagagagcccuucaucgccugcggccccaacgagugcaagcacuucgcccugacccacuacgccgcccagcccggcggcuacuacaacggcaccagaggcgacagaaacaagcugagacaccugaucagcgugaagcugggcaagauccccaccguggagaacagcaucuuccacguggccgccuggagcggcagcgccugccacgacggcaaggaguggaccuacaucggcguggacggccccgacaacaacgcccugcugaagaucaaguacggcgaggccuacaccgacaccuaccacagcuacgccaacaagauccugagaacccaggagagcgccugcaacugcaucggcggcaacugcuaccugaugaucaccgacggcagcgccagcggcgugagcgagugcagauuccugaagaucagagagggcagaaucaucaaggagaucuuccccaccggcagagugaagcacaccgaggagugcaccugcggcuucgccagcaacaagaccaucgagugcgccugcagagacaacagcuacaccgccaagagacccuucgugaagcugaacguggagaccgacaccgccgagaucagacugaugugcaccgacaccuaccuggacacccccagacccgacgacggcagcaucaccggccccugcgagagcaacggcgacaagggcagcggcggcaucaagggcggcuucgugcaccagagaauggccagcaagaucggcagaugguacagcagaaccaugagcaagaccgagagaaugggcaugggccuguacgugaaguacgacggcgaccccugggccgacagcgacgcccuggccuucagcggcgugauggugagcaugaaggagcccggcugguacagcuucggcuucgagaucaaggacaagaagugcgacgugcccugcaucggcaucgagauggugcacgacggcggcaaggagaccuggcacagcgccgccaccgccaucuacugccugaugggcagcggccagcugcugugggacaccgugaccggcguggacauggcccuguga

SEQ ID NO: 189431 - RNA, 1401 nt, Artificial Sequence
  derived and/or modified CDS sequence (opt4) from neuraminidase__InfluenzaB__AGX18967
augcugcccagcaccauccagacccugacccuguuccugaccagcggcggcgugcugcugagccuguacgugagcgccagccugagcuaccugcuguacagcgacauccugcugaaguucagccccaccgagaucaccgcccccaccaugccccuggacugcgccaacgccagcaacgugcaggccgugaacagaagcgccaccaagggcgugaccccccugcugcccgagcccgaguggaccuaccccagacugagcugccccggcagcaccuuccagaaggcccugcugaucagcccccacagauucggcgagaccaagggcaacagcgccccccugaucaucagagagcccuucaucgccugcggccccaacgagugcaagcacuucgcccugacccacuacgccgcccagcccggcggcuacuacaacggcaccagaggcgacagaaacaagcugagacaccugaucagcgugaagcugggcaagauccccaccguggagaacagcaucuuccacauggccgccuggagcggcagcgccugccacgacggcaaggaguggaccuacaucggcguggacggccccgacaacaacgcccugcugaagaucaaguacggcgaggccuacaccgacaccuaccacagcuacgccaacaagauccugagaacccaggagagcgccugcaacugcaucggcggcaacugcuaccugaugaucaccgacggcagcgccagcggcgugagcgagugcagauuccugaagaucagagagggcagaaucaucaaggagaucuuccccaccggcagagugaagcacaccgaggagugcaccugcggcuucgccagcaacaagaccaucgagugcgccugcagagacaacagcuacaccgccaagagacccuucgugaagcugaacguggagaccgacaccgccgagaucagacugaugugcaccgacaccuaccuggacacccccagacccgacgacggcagcaucaccggccccugcgagagcaacggcgacaagggcagcggcggcaucaagggcggcuucgugcaccagagaauggccagcaagaucggcagaugguacagcagaaccaugagcaagaccgagagaaugggcaugggccuguacgugaaguacgacggcgaccccugggccgacagcgacgcccuggccuucagcggcgugauggugagcaugaaggagcccggcugguacagcuucggcuucgagaucaaggacaagaagugcgacgugcccugcaucggcaucgagauggugcacgacggcggcaaggagaccuggcacagcgccgccaccgccaucuacugccugaugggcagcggccagcugcugugggacaccgugaccggcguggacauggcccuguga

SEQ ID NO: 189432 - RNA, 1401 nt, Artificial Sequence; identical to SEQ ID NO: 189154
  derived and/or modified CDS sequence (opt4) from neuraminidase__InfluenzaB__AGX18978

SEQ ID NO: 189433 - RNA, 1401 nt, Artificial Sequence
  derived and/or modified CDS sequence (opt4) from neuraminidase__InfluenzaB__AGX18989
augcugcccagcaccauccagacccugacccuguuccugaccagcggcggcgugcugcugagccuguacgugagcgccagccugagcuaccugcuguacagcgacauccugcugaaguucagccccaccgagaucaccgcccccaccaugccccuggacuacgccaacgccagcaacgugcaggccgugaacagaagcgccaccaagggcgugacccugcugcugcccgagcccgaguggaccuaccccagacugagcugccccggcagcaccuuccagaaggcccugcugaucagcccccacagauucggcgagaccaagggcaacagcgccccccugaucaucagagagcccuucaucgccugcggccccaacgagugcaagcacuucgcccugacccacuacgccgcccagcccggcggcuacuacaacggcaccagaggcgacagaaacaagcugagacaccugaucagcgugaagcugggcaagauccccaccguggagaacagcaucuuccacauggccgccuggagcggcagcgccugccacgacggcaaggaguggaccuacaucggcguggacggccccgacaacaacgcccugcugaagaucaaguacggcgaggccuacaccgacaccuaccacagcuacgccaacaagauccugagaacccaggagagcgccugcaacugcaucggcggcaacugcuaccugaugaucaccgacggcagcgccagcggcgugagcgagugcagauuccugaagaucagagagggcagaaucaccaaggagaucuuccccaccggcagagugaagcacaccgaggagugcaccugcggcuucgccagcaacaagaccaucgagugcgccugcagagacaacagcuacaccgccaagagacccuucgugaagcugaacguggagaccgacaccgccgagaucagacugaugugcaccgacaccuaccuggacacccccagacccgacgacggcagcaucaccggccccugcgagagcaacggcgacaagggcagcggcggcaucaagggcggcuucgugcaccagagaauggccagcaagaucggcagaugguacagcagaaccaugagcaagaccgagagaaugggcaugggccuguacgugaaguacgacggcgaccccugggccgacagcgacgcccuggccuucagcggcgugauggugagcaugaaggagcccggcugguacagcuucggcuucgagaucaaggacaagaagugcgacgugcccugcaucggcaucgagauggugcacgacggcggcaaggagaccuggcacagcgccgccaccgccaucuacugccugaugggcagcggccagcugcugugggacaccgugaccggcguggacauggcccuguga

SEQ ID NO: 189434 - RNA, 1401 nt, Artificial Sequence
  derived and/or modified CDS sequence (opt4) from neuraminidase__InfluenzaB__AGX19000
augcugcccagcaccauccagacccugacccuguuccugaccagcggcggcgugcugcugagccuguacgugagcgccagccugagcuaccugcuguacagcgacauccugcugaaguucagccccaccgagaucaccgcccccaccaugccccuggacugcgccaacgccagcaacgugcacgccgugaacagaagcgccaccaagggcgugacccugcugcugcccgagcccgaguggaccuaccccagacugagcugccccggcagcaccuuccagaaggcccugcugaucagcccccacagauucggcgagaccaagggcaacagcgccccccugaucaucagagagcccuucaucgccugcggccccaacgagugcaagcacuucgcccugaccuacuacgccgcccagcccggcggcuacuacaacggcaccagaggcgacagaaacaagcugagacaccugaucagcgugaagcugggcaagauccccaccguggagaacagcaucuuccacauggccgccuggagcggcagcgccugccacgacggcaaggaguggaccuacaucggcguggacggccccgacaacaacgcccugcugaagaucaaguacggcgaggccuacaccgacaccuaccacagcuacgccaacaacauccugagaacccaggagagcgccugcaacugcaucggcggcaacugcuaccugaugaucaccgacggcagcgccagcggcgugagcgagugcagauuccugaagaucagagagggcagaaucaucaaggagaucuuccccaccggcagagugaagcacaccgaggagugcaccugcggcuucgccagcaacaagaccaucgagugcgccugcagagacaacagcuacaccgccaagagacccuucgugaagcugaacguggagaccgacaccgccgagaucagacugaugugcaccgacaccuaccuggacacccccagacccgacgacggcagcaucaccggccccugcgagagcaacggcgacaagggcagcggcggcaucaagggcggcuucgugcaccagagaauggccagcaagaucggcagaugguacagcagaaccaugagcaagaccgagagaaugggcaugggccuguacgugaaguacgacggcgaccccugggccgacagcgacgcccuggccuucagcggcgugauggugagcaugaaggagcccggcugguacagcuucggcuucgagaucaaggacaagaagugcgacgugcccugcaucggcaucgagauggugcacgacggcggcaaggagaccuggcacagcgccgccaccgccaucuacugccugaugggcagcggccagcugcugugggacaccgugaccggcguggacauggcccuguga

SEQ ID NO: 189435 - RNA, 1401 nt, Artificial Sequence; identical to SEQ ID NO: 188695
  derived and/or modified CDS sequence (opt4) from neuraminidase__InfluenzaB__AGX19011

SEQ ID NO: 189436 - RNA, 1401 nt, Artificial Sequence; identical to SEQ ID NO: 188695
  derived and/or modified CDS sequence (opt4) from neuraminidase__InfluenzaB__AGX19022

SEQ ID NO: 189437 - RNA, 1401 nt, Artificial Sequence
  derived and/or modified CDS sequence (opt4) from neuraminidase__InfluenzaB__AGX19033
augcugcccagcaccauccagacccugacccuguuccugaccagcggcggcgugcugcugagccuguacgugagcgccagccugagcuaccugcuguacagcgacauccugcugaaguuccccagcaccgagaucaccgcccccaccaugccccugaacugcgccaacgccagcaacgugcaggccgugaacagaagcgccaccaagggcgugacccugcugcugcccgagcccgaguggaccuaccccagacugagcugccccggcagcaccuuccagaaggcccugcugaucagcccccacagauucggcgagaccaagggcaacagcgccccccugaucaucagagagcccuucaucgccugcggccccaaggagugcaagcacuucgcccugacccacuacgccgcccagcccggcggcuacuacaacggcaccagaggcgacagaaacaagcugagacaccugaucagcgugaagcugggcaagauccccaccguggagaacagcaucuuccacauggccgccuggagcggcagcgccugccacgacggcaaggaguggaccuacaucggcguggacggccccgacaacaacgcccugcugaagaucaaguacggcgaggccuacaccgacaccuaccacagcuacgccaacaacauccugagaacccaggagagcgccugcaacugcaucggcggcaacugcuaccugaugaucaccgacggcagcgccagcggcgugagcgagugcagauuccugaagaucagagagggcagaaucaucaaggagaucuuccccaccggcagaaucaagcacaccgaggagugcaccugcggcuucgccagcaacaagaccaucgagugcgccugcagagacaacagcuacaccgccaagagacccuucgugaagcugaacguggagaccgacaccgccgagaucagacugaugugcaccgagaccuaccuggacacccccagacccgacgacggcagcaucaccggccccugcgagagcaacggcgacaagggcagcgagggcaucaagggcggcuucgugcaccagagaauggccagcaagaucggcagaugguacagcagaaccaugagcaagaccgagagaaugggcaugggccuguacgugaaguacgacggcgaccccugggccgacagcgacgcccuggccuucagcggcgugauggugagcauggaggagcccggcugguacagcuucggcuucgagaucaaggacaagaagugcgacgugcccugcaucggcaucgagauggugcacgacggcggcaaggagaccuggcacagcgccgccaccgccaucuacugccugaugggcagcggccagcugcugugggacaccgugaccggcgugaacauggcccuguga

SEQ ID NO: 189438 - RNA, 1401 nt, Artificial Sequence; identical to SEQ ID NO: 188695
  derived and/or modified CDS sequence (opt4) from neuraminidase__InfluenzaB__AGX19044

SEQ ID NO: 189439 - RNA, 1401 nt, Artificial Sequence; identical to SEQ ID NO: 188695
  derived and/or modified CDS sequence (opt4) from neuraminidase__InfluenzaB__AGX19055

SEQ ID NO: 189440 - RNA, 1401 nt, Artificial Sequence
  derived and/or modified CDS sequence (opt4) from neuraminidase__InfluenzaB__AGX19066
augcugcccagcaccauccagacccugacccuguuccugaccagcggcggcgugcugcugagccuguacgugagcgccagccugagcuaccugcuguacagcgacauccugcugaaguucagccccaccgagaucaccgcccccaccaugccccuggacugcgccaacgccagcaacgugcaggccgugaacagaagcgccaccaagggcgugacccugcugcugcccgagcccgaguggaccuaccccagacugagcugccccggcagcaccuuccagaaggcccugcugaucagcccccacagauucggcgagaccaagggcaacagcgccccccugaucaucagagagcccuucaucgccugcggccccaacgagugcaagcacuucgcccugacccacuacgccgcccagcccggcggcuacuacaacggcaccagaggcgacagaaacaagcugagacaccugaucagcgugaagcugggcaagauccccaccguggagaacagcaucuuccacauggccgccuggagcggcagcgccugccacgacggcaaggaguggaucuacaucggcguggacggccccgacaacaacgcccugcugaagaucaaguacggcgaggccuacaccgacaccuaccacagcuacgccaacaagauccugagaacccaggagagcgccugcaacugcaucggcggcaacugcuaccugaugaucaccgacggcagcgccagcggcgugagcgagugcagauuccugaagaucagagagggcagaaucaucaaggagaucuuccccaccggcagagugaagcacaccgaggagugcaccugcggcuucgccagcaacaagaccaucgagugcgccugcagagacaacagcuacaccgccaagagacccuucgugaagcugaacguggagaccgacaccgccgagaucagacugaugugcaccgacaccuaccuggacacccccagacccgacgacggcagcaucaccggccccugcgagagcaacggcgacaagggcagcggcggcaucaagggcggcuucgugcaccagagaauggccagcaagaucggcagaugguacagcagaaccaugagcaagaccgagagaaugggcaugggccuguacgugaaguacgacggcgaccccugggccgacagcgacgcccuggccuucagcggcgugauggugagcaugaaggagcccggcugguacagcuucggcuucgagaucaaggacaagaagugcgacgugcccugcaucggcaucgagauggugcacgacggcggcaaggagaccuggcacagcgccgccaccgccaucuacugccugaugggcagcggccagcugcugugggacaccgugaccggcguggacauggcccuguga

SEQ ID NO: 189441 - RNA, 1401 nt, Artificial Sequence
  derived and/or modified CDS sequence (opt4) from neuraminidase__InfluenzaB__AGX19077
augcugcccagcaccauccagacccugacccuguuccugaccagcggcggcgugcugcugagccuguacgugagcgccagccugagcuaccugcuguacagcgacauccugcugaaguucacccccaccgagaucaccgcccccaccaugccccuggacugcgccaacgccagcaacgugcaggccgugaacagaagcgccaccaagggcgugaccccccugcugcccgagcccgaguggaccuaccccagacugagcugccccggcagcaccuuccagaaggcccugcugaucagcccccacagauucggcgagaccaagggcaacagcgccccccugaucaucagagagcccuucaucgccugcggccccaacgagugcaagcacuucgcccugacccacuacgccgcccagcccggcggcuacuacaacggcaccagaggcgacagaaacaagcugagacaccugaucagcgugaagcugggcaagauccccaccguggagaacagcaucuuccacauggccgccuggagcggcagcgccugccacgacggcaaggaguggaccuacaucggcguggacggccccgacaacaacgcccugcugaagaucaaguacggcgaggccuacaccgacaccuaccacagcuacgccaacaagauccugagaacccaggagagcgccugcaacugcaucggcggcaacugcuaccugaugaucaccgacggcagcgccagcggcgugagcgagugcagauuccugaagaucagagagggcagaaucaucaaggagaucuuccccaccggcagagugaagcacaccgaggagugcaccugcggcuucgccagcaacaagaccaucgagugcgccugcagagacaacagcuacaccgccaagagacccuucgugaagcugaacguggagaccgacaccgccgagaucagacugaugugcaccgacaccuaccuggacacccccagacccgacgacggcagcaucaccggccccugcgagagcaacggcgacaagggcagcggcggcaucaagggcggcuucgugcaccagagaauggccagcaagaucggcagaugguacagcagaaccaugagcaagaccgagagaaugggcaugggccuguacgugaaguacgacggcgaccccugggccgacagcgacgcccuggccuucagcggcgugauggugagcaugaaggagcccggcugguacagcuucggcuucgagaucaaggacaagaagugcgacgugcccugcaucggcaucgagauggugcacgacggcggcaaggagaccuggcacagcgccgccaccgccaucuacugccugaugggcagcggccagcugcugugggacaccgugaccggcguggacauggcccuguga

SEQ ID NO: 189442 - RNA, 1401 nt, Artificial Sequence
  derived and/or modified CDS sequence (opt4) from neuraminidase__InfluenzaB__AGX19088
augcugcccagcaccauccagacccugacccuguuccugaccagcggcggcgugcugcugagccuguacgugagcgccagccugagcuaccugcuguacagcgacauccugcugaaguucagccccaccgagaucaccgcccccaccaugccccuggacugcgccaacgccagcaacgugcaggccgugaacagaagcgccaccaagggcgugacccugcugcugcccgagcccgaguggaccuaccccagacugagcugccccggcagcaccuuccagaaggcccugcugaucagcccccacagauucggcgagaccaagggcaacagcgccccccugaucaucagagagcccuucaucgccugcggccccaacgagugcaagcacuucgcccugacccacuacgccgcccagcccggcggcuacuacaacggcaccagaggcgacagaaacaagcugagacaccugaucagcgugaagcugggcaagauccccaccguggagaacagcaucuuccacauggccgccuggagcggcagcgccugccacgacggcaaggaguggaccuacaucggcguggacggccccgacaacaacgcccugcugaagaucaaguacggcgaggccuacaccgacaccuaccacagcuacgccaacaagauccugagaacccaggagagcgccugcaacugcaucggcggcaacugcuaccugaugaucaccgacggcagcgccagcggcgugagcgagugcagauuccugaagaucagagagggcagaaucgugaaggagaucuuccccaccggcagagugaagcacaccgaggagugcaccugcggcuucgccagcaacaagaccaucgagugcgccugcagagacaacagcuacaccgccaagagacccuucgugaagcugaacguggagaccgacaccgccgagaucagacugaugugcaccgacaccuaccuggacacccccagacccgacgacggcagcaucaccggccccugcgagagcaacggcgacaagggcagcggcggcaucaagggcggcuucgugcaccagagaauggccagcaagaucggcagaugguacagcagaaccaugagcaagaccgagagaaugggcaugggccuguacgugaaguacgacggcgaccccugggccgacagcgacgcccuggccuucagcggcgugauggugagcaugaaggagcccggcugguacagcuucggcuucgagaucaaggacaagaagugcgacgugcccugcaucggcaucgagauggugcacgacggcggcaaggagaccuggcacagcgccgccaccgccaucuacugccugaugggcagcggccagcugcugugggacaccgugaccggcguggacauggcccuguga

SEQ ID NO: 189443 - RNA, 1401 nt, Artificial Sequence; identical to SEQ ID NO: 188695
  derived and/or modified CDS sequence (opt4) from neuraminidase__InfluenzaB__AGX19099

SEQ ID NO: 189444 - RNA, 1401 nt, Artificial Sequence
  derived and/or modified CDS sequence (opt4) from neuraminidase__InfluenzaB__AGX19110
augcugcccagcaccauccagacccugacccuguuccugaccagcggcggcgugcugcugagccuguacgugagcgccagccugagcuaccugcuguacagcgacauccugcugaaguuccccagcaccgagaucaccgcccccaccaugccccuggacugcgccaacgccagcaacgugcaggccgugaacagaagcgccaccaagggcgugacccugcugcugcccgagcccgaguggaccuaccccagacugagcugccccggcagcaccuuccagaaggcccugcugaucagcccccacagauucggcgagaccaagggcaacagcgccccccugaucaucagagagcccuucaucgccugcggccccaaggagugcaagcacuucgcccugacccacuacgccgcccagcccggcggcuacuacaacggcaccagaggcgacagaaacaagcugagacaccugaucagcgugaagcugggcaagauccccaccguggagaacagcaucuuccacauggccgccuggagcggcagcgccugccacgacggcaaggaguggaccuacaucggcguggacggccccgacaacaacgcccugcugaagaucaaguacggcgaggccuacaccgacaccuaccacagcuacgccaacaacauccugagaacccaggagagcgccugcaacugcaucggcggcaacugcuaccugaugaucaccgacggcagcgccagcggcgugagcgagugcagauuccugaagaucagagagggcagaaucaucaaggagaucuuccccaccggcagaaucaagcacaccgaggagugcaccugcggcuucgccagcaacaagaccaucgagugcgccugcagagacaacagcuacaccgccaagagacccuucaucaagcugaacguggagaccgacaccgccgagaucagacugaugugcaccgagaccuaccuggacacccccagacccgacgacggcagcaucaccggccccugcgagagcaacggcgacaagggcagcggcggcaucaagggcggcuucgugcaccagagaauggccagcaagaucggcagaugguacagcagaaccaugagcaagaccgagagaaugggcaugggccuguacgugaaguacgacggcgaccccugggccgacagcgacgcccugguguucagcggcgugauggugagcauggaggagcccggcugguacagcuucggcuucgagaucaaggacaagaagugcgacgugcccugcaucggcaucgagauggugcacgacggcggcaaggagaccuggcacagcgccgccaccgccaucuacugccugaugggcagcggccagcugcugugggacaccgugaccggcgugaacauggcccuguga

SEQ ID NO: 189445 - RNA, 1401 nt, Artificial Sequence
  derived and/or modified CDS sequence (opt4) from neuraminidase__InfluenzaB__AGX19121
augcugcccagcaccacccagacccugacccuguuccugaccagcggcggcgugcugcugagccuguacgugagcgccagccugagcuaccugcuguacagcgacauccugcugaaguucagccccaccgagaucaccgcccccaccaugccccuggacugcgccaacgccagcaacgugcaggccgugaacagaagcgccaccaagggcgugacccugcugcugcccgagcccgaguggaccuaccccagacugagcugccccggcagcaccuuccagaaggcccugcugaucagcccccacagauucggcgagaccaagggcaacagcgccccccugaucaucagagagcccuucaucgccugcggccccaacgagugcaagcacuucgcccugacccacuacgccgcccagcccggcggcuacuacaacggcaccagaggcgacagaaacaagcugagacaccugaucagcgugaagcugggcaagauccccaccguggagaacagcaucuuccacauggccgccuggagcggcagcgccugccacgacggcaaggaguggaccuacaucggcguggacggccccgacaacaacgcccugcugaagaucaaguacggcgaggccuacaccgacaccuaccacagcuacgccaacaagauccugagaacccaggagagcgccugcaacugcaucggcggcaacugcuaccugaugaucaccgacggcagcgccagcggcgugagcgagugcagauuccugaagaucagagagggcagaaucaucaaggagaucuuccccaccggcagagugaagcacaccgaggagugcaccugcggcuucgccagcaacaagaccaucgagugcgccugcagagacaacagcuacaccgccaagagacccuucgugaagcugaacguggagaccgacaccgccgagaucagacugaugugcaccgacaccuaccuggacacccccagacccgacgacggcagcaucaccggccccugcgagagcaacggcgacaagggcagcggcggcaucaagggcggcuucgugcaccagagaauggccagcaagaucggcagaugguacagcagaaccaugagcaagaccgagagaaugggcaugggccuguacgugaaguacgacggcgaccccugggccgacagcgacgcccuggccuucagaggcgugauggugagcaugaaggagcccggcugguacagcuucggcuucgagaucaaggacaagaagugcgacgugcccugcaucggcaucgagauggugcacgacggcggcaaggagaccuggcacagcgccgccaccgccaucuacugccugaugggcagcggccagcugcugugggacaccgugaccggcguggacauggcccuguga

SEQ ID NO: 189446 - RNA, 1401 nt, Artificial Sequence; identical to SEQ ID NO: 189329
  derived and/or modified CDS sequence (opt4) from neuraminidase__InfluenzaB__AGX19132

SEQ ID NO: 189447 - RNA, 1401 nt, Artificial Sequence; identical to SEQ ID NO: 189433
  derived and/or modified CDS sequence (opt4) from neuraminidase__InfluenzaB__AGX19143

SEQ ID NO: 189448 - RNA, 1401 nt, Artificial Sequence
  derived and/or modified CDS sequence (opt4) from neuraminidase__InfluenzaB__AGX19154
augcugcccagcaccauccagacccugacccuguuccugaccagcggcggcgugcugcugagccuguacgugagcgccagccugagcuaccugcuguacagcaacauccugcugaaguucagccccaccgagaucaccgcccccaccaugccccuggacugcgccaacgccagcaacgugcacgccgugaacagaagcgccaccaagggcgugacccugcugcugcccgagcccgaguggaccuaccccagacugagcugccccggcagcaccuuccagaaggcccugcugaucagcccccacagauucggcgagaccaagggcaacagcgccccccugaucaucagagagcccuucaucgccugcggccccaacgagugcaagcacuucgcccugacccacuacgccgcccagcccggcggcuacuacaacggcaccagaggcgacagaaacaagcugagacaccugaucagcgugaagcugggcaagauccccaccguggagaacagcaucuuccacauggccgccuggagcggcagcgccugccacgacggcaaggaguggaccuacaucggcguggacggccccgacaacaacgcccugcugaagaucaaguacggcgaggccuacaccgacaccuaccacagcuacgccaacaacauccugagaacccaggagagcgccugcaacugcaucggcggcaacugcuaccugaugaucaccgacggcagcgccagcggcgugagcgagugcagauuccugaagaucagagagggcagaaucaucaaggagaucuuccccaccggcagagugaagcacaccgaggagugcaccugcggcuucgccagcaacaagaccaucgagugcgccugcagagacaacagcuacaccgccaagagacccuucgugaagcugaacguggagaccgacaccgccgagaucagacugaugugcaccgacaccuaccuggacacccccagacccgacgacggcagcaucaccggccccugcgagagcaacggcgacaagggcagcggcggcaucaagggcggcuucgugcaccagagaauggccagcaagaucggcagaugguacagcagaaccaugagcaagaccgagagaaugggcaugggccuguacgugaaguacgacggcgaccccugggccgacagcgacgcccuggccuucagcggcgugauggugagcaugaaggagcccggcugguacagcuucggcuucgagaucaaggacaagaagugcgacgugcccugcaucggcaucgagauggugcacgacggcggcaaggagaccuggcacagcgccgccaccgccaucuacugccugaugggcagcggccagcugcugugggacaccgugaccggcguggacauggcccuguga

SEQ ID NO: 189449 - RNA, 1401 nt, Artificial Sequence; identical to SEQ ID NO: 188695
  derived and/or modified CDS sequence (opt4) from neuraminidase__InfluenzaB__AGX19165

SEQ ID NO: 189450 - RNA, 1401 nt, Artificial Sequence
  derived and/or modified CDS sequence (opt4) from neuraminidase__InfluenzaB__AGX19176
augcugcccagcaccauccagacccugacccuguuccugaccagcggcggcgugcugcugagccuguacgugagcgccagccugagcuaccugcuguacagcgacauccugcugaaguucagccccaccgagaucaccgcccccaccaugccccuggacugcgccaacgccagcaacgugcacgccgugaacagaagcgccaccaagggcgugacccugcugcugcccgagcccgaguggaccuaccccagacugagcugccccggcagcaccuuccagaaggcccugcugaucagcccccacagauucggcgagaccaagggcaacagcgccccccugaucaucagagagcccuucaucgccugcggccccaacgagugcaagcacuucgcccugacccacuacgccgcccagcccggcggcuacuacaacagaaccagaggcgacagaaacaagcugagacaccugaucagcgugaagcugggcaagauccccaccguggagaacagcaucuuccacauggccgccuggagcggcagcgccugccacgacggcaaggaguggaccuacaucggcguggacggccccgacaacaacgcccugcugaagaucaaguacggcgaggccuacaccgacaccuaccacagcuacgccaacaacauccugagaacccaggagagcgccugcaacugcaucggcggcaacugcuaccugaugaucaccgacggcagcgccagcggcgugagcgagugcagauuccugaagaucagagagggcagaaucaucaaggagaucuuccccaccggcagagugaagcacaccgaggagugcaccugcggcuucgccagcaacaagaccaucgagugcgccugcagagacaacagcuacaccgccaagagacccuucgugaagcugaacguggagaccgacaccgccgagaucagacugaugugcaccgacaccuaccuggacacccccagacccgacgacggcagcaucaccggccccugcgagagcaacggcgacaagggcagcggcggcaucaagggcggcuucgugcaccagagaauggccagcaagaucggcagaugguacagcagaaccaugagcaagaccgagagaaugggcaugggccuguacgugaaguacgacggcgaccccugggccgacagcgacgcccuggccuucagcggcgugauggugagcaugaaggagcccggcugguacagcuucggcuucgagaucaaggacaagaagugcgacgugcccugcaucggcaucgagauggugcacgacggcggcaaggagaccuggcacagcgccgccaccgccaucuacugccugaugggcagcggccagcugcugugggacaccgugaccggcguggacauggcccuguga

SEQ ID NO: 189451 - RNA, 1401 nt, Artificial Sequence
  derived and/or modified CDS sequence (opt4) from neuraminidase__InfluenzaB__AGX19187
augcugcccagcaccauccagacccugacccuguuccugaccagcggcggcgugcugcugagccuguacgugagcgccagccugagcuaccugcuguacagcgacauccugcugaaguucagccccaccgagaucaccgcccccaccaugccccuggacugcgccaacgccagcaacgugcaggccgugaacagaagcgccaccaagggcgugacccugcugcugcccgagcccgaguggaccuaccccagacugagcugcagcggcagcaccuuccagaaggcccugcugaucagcccccacagauucggcgagaccaagggcaacagcgccccccugaucaucagagagcccuucaucgccugcggccccaacgagugcaagcacuucgcccugacccacuacgccgcccagcccggcggcuacuacaacggcaccagaggcgacagaaacaagcugagacaccugaucagcgugaagcugggcaagauccccaccguggagaacagcaucuuccacauggccgccuggagcggcagcgccugccacgacggcaaggaguggaccuacaucggcguggacggccccgacaacaacgcccugcugaagaucaaguacggcgaggccuacaccgacaccuaccacagcuacgccaacaagauccugagaacccaggagagcgccugcaacugcaucggcggcaacugcuaccugaugaucaccgacggcagcgccagcggcgugagcgagugcagauuccugaagaucagagagggcagaaucaucaaggagaucuuccccaccggcagagugaagcacaccgaggagugcaccugcggcuucgccagcaacaagaccaucgagugcgccugcagagacaacagcuacaccgccaagagacccuucgugaagcugaacguggagaccgacaccgccgagaucagacugaugugcaccgacaccuaccuggacacccccagacccgacgacggcagcaucaccggccccugcgagagcaacggcgacaagggcagcggcggcaucaagggcggcuucgugcaccagagaauggccagcaagaucggcagaugguacagcagaaccaugagcaagaccgagagaaugggcaugggccuguacgugaaguacgacggcgaccccugggccgacagcgacgcccuggccuucagcggcgugauggugagcaugaaggagcccggcugguacagcuucggcuucgagaucaaggacaagaagugcgacgugcccugcaucggcaucgagauggugcacgacggcggcaaggagaccuggcacagcgccgccaccgccaucuacugccugaugggcagcggccagcugcugugggacaccgugaccggcguggacauggcccuguga

SEQ ID NO: 189452 - RNA, 1401 nt, Artificial Sequence
  derived and/or modified CDS sequence (opt4) from neuraminidase__InfluenzaB__AGX19198
augcugcccagcaccauccagacccugacccuguuccugaccagcggcggcgugcugcugagccuguacgugagcgccagccugagcuaccugcuguacagcgacauccugcugaaguucagccccaccgagaucaccgcccccaccaugccccuggacuacgccaacgccagcaacgugcaggccgugaacagaagcgccaccaagggcgugacccugcugcugcccgagcccgaguggaccuaccccagacugagcugccccggcagcaccuuccagaaggcccugcugaucagcccccacagauucggcgagaccaagggcaacagcgccccccugaucaucagagagcccuucaucgccugcggccccaacgagugcaagcacuucgcccugacccacuacgccgcccagcccggcggcuacuacaacggcaccagaggcgacagaaacaagcugagacaccugaucagcgugaagcugggcaagauccccaccguggagaacagcaucuuccacauggccgccuggagcggcagcgccugccacgacggcaaggaguggaccuacaucggcguggacggccccgacaacaacgcccugcugaagaucaaguacggcgaggccuacaccgacaccuaccacagcuacgccaacaagauccugagaacccaggagagcgccugcaacugcaucggcggcaacugcuaccugaugaucaccgacggcagcgccagcggcgugagcgagugcagauuccugaagaucagagagggcagaaucaucaaggagaucuuccccaccggcagagugaagcacaccgaggagugcaccugcggcuucgccagcaacaagaccaucgagugcgccugcagagacaacagcuacaccgccaagagacccuucgugaagcugaacguggagaccgacaccgccgagaucagacugaugugcaccgacaccuaccuggacacccccagacccgacgacggcagcaucaccggccccugcgagagcaacggcgacaagggcagcggcggcaucaagggcggcuucgugcaccagagaauggccagcaagaucggcagaugguacagcagaaccaugagcaagaccgagagaaugggcaugggccuguacgugaaguacgacggcgaccccugggccgacagcgacgcccuggccuucagcggcgugauggugagcaugaaggagcccggcugguacagcuucggcuucgagaucaaggacaagaagugcgacgugcccugcaucggcaucgagauggugcacgacggcggcaaggagaccuggcacagcgccgccaccgccaucuacugccugaugggcagcggccagcugcugugggacaccgugaccggcguggacauggcccuguga

SEQ ID NO: 189453 - RNA, 1401 nt, Artificial Sequence; identical to SEQ ID NO: 189433
  derived and/or modified CDS sequence (opt4) from neuraminidase__InfluenzaB__AGX19209

SEQ ID NO: 189454 - RNA, 1401 nt, Artificial Sequence
  derived and/or modified CDS sequence (opt4) from neuraminidase__InfluenzaB__AGX19220
augcugcccagcaccauccagacccugacccuguuccugaccagcggcggcgugcugcugagccuguacgugagcgccagccugagcuaccugcuguacagcgacauccugcugaaguucagccccaccgagaucaccgcccccaccaugagccuggacugcgccaacgccagcaacgugcaggccgugaacagaagcgccaccaagggcgugacccugcugcugcccgagcccgaguggaccuaccccagacugagcugccccggcagcaccuuccagaaggcccugcugaucagcccccacagauucggcgagaccaagggcaacagcgccccccugaucaucagagagcccuucaucgccugcggccccaacgagugcaagcacuucgcccugacccacuacgccgcccagcccggcggcuacuacaacggcaccagaggcgacagaaacaagcugagacaccugaucagcgugaagcugggcaagauccccaccguggagaacagcaucuuccacauggccgccuggagcggcagcgccugccacgacggcaaggaguggaccuacaucggcguggacggccccgacaacaacgcccugcugaagaucaaguacggcgaggccuacaccgacaccuaccacagcuacgccaacaagauccugagaacccaggagagcgccugcaacugcaucggcggcaacugcuaccugaugaucaccgacggcagcgccagcggcgugagcgagugcagauuccugaagaucagagagggcagaaucaucaaggagaucuuccccaccggcagagugaagcacaccgaggagugcaccugcggcuucgccagcaacaagaccaucgagugcgccugcagagacaacagcuacaccgccaagagacccuucgugaagcugaacguggagaccgacaccgccgagaucagacugaugugcaccgacaccuaccuggacacccccagacccgacgacggcagcaucaccggccccugcgagagcaacggcgacagaggcagcggcggcaucaagggcggcuucgugcaccagagaauggccagcaagaucggcagaugguacagcagaaccaugagcaagaccgagagaaugggcaugggccuguacgugaaguacgacggcgaccccugggccgacagcgacgcccuggccuucagcggcgugauggugagcaugaaggagcccggcugguacagcuucggcuucgagaucaaggacaagaagugcgacgugcccugcaucggcaucgagauggugcacgacggcggcaaggagaccuggcacagcgccgccaccgccaucuacugccugaugggcagcggccagcugcugugggacaccgugaccggcguggacauggcccuguga

SEQ ID NO: 189455 - RNA, 1401 nt, Artificial Sequence; identical to SEQ ID NO: 188901
  derived and/or modified CDS sequence (opt4) from neuraminidase__InfluenzaB__AGX19231

SEQ ID NO: 189456 - RNA, 1401 nt, Artificial Sequence
  derived and/or modified CDS sequence (opt4) from neuraminidase__InfluenzaB__AGX19253
augcugcccagcaccauccagacccugacccuguuccugaccagcggcggcgugcugcugagccuguacgugagcgccagccugagcuaccugcuguacagcgacauccugcugaaguucagccccaccgagaucaccgcccccaccaugccccuggacugcgccaacgccagcaacgugcaggccgugaaccacagcgccaccaagggcgugacccugcugcugcccgagcccgaguggaccuaccccagacugagcugccccggcagcaccuuccagaaggcccugcugaucagcccccacagauucggcgagaccaagggcaacagcgccccccugaucaucagagagcccuucaucgccugcggccccaacgagugcaagcacuucgcccugacccacuacgccgcccagcccggcggcuacuacaacggcaccagaggcgacagaaacaagcugagacaccugaucagcgugaagcugggcaagauccccaccguggagaacagcaucuuccacauggccgccuggagcggcagcgccugccacgacggcaaggaguggaccuacaucggcguggacggccccgacaacaacgcccugcugaagaucaaguacggcgaggccuacaccgacaccuaccacagcuacgccaacaagauccugagaacccaggagagcgccugcaacugcaucggcggcaacugcuaccugaugaucaccgacggcagcgccagcggcgugagcgagugcagauuccugaagaucagagagggcagaaucaucaaggagaucuuccccaccggcagagugaagcacaccgaggagugcaccugcggcuucgccagcaacaagaccaucgagugcgccugcagagacaacagcuacaccgccaagagacccuucgugaagcugaacguggagaccgacaccgccgagaucagacugaugugcaccgacaccuaccuggacacccccagacccgacgacggcagcaucaccggccccugcgagagcaacggcgacaagggcagcggcggcaucaagggcggcuucgugcaccagagaauggccagcaagaucggcagaugguacagcagaaccaugagcaagaccgagagaaugggcaugggccuguacgugaaguacgacggcgaccccugggccgacagcgacagccuggccuucagcggcgugauggugagcaugaaggagcccggcugguacagcuucggcuucgagaucaaggacaagaagugcgacgugcccugcaucggcaucgagauggugcacgacggcggcaaggagaccuggcacagcgccgccaccgccaucuacugccugaugggcagcggccagcugcugugggacaccgugaccggcguggacauggcccuguga

SEQ ID NO: 189457 - RNA, 1401 nt, Artificial Sequence; identical to SEQ ID NO: 189431
  derived and/or modified CDS sequence (opt4) from neuraminidase__InfluenzaB__AGX19264

SEQ ID NO: 189458 - RNA, 1401 nt, Artificial Sequence; identical to SEQ ID NO: 188695
  derived and/or modified CDS sequence (opt4) from neuraminidase__InfluenzaB__AGX19275

SEQ ID NO: 189459 - RNA, 1401 nt, Artificial Sequence
  derived and/or modified CDS sequence (opt4) from neuraminidase__InfluenzaB__AGX19286
augauccccagcaccauccagacccugacccuguuccugaccagcggcggcgugcugcugagccuguacgugagcgccagccugagcuaccugcuguacagcgacauccugcugaaguucagccccaccgagaucaucgcccccaccaugccccuggacugcgccaacgccagcaacgugcacgccgugaacagaagcgccaccaagggcgugacccugcugcugcccgagcccgaguggaccuaccccagacugagcugccccggcagcaccuuccagaaggcccugcugaucagcccccacagauucggcgagaccaagggcaacagcgccccccugaucaucagagagcccuucaucgccugcggccccaacgagugcaagcacuucgcccugacccacuacgccgcccagcccggcggcuacuacaacggcaccagaggcgacagaaacaagcugagacaccugaucagcgugaagcugggcaagauccccaccguggagaacagcaucuuccacauggccgccuggagcggcagcgccugccacgacggcaaggaguggaccuacaucggcguggacggccccgacaacaacgcccugcugaagaucaaguacggcgaggccuacaccgacaccuaccacagcuacgccaacaacauccugagaacccaggagagcgccugcaacugcaucggcggcaacugcuaccugaugaucaccgacggcagcgccagcggcgugagcgagugcagauuccugaagaucagagagggcagaaucaucaaggagaucuuccccaccggcagagugaagcacaccgaggagugcaccugcggcuucgccagcaacaagaccaucgagugcgccugcagagacaacagcuacaccgccaagagacccuucgugaagcugaacguggagaccgacaccgccgagaucagacugaugugcaccgacaccuaccuggacacccccagacccgacgacggcagcaucaccggccccugcgagagcaacggcgacaagggcagcggcggcaucaagggcggcuucgugcaccagagaauggccagcaagaucggcagaugguacagcagaaccaugagcaagaccgagagaaugggcaugggccuguacgugaaguacgacggcgaccccugggccgacagcgacgcccuggccuucagcggcgugauggugagcaugaaggagcccggcugguacagcuucggcuucgagaucaaggacaagaagugcgacgugcccugcaucggcaucgagauggugcacgacggcggcaaggagaccuggcacagcgccgccaccgccaucuacugccugaugggcagcggccagcugcugugggacaccgugaccggcguggacauggcccuguga

SEQ ID NO: 189460 - RNA, 1401 nt, Artificial Sequence
  derived and/or modified CDS sequence (opt4) from neuraminidase__InfluenzaB__AGX19297
augcugcccagcaccauccagacccugacccuguuccugaccagcggcggcgugcugcugagccuguacgugagcgccagccugagcuaccugcuguacagcgacauccugcugaaguucagccccaccgagaucaucgcccccaccaugccccuggacugcgccaacgccagcaacgugcacgccgugaacagaagcgccaccaagggcgugacccugcugcugcccgagcccgaguggaccuaccccagacugagcugccccggcagcaccuuccagaaggcccugcugaucagcccccacagauucggcgagaccaagggcaacagcgccccccugaucaucagagagcccuucaucgccugcggccccaacgagugcaagcacuucgcccugacccacuacgccgcccagcccggcggcuacuacaacggcaccagaggcgacagaaacaagcugagacaccugaucagcgugaagcugggcaagauccccaccguggagaacagcaucuuccacauggccgccuggagcggcagcgccugccacgacggcaaggaguggaccuacaucggcguggacggccccgacaacaacgcccugcugaagaucaaguacggcgaggccuacaccgacaccuaccacagcuacgccaacaacauccugagaacccaggagagcgccugcaacugcaucggcggcaacugcuaccugaugaucaccgacggcagcgccagcggcgugagcgagugcagauuccugaagaucagagagggcagaaucaucaaggagaucuuccccaccggcagagugaagcacaccgaggagugcaccugcggcuucgccagcaacaagaccaucgagugcgccugcagagacaacagcuacaccgccaagagacccuucgugaagcugaacguggagaccgacaccgccgagaucagacugaugugcaccgacaccuaccuggacacccccagacccgacgacggcagcaucaccggccccugcgagagcaacggcgacaagggcagcggcggcaucaagggcggcuucgugcaccagagaauggccagcaagaucggcagaugguacagcagaaccaugagcaagaccgagagaaugggcaugggccuguacgugaaguacgacggcgaccccugggccgacagcgacgcccuggccuucagcggcgugauggugagcaugaaggagcccggcugguacagcuucggcuucgagaucaaggacaagaagugcgacgugcccugcaucggcaucgagauggugcacgacggcggcaaggagaccuggcacagcgccgccaccgccaucuacugccugaugggcagcggccagcugcugugggacaccgugaccggcguggacauggcccuguga

SEQ ID NO: 189461 - RNA, 1401 nt, Artificial Sequence; identical to SEQ ID NO: 189460
  derived and/or modified CDS sequence (opt4) from neuraminidase__InfluenzaB__AGX19308

SEQ ID NO: 189462 - RNA, 1401 nt, Artificial Sequence; identical to SEQ ID NO: 189460
  derived and/or modified CDS sequence (opt4) from neuraminidase__InfluenzaB__AGX19319

SEQ ID NO: 189463 - RNA, 1401 nt, Artificial Sequence
  derived and/or modified CDS sequence (opt4) from neuraminidase__InfluenzaB__AGX19330
augcugcccagcaccauccagacccugacccuguuccugaccagcggcggcgugcugcugagccuguacgugagcgccagccugagcuaccugcuguacagcgacauccugcugaaguucagccccaccgagaucaucgcccccaccaugccccuggacugcgccaacgccagcaacgugcacgccgugaacagaagcgccaccaagggcgugacccugcugcugcccgagcccgaguggaccuaccccagacugagcugccccggcagcaccuuccagaaggcccugcugaucagcccccacagauucggcgagaccaagggcaacagcgccccccugaucaucagagagcccuucaucgccugcggccccaacgagugcaagcacuucgcccugacccacuacgccgcccagcccggcggcuacuacaacggcaccagaggcaacagaaacaagcugagacaccugaucagcgugaagcugggcaagauccccaccguggagaacagcaucuuccacauggccgccuggagcggcagcgccugccacgacggcaaggaguggaccuacaucggcguggacggccccgacaacaacgcccugcugaagaucaaguacggcgaggccuacaccgacaccuaccacagcuacgccaacaacauccugagaacccaggagagcgccugcaacugcaucggcggcaacugcuaccugaugaucaccgacggcagcgccagcggcgugagcgagugcagauuccugaagaucagagagggcagaaucaucaaggagaucuuccccaccggcagagugaagcacaccgaggagugcaccugcggcuucgccagcaacaagaccaucgagugcgccugcagagacaacagcuacaccgccaagagacccuucgugaagcugaacguggagaccgacaccgccgagaucagacugaugugcaccgacaccuaccuggacacccccagacccgacgacggcagcaucaccggccccugcgagagcaacggcgacaagggcagcggcggcaucaagggcggcuucgugcaccagagaauggccagcaagaucggcagaugguacagcagaaccaugagcaagaccgagagaaugggcaugggccuguacgugaaguacgacggcgaccccugggccgacagcgacgcccuggccuucagcggcgugauggugagcaugaaggagcccggcugguacagcuucggcuucgagaucaaggacaagaagugcgacgugcccugcaucggcaucgagauggugcacgacggcggcaaggagaccuggcacagcgccgccaccgccaucuacugccugaugggcagcggccagcugcugugggacaccgugaccggcguggacauggcccuguga

SEQ ID NO: 189464 - RNA, 1401 nt, Artificial Sequence; identical to SEQ ID NO: 189460
  derived and/or modified CDS sequence (opt4) from neuraminidase__InfluenzaB__AGX19341

SEQ ID NO: 189465 - RNA, 1401 nt, Artificial Sequence; identical to SEQ ID NO: 189460
  derived and/or modified CDS sequence (opt4) from neuraminidase__InfluenzaB__AGX19352

SEQ ID NO: 189466 - RNA, 1401 nt, Artificial Sequence
  derived and/or modified CDS sequence (opt4) from neuraminidase__InfluenzaB__AGX19363
augcugcccagcaccauccagacccugacccuguuccugaccagcggcggcgugcugcugagccuguacgugagcgccagccugagcuaccugcuguacagcgacauccugcugaaguucagccccaccgagaucaucgcccccaccaugccccuggacugcgccaacgccagcaacgugcacgccgugaacagaagcgccaccaagggcgugacccugcugcugcccgagcccgaguggaccuaccccagacugagcugccccggcagcaccuuccagaaggcccugcugaucagcccccacagauucggcgagaccaagggcaacagcgccccccugaucaucagagagcccuucaucgccugcggccccaacgagugcaagcacuucgcccugaccuacuacgccgcccagcccggcggcuacuacaacggcaccagaggcgacagaaacaagcugagacaccugaucagcgugaagcugggcaagauccccaccguggagaacagcaucuuccacauggccgccuggagcggcagcgccugccacgacggcaaggaguggaccuacaucggcguggacggccccgacaacaacgcccugcugaagaucaaguacggcgaggccuacaccgacaccuaccacagcuacgccaacaacauccugagaacccaggagagcgccugcaacugcaucggcggcaacugcuaccugaugaucaccgacggcagcgccagcggcgugagcgagugcagauuccugaagaucagagagggcagaaucaucaaggagaucuuccccaccggcagagugaagcacaccgaggagugcaccugcggcuucgccagcaacaagaccaucgagugcgccugcagagacaacagcuacaccgccaagagacccuucgugaagcugaacguggagaccgacaccgccgagaucagacugaugugcaccgacaccuaccuggacacccccagacccgacgacggcagcaucaccggccccugcgagagcaacggcgacaagggcagcggcggcaucaagggcggcuucgugcaccagagaauggccagcaagaucggcagaugguacagcagaaccaugagcaagaccgagagaaugggcaugggccuguacgugaaguacgacggcgaccccugggccgacagcgacgcccuggccuucagcggcgugauggugagcaugaaggagcccggcugguacagcuucggcuucgagaucaaggacaagaagugcgacgugcccugcaucggcaucgagauggugcacgacggcggcaaggagaccuggcacagcgccgccaccgccaucuacugccugaugggcagcggccagcugcugugggacaccgugaccggcguggacauggcccuguga

SEQ ID NO: 189467 - RNA, 1401 nt, Artificial Sequence
  derived and/or modified CDS sequence (opt4) from neuraminidase__InfluenzaB__AGX19374
augcugcccagcaccauccagacccugacccuguuccugaccagcggcggcgugcugcugagccuguacgugagcgccagccugagcuaccugcuguacagcgacauccugcugaaguucagccagaccgagaucaccgcccccaucaugccccuggacugcgccaacgccagcaacgugcaggccgugaacagaagcgccgccaagggcgugacccugcugcugagcgagcccgaguggaccuaccccagacugagcugccccggcagcaccuuccagaaggcccugcugaucagcccccacagauucggcgagaccaagggcaacagcgccccccugaucaucagagagcccuucaucgccugcggccccaccgagugcaagcacuucgcccugacccacuacgccgcccagcccggcggcuacuacaacggcaccagagaggacagaaacaagcugagacaccugaucagcgugaagcugggcaagauccccaccguggagaacagcaucuuccacauggccgccuggagcggcagcgccugccacgacggcaaggaguggaccuacaucggcguggacggccccgacagcaacgcccugcugaagaucaaguacggcgaggccuacaccgacaccuaccacagcuacgccaagaacauccugagaacccaggagagcgccugcaacugcaucggcggcgacugcuaccugaugaucaccgacggccccgccagcggcgugagcgagugcagauuccugaagaucagagagggcagaaucaucaaggagaucuuccccaccggcagagugaagcacaccgaggagugcaccugcggcuucgccagcaacaagaccaucgagugcgccugcagagacaacagcuacaccgccaagagacccuucgugaagcugaacguggagaccgacaccgccgagaucagacugaugugcaccgagaccuaccuggacacccccagacccaacgacggcagcaucaccggccccugcgagagcgacggcgacaagggcagcggcggcaucaagggcggcuucgugcaccagagaauggccagcaagaucggcagaugguacagcagaaccaugagcaagaccaagagaaugggcaugggccuguacgugaaguacgacggcgaccccuggaccgacagcgaggcccuggcccugagcggcgugauggugagcauggaggagcccggcugguacagcuucggcuucgagaucaaggacaagaagugcgacgugcccugcaucggcaucgagauggugcacgacggcggcaagaccaccuggcacagcgccgccaccgccaucuacugccugaugggcagcggccagcugcugugggacaccgugaccggcguggacauggcccuguga

SEQ ID NO: 189468 - RNA, 1401 nt, Artificial Sequence; identical to SEQ ID NO: 189460
  derived and/or modified CDS sequence (opt4) from neuraminidase__InfluenzaB__AGX19385

SEQ ID NO: 189469 - RNA, 1401 nt, Artificial Sequence
  derived and/or modified CDS sequence (opt4) from neuraminidase__InfluenzaB__AGX19396
augcugcccagcaccauccagacccugacccuguuccugaccagcggcggcgugcugcugagccuguacgugagcgccagccugagcuaccugcuguacagcgacauccugcugaaguucagccccaccgagaucaucgcccccaccaugccccuggacugcgccaacgccagcaacgugcacgccgugaacagaagcgccaccaagggcgugacccugcugcugcccgagcccgaguggaccuaccccagacugagcugccccggcagcaccuuccagaaggcccugcugaucagcccccacagauucggcgagaccaagggcaacagcgccccccugaucaucagagagcccuucaucgccugcggccccaacgagugcaagcacuucgcccugacccacuacgccgcccagcccggcggcuacuacaacggccccagaggcgacagaaacaagcugagacaccugaucagcgugaagcugggcaagauccccaccguggagaacagcaucuuccacauggccgccuggagcggcagcgccugccacgacggcaaggaguggaccuacaucggcguggacggccccgacaacaacgcccugcugaagaucaaguacggcgaggccuacaccgacaccuaccacagcuacgccaacaacauccugagaacccaggagagcgccugcaacugcaucggcggcaacugcuaccugaugaucaccgacggcagcgccagcggcgugagcgagugcagauuccugaagaucagagagggcagaaucaucaaggagaucuuccccaccggcagagugaagcacaccgaggagugcaccugcggcuucgccagcaacaagaccaucgagugcgccugcagagacaacagcuacaccgccaagagacccuucgugaagcugaacguggagaccgacaccgccgagaucagacugaugugcaccgacaccuaccuggacacccccagacccgacgacggcagcaucaccggccccugcgagagcaacggcgacaagggcagcggcggcaucaagggcggcuucgugcaccagagaauggccagcaagaucggcagaugguacagcagaaccaugagcaagaccgagagaaugggcaugggccuguacgugaaguacgacggcgaccccugggccgacagcgacgcccuggccuucagcggcgugauggugagcaugaaggagcccggcugguacagcuucggcuucgagaucaaggacaagaagugcgacgugcccugcaucggcaucgagauggugcacgacggcggcaaggagaccuggcacagcgccgccaccgccaucuacugccugaugggcagcggccagcugcugugggacaccgugaccggcguggacauggcccuguga

SEQ ID NO: 189470 - RNA, 1401 nt, Artificial Sequence; identical to SEQ ID NO: 189460
  derived and/or modified CDS sequence (opt4) from neuraminidase__InfluenzaB__AGX19407

SEQ ID NO: 189471 - RNA, 1401 nt, Artificial Sequence; identical to SEQ ID NO: 189021
  derived and/or modified CDS sequence (opt4) from neuraminidase__InfluenzaB__AGX19418

SEQ ID NO: 189472 - RNA, 1401 nt, Artificial Sequence
  derived and/or modified CDS sequence (opt4) from neuraminidase__InfluenzaB__AGX19429
augcugcccagcaccauccagacccugacccuguuccugaccagcggcggcgugcugcugagccuguacgugagcgccagccugagcuaccugcuguacagcgacauccugcugaaguucagccagaccgagaucaccgcccccaucaugccccuggacugcgccaacgccagcaacgugcaggccgugaacagaagcgccgccaagggcgugacccugcugcugcccgagcccgaguggaccuaccccagacugagcugccccggcagcaccuuccagaaggcccugcugaucagcccccacagauucggcgagaccaagggcaacagcgccccccugaucaucagagagcccuucaucgccugcggccccaccgagugcaagcacuucgcccugacccacuacgccgcccagcccggcggcuacuacaacggcaccagagaggacagaaacaagcugagacaccugaucagcgugaagcugggcaagauccccaccguggagaacagcaucuuccacauggccgccuggagcggcagcgccugccacgacggcaaggaguggaccuacaucggcguggacggccccgacagcaacgcccugcugaagaucaaguacggcgaggccuacaccgacaccuaccacagcuacgccaagaacauccugagaacccaggagagcgccugcaacugcaucggcggcgacugcuaccugaugaucaccgacggccccgccagcggcaucagcgagugcagauuccugaagaucagagagggcagaaucaucaaggagaucuuccccaccggcagagugaagcacaccgaggagugcaccugcggcuucgccagcaacaagaccaucgagugcgccugcagagacaacagcuacaccgccaagagacccuucgugaagcugaacguggagaccgacaccgccgagaucagacugaugugcaccgagaccuaccuggacacccccagacccaacgacggcagcaucaccggccccugcgagagcgacggcgacaagggcagcggcggcaucaagggcggcuucgugcaccagagaauggccagcaagaucggcagaugguacagcagaaccaugagcaagaccagaagaaugggcaugggccuguacgugaaguacgacggcgaccccuggaccgacagcgaggcccuggcccugagcggcgugauggugagcauggaggagcccggcugguacagcuucggcuucgagaucaaggacaagaagugcgacgugcccugcaucggcaucgagauggugcacgacggcggcaagaccaccuggcacagcgccgccaccgccaucuacugccugaugggcagcggccagcugcugugggacaccgugaccggcguggacauggcccuguga

SEQ ID NO: 189473 - RNA, 1401 nt, Artificial Sequence
  derived and/or modified CDS sequence (opt4) from neuraminidase__InfluenzaB__AGX19451
augcugcccagcaccauccagacccugacccuguuccugaccagcggcggcgugcugcugagccuguacgugagcgccagccugagcuaccugcuguacagcgacauccugcugaaguucagccccaccgagaucaccgcccccaccaugccccuggacugcgccaacgccagcaacgugcacgccgugaaccacagcgccaccaagggcgugacccugcugcugcccgagcccgaguggaccuaccccagacugagcugccccggcagcaccuuccagaaggcccugcugaucagcccccacagauucggcgagaccaagggcaacagcgccccccugaucaucagagagcccuucaucgccugcggccccaacgagugcaagcacuucgcccugacccacuacgccgcccagcccggcggcuacuacaacggcaccagaggcgacagaaacaagcugagacaccugaucagcgugaagcugggcaagauccccaccguggagaacagcaucuuccacauggccgccuggagcggcagcgccugccacgacggcaaggaguggaccuacaucggcguggacggccccgacaacaacgcccugcugaagaucaaguacggcgaggccuacaccgacaccuaccacagcuacgccaacaacauccugagaacccaggagagcgccugcaacugcaucggcggcaacugcuaccugauggugaccgacggcagcgccagcggcgugagcgagugcagauuccugaagaucagagagggcagaaucaucaaggagaucuuccccaccggcagagugaagcacaccgaggagugcaccugcggcuucgccagcaacaagaccaucgagugcgccugcagagacaacagcuacaccgccaagagacccuucgugaagcugaacguggagaccgacaccgccgagaucagacugaugugcaccgacaccuaccuggacacccccagacccgacgacggcagcaucaccggccccugcgagagcaacggcgacaagggcagcggcggcaucaagggcggcuucgugcaccagagaauggccagcaagaucggcagaugguacagcagaaccaugagcaagaccgagagaaugggcaugggccuguacgugaaguacgacggcgaccccugggccgacagcgacgcccuggccuucagcggcgugauggugagcaugaaggagcccggcugguacagcuucggcuucgagaucaaggacaagaagugcgacgugcccugcaucggcaucgagauggugcacgacggcggcaaggagaccuggcacagcgccgccaccgccaucuacugccugaugggcagcggccagcugcugugggacaccgugaccggcguggacauggcccuguga

SEQ ID NO: 189474 - RNA, 1401 nt, Artificial Sequence; identical to SEQ ID NO: 189472
  derived and/or modified CDS sequence (opt4) from neuraminidase__InfluenzaB__AGX19462

SEQ ID NO: 189475 - RNA, 1401 nt, Artificial Sequence; identical to SEQ ID NO: 189472
  derived and/or modified CDS sequence (opt4) from neuraminidase__InfluenzaB__AGX19473

SEQ ID NO: 189476 - RNA, 1401 nt, Artificial Sequence; identical to SEQ ID NO: 189021
  derived and/or modified CDS sequence (opt4) from neuraminidase__InfluenzaB__AGX19484

SEQ ID NO: 189477 - RNA, 1401 nt, Artificial Sequence; identical to SEQ ID NO: 189473
  derived and/or modified CDS sequence (opt4) from neuraminidase__InfluenzaB__AGX19495

SEQ ID NO: 189478 - RNA, 1401 nt, Artificial Sequence; identical to SEQ ID NO: 189021
  derived and/or modified CDS sequence (opt4) from neuraminidase__InfluenzaB__AGX19506

SEQ ID NO: 189479 - RNA, 1401 nt, Artificial Sequence; identical to SEQ ID NO: 189021
  derived and/or modified CDS sequence (opt4) from neuraminidase__InfluenzaB__AGX19517

SEQ ID NO: 189480 - RNA, 1401 nt, Artificial Sequence; identical to SEQ ID NO: 189021
  derived and/or modified CDS sequence (opt4) from neuraminidase__InfluenzaB__AGX19528

SEQ ID NO: 189481 - RNA, 1401 nt, Artificial Sequence; identical to SEQ ID NO: 189473
  derived and/or modified CDS sequence (opt4) from neuraminidase__InfluenzaB__AGX19539

SEQ ID NO: 189482 - RNA, 1401 nt, Artificial Sequence
  derived and/or modified CDS sequence (opt4) from neuraminidase__InfluenzaB__AGX19550
augcugcccagcaccauccagacccugacccuguuccugaccagcggcggcgugcugcugagccuguacgugagcgccagccugagcuaccugcuguacagcgacauccugcugaaguucagccccaccgagaucaccgcccccaccaugccccuggacugcgccaacgccagcaacgugcacgccgugaaccacagcgccaccaagggcgugacccugcugcugcccgagcccgaguggaccuaccccagacugagcugccccggcagcaccuuccagaaggcccugcugaucagcccccacagauucggcgagaccaagggcaacagcgccccccugaucaucagagagcccuucaucgccugcggccccaacgagugcaagcacuucgcccugacccacuacgccgcccagcccggcggcuacuacaacggcaccagaggcgacagaaacaagcugagacaccugaucagcgugaagcugggcaagauccccaccguggagaacagcaucuuccacauggccgccuggagcggcagcgccugccacgacggcaaggaguggaccuacaucggcguggacggccccgacaacaacgcccugcugaagaucaaguacggcgaggccuacaccgacaccuaccacagcuacgccaacaacauccugagaacccaggagagcgccugcaacugcaucggcggcaacugcuaccugauggugaccgacggcagcgccagcggcgugagcgagugcagauuccugaagaucagagagggcagaaucaucaaggagaucuuccccaccggcagagugaagcacaccgaggagugcaccugcggcuucgccagcaacaagaccaucgagugcgccugcagagacaacagcuacaccgccaagagacccuucgugaagcugaacguggagaccgacaccgccgagaucagacugaugugcaccgacaccuaccuggacacccccagacccgacgacggcagcaucaccggccccugcgagagcaacggcgacaagggcagcggcggcaucaagggcggcuucgugcaccagagaauggccagcaagaucggcagaugguacagcagaaccaugagcaagaccgagagaaugggcaugggccuguacgugaaguacgacggcgaccccugggccgacagcgacgcccuggccuucagcggcgugauggugagcaugaacgagcccggcugguacagcuucggcuucgagaucaaggacaagaagugcgacgugcccugcaucggcaucgagauggugcacgacggcggcaaggagaccuggcacagcgccgccaccgccaucuacugccugaugggcagcggccagcugcugugggacaccgugaccggcguggacauggcccuguga

SEQ ID NO: 189483 - RNA, 1401 nt, Artificial Sequence
  derived and/or modified CDS sequence (opt4) from neuraminidase__InfluenzaB__AGX19561
augcugcccagcaccauccagacccugacccuguuccugaccagcggcggcgugcugcugagccuguacgugagcgccagccugagcuaccugcuguacagcgacauccugcugaaguucagccccaccgagaucaccgcccccaccaugccccuggacugcgccaacgccagcaacgugcacgccgugaaccacagcgccaccaagggcgugacccugcugcugcccgagcccgaguggaccuaccccagacugagcugccccggcagcaccuuccagaaggcccugcugaucagcccccacagauucggcgagaccaagggcaacagcgccccccugaucaucagagagcccuucaucgccugcggccccaacgagugcaagcacuucgcccugacccacuacgccgcccagcccagaggcuacuacaacggcaccagaggcgacagaaacaagcugagacaccugaucagcgugaagcugggcaagauccccaccguggagaacagcaucuuccacauggccgccuggagcggcagcgccugccacgacggcaaggaguggaccuacaucggcguggacggccccgacaacaacgcccugcugaagaucaaguacggcgaggccuacaccgacaccuaccacagcuacgccaacaacauccugagaacccaggagagcgccugcaacugcaucggcggcaacugcuaccugauggugaccgacggcagcgccagcggcgugagcgagugcagauuccugaagaucagagagggcagaaucaucaaggagaucuuccccaccggcagagugaagcacaccgaggagugcaccugcggcuucgccagcaacaagaccaucgagugcgccugcagagacaacagcuacaccgccaagagacccuucgugaagcugaacguggagaccgacaccgccgagaucagacugaugugcaccgacaccuaccuggacacccccagacccgacgacggcagcaucaccggccccugcgagagcaacggcgacaagggcagcggcggcaucaagggcggcuucgugcaccagagaauggccagcaagaucggcagaugguacagcagaaccaugagcaagaccgagagaaugggcaugggccuguacgugaaguacgacggcgaccccugggccgacagcgacgcccuggccuucagcggcgugauggugagcaugaaggagcccggcugguacagcuucggcuucgagaucaaggacaagaagugcgacgugcccugcaucggcaucgagauggugcacgacggcggcaaggagaccuggcacagcgccgccaccgccaucuacugccugaugggcagcggccagcugcugugggacaccgugaccggcguggacauggcccuguga

SEQ ID NO: 189484 - RNA, 1401 nt, Artificial Sequence
  derived and/or modified CDS sequence (opt4) from neuraminidase__InfluenzaB__AGX19572
augcugcccagcaccauccagacccugacccuguuccugaccagcggcggcgugcugcugagccuguacgugagcgccagccugagcuaccugcuguacagcgacauccugcugaaguucagccccaccgagaucaccgcccccaccaugccccuggacugcgccaacgccagcaacgugcaggccgugaacagaagcgccaccaagggcgugacccugcugcugcccgagcccgaguggaccuaccccagacugagcugccccggcagcaccuuccagaaggcccugcugaucagcccccacagauucggcgagaccaagggcaacagcgccccccugaucaucagagagcccuucaucgccugcggccccaacgagugcaagcacuucgcccugacccacuacgccgcccagcccggcggcuacuacaacggcaccagaggcgacagaaacaagcugagacaccugaucagcgugaagcugggcaagauccccaccguggagaacagcaucuuccacauggccgccuggagcggcagcgccugccacgacggcaaggaguggaccuacaucggcguggacggccccgacaacaacgcccugcugaaggugaaguacggcgaggccuacaccgacaccuaccacagcuacgccaacaagauccugagaacccaggagagcgccugcaacugcaucggcggcaacugcuaccugaugaucaccgacggcagcgccagcggcgugagcgagugcagauuccugaagaucagagagggcagaaucaucaaggagaucuuccccaccggcagagugaagcacaccgaggagugcaccugcggcuucgccagcaacaagaccaucgagugcgccugcagagacaacagcuacaccgccaagagacccuucgugaagcugaacguggagaccgacaccgccgagaucagacugaugugcaccgacaccuaccuggacacccccagacccaacgacggcagcaucaccggccccugcgagagcaacggcgacaagggcagcggcggcaucaagggcggcuucgugcaccagagaauggagagcaagaucggcagaugguacagcagaaccaugagcaagaccgagagaaugggcaugggccuguacgugaaguacgacggcgaccccugggccgacagcgacgcccuggccuucagcggcgugauggugagcaugaaggagcccggcugguacagcuucggcuucgagaucaaggacaagaagugcgacgugcccugcaucggcaucgagauggugcacgacggcggcaaggagaccuggcacagcgccgccaccgccaucuacugccugaugggcagcggccagcugcugugggacaccgugaccggcgugaacauggcccuguga

SEQ ID NO: 189485 - RNA, 1401 nt, Artificial Sequence; identical to SEQ ID NO: 189021
  derived and/or modified CDS sequence (opt4) from neuraminidase__InfluenzaB__AGX19583

SEQ ID NO: 189486 - RNA, 1401 nt, Artificial Sequence; identical to SEQ ID NO: 189021
  derived and/or modified CDS sequence (opt4) from neuraminidase__InfluenzaB__AGX19594

SEQ ID NO: 189487 - RNA, 1401 nt, Artificial Sequence; identical to SEQ ID NO: 189021
  derived and/or modified CDS sequence (opt4) from neuraminidase__InfluenzaB__AGX19605

SEQ ID NO: 189488 - RNA, 1401 nt, Artificial Sequence; identical to SEQ ID NO: 189021
  derived and/or modified CDS sequence (opt4) from neuraminidase__InfluenzaB__AGX19616

SEQ ID NO: 189489 - RNA, 1401 nt, Artificial Sequence; identical to SEQ ID NO: 189473
  derived and/or modified CDS sequence (opt4) from neuraminidase__InfluenzaB__AGX19627

SEQ ID NO: 189490 - RNA, 1401 nt, Artificial Sequence; identical to SEQ ID NO: 189021
  derived and/or modified CDS sequence (opt4) from neuraminidase__InfluenzaB__AGX19638

SEQ ID NO: 189491 - RNA, 1401 nt, Artificial Sequence; identical to SEQ ID NO: 189473
  derived and/or modified CDS sequence (opt4) from neuraminidase__InfluenzaB__AGX19649

SEQ ID NO: 189492 - RNA, 1401 nt, Artificial Sequence; identical to SEQ ID NO: 189473
  derived and/or modified CDS sequence (opt4) from neuraminidase__InfluenzaB__AGX19660

SEQ ID NO: 189493 - RNA, 1401 nt, Artificial Sequence; identical to SEQ ID NO: 189021
  derived and/or modified CDS sequence (opt4) from neuraminidase__InfluenzaB__AGX19671

SEQ ID NO: 189494 - RNA, 1401 nt, Artificial Sequence; identical to SEQ ID NO: 189021
  derived and/or modified CDS sequence (opt4) from neuraminidase__InfluenzaB__AGX19682

SEQ ID NO: 189495 - RNA, 1401 nt, Artificial Sequence; identical to SEQ ID NO: 189473
  derived and/or modified CDS sequence (opt4) from neuraminidase__InfluenzaB__AGX19704

SEQ ID NO: 189496 - RNA, 1401 nt, Artificial Sequence
  derived and/or modified CDS sequence (opt4) from neuraminidase__InfluenzaB__AGX19715
augcugcccagcaccauccagacccugacccuguuccugaccagcggcggcgugcugcugagccuguacgugagcgccagccugagcuaccugcuguacagcgacauccugcugaaguucagccccaccgagaucaccgcccccaccaugccccuggacugcgccaacgccagcaacgugcacgccgugaacagaagcaccaccaagggcgugacccugcugcugcccgagcccgaguggaccuaccccagacugagcugccccggcagcaccuuccagaaggcccugcugaucagcccccacagauucggcgagaccaagggcaacagcgccccccugaucaucagagagcccuucaucgccugcggccccaacgagugcaagcacuucgcccugacccacuacgccgcccagcccggcggcuacuacaacggcaccagaggcgacagaaacaagcugagacaccugaucagcgugaagcugggcaagauccccaccguggagaacagcaucuuccacauggccgccuggagcggcagcgccugccacgacggcaaggaguggaccuacaucggcguggacggccccgacaacaacgcccugcugaagaucaaguacggcgaggccuacaccgacaccuaccacagcuacgccaacaacauccugagaacccaggagagcgccugcaacugcaucggcggcaacugcuaccugaugaucaccgacggcagcgccagcggcgugagcgagugcagauuccugaagaucagagagggcagaaucaucaaggagaucuuccccaccggcagagugaagcacaccgaggagugcaccugcggcuucgccagcaacaagaccaucgagugcgccugcagagacaacagcuacaccgccaagagacccuucgugaagcugaacguggagaccgacaccgccgagaucagacugaugugcaccgacaccuaccuggacacccccagacccgacgacggcagcaucaccggccccugcgagagcaacggcgacaagggcagcggcggcaucaagggcggcuucgugcaccagagaauggccagcaagaucggcagaugguacagcagaaccaugagcaagaccgagagaaugggcaugggccuguacgugaaguacgacggcgaccccugggccgacagcgacgcccuggccuucagcggcgugauggugagcaugaaggagcccggcugguacagcuucggcuucgagaucaaggacaagaagugcgacgugcccugcaucggcaucgagauggugcacgacggcggcaaggagaccuggcacagcgccgccaccgccaucuacugccugaugggcagcggccagcugcugugggacaccgugaccggcguggacauggcccuguga

SEQ ID NO: 189497 - RNA, 1401 nt, Artificial Sequence; identical to SEQ ID NO: 189021
  derived and/or modified CDS sequence (opt4) from neuraminidase__InfluenzaB__AGX19726

SEQ ID NO: 189498 - RNA, 1401 nt, Artificial Sequence; identical to SEQ ID NO: 189021
  derived and/or modified CDS sequence (opt4) from neuraminidase__InfluenzaB__AGX19737

SEQ ID NO: 189499 - RNA, 1401 nt, Artificial Sequence; identical to SEQ ID NO: 189021
  derived and/or modified CDS sequence (opt4) from neuraminidase__InfluenzaB__AGX19748

SEQ ID NO: 189500 - RNA, 1401 nt, Artificial Sequence; identical to SEQ ID NO: 189473
  derived and/or modified CDS sequence (opt4) from neuraminidase__InfluenzaB__AGX19759

SEQ ID NO: 189501 - RNA, 1401 nt, Artificial Sequence; identical to SEQ ID NO: 189021
  derived and/or modified CDS sequence (opt4) from neuraminidase__InfluenzaB__AGX19770

SEQ ID NO: 189502 - RNA, 1401 nt, Artificial Sequence; identical to SEQ ID NO: 189021
  derived and/or modified CDS sequence (opt4) from neuraminidase__InfluenzaB__AGX19781

SEQ ID NO: 189503 - RNA, 1401 nt, Artificial Sequence; identical to SEQ ID NO: 189021
  derived and/or modified CDS sequence (opt4) from neuraminidase__InfluenzaB__AGX19792

SEQ ID NO: 189504 - RNA, 1401 nt, Artificial Sequence; identical to SEQ ID NO: 189021
  derived and/or modified CDS sequence (opt4) from neuraminidase__InfluenzaB__AGX19803

SEQ ID NO: 189505 - RNA, 1401 nt, Artificial Sequence; identical to SEQ ID NO: 189021
  derived and/or modified CDS sequence (opt4) from neuraminidase__InfluenzaB__AGX19814

SEQ ID NO: 189506 - RNA, 1401 nt, Artificial Sequence
  derived and/or modified CDS sequence (opt4) from neuraminidase__InfluenzaB__AGX19825
augcugcccagcaccauccagacccugacccuguuccugaccagcggcggcgugcugcugagccuguacgugagcgccagccugagcuaccugcuguacagcgacauccugcugaaguucagccccaccgagaucaccgcccccaccaugccccuggacugcgccaacgccagcaacgugcacgccgugaaccacagcgccaccaagggcgugacccugcugcugcccgagcccgaguggaccuaccccagacugagcugccccggcagcaccuuccagaaggcccugcugaucagcccccacagauucggcgagaccaagggcaacagcgccccccugaucaucagagagcccuucaucgccugcggccccaacgagugcaagcacuucgcccugacccacuacgccgcccagcccggcggcuacuacaacggcaccagaggcgacagaaacaagcugagacaccugaucagcgugaagcugggcaagauccccaccguggagaacagcaucuuccacauggccgccuggagcggcagcgccugccacgacggcaaggaguggaccuacaucggcguggacggccccgacaacaacgcccugcugaagaucaaguacggcgaggccuacaccgacaccuaccacagcuacgccaacaacauccugagaacccaggagagcgccugcaacugcaucggcggcaacugcuaccugauggugaccgacggcagcgccagcggcgugagcgagugcagauuccugaagaucagagagggcagaaucaucaaggagaucuuccccaccggcagagugaagcacaccgaggagugcaccugcggcuucgccaacaacaagaccaucgagugcgccugcagagacaacagcuacaccgccaagagacccuucgugaagcugaacguggagaccgacaccgccgagaucagacugaugugcaccgacaccuaccuggacacccccagacccgacgacggcagcaucaccggccccugcgagagcaacggcgacaagggcagcggcggcaucaagggcggcuucgugcaccagagaauggccagcaagaucggcagaugguacagcagaaccaugagcaagaccgagagaaugggcaugggccuguacgugaaguacgacggcgaccccugggccgacagcgacgcccuggccuucagcggcgugauggugagcaugaaggagcccggcugguacagcuucggcuucgagaucaaggacaagaagugcgacgugcccugcaucggcaucgagauggugcacgacggcggcaaggagaccuggcacagcgccgccaccgccaucuacugccugaugggcagcggccagcugcugugggacaccgugaccggcguggacauggcccuguga

SEQ ID NO: 189507 - RNA, 1401 nt, Artificial Sequence; identical to SEQ ID NO: 189021
  derived and/or modified CDS sequence (opt4) from neuraminidase__InfluenzaB__AGX19836

SEQ ID NO: 189508 - RNA, 1401 nt, Artificial Sequence; identical to SEQ ID NO: 189021
  derived and/or modified CDS sequence (opt4) from neuraminidase__InfluenzaB__AGX19847

SEQ ID NO: 189509 - RNA, 1401 nt, Artificial Sequence; identical to SEQ ID NO: 189021
  derived and/or modified CDS sequence (opt4) from neuraminidase__InfluenzaB__AGX19858

SEQ ID NO: 189510 - RNA, 1401 nt, Artificial Sequence; identical to SEQ ID NO: 189021
  derived and/or modified CDS sequence (opt4) from neuraminidase__InfluenzaB__AGX19869

SEQ ID NO: 189511 - RNA, 1401 nt, Artificial Sequence; identical to SEQ ID NO: 189021
  derived and/or modified CDS sequence (opt4) from neuraminidase__InfluenzaB__AGX19880

SEQ ID NO: 189512 - RNA, 1401 nt, Artificial Sequence; identical to SEQ ID NO: 189021
  derived and/or modified CDS sequence (opt4) from neuraminidase__InfluenzaB__AGX19891

SEQ ID NO: 189513 - RNA, 1401 nt, Artificial Sequence; identical to SEQ ID NO: 189021
  derived and/or modified CDS sequence (opt4) from neuraminidase__InfluenzaB__AGX19902

SEQ ID NO: 189514 - RNA, 1401 nt, Artificial Sequence
  derived and/or modified CDS sequence (opt4) from neuraminidase__InfluenzaB__AGX19913
augcugcccagcaccauccagacccugacccuguuccugaccagcggcggcgugcugcugagccuguacgugagcgccagccugagcuaccugcuguacagcgacauccugcugaaguucagccccaccgagaucaccgcccccaccaugccccuggacugcgccaacgccagcaacgugcacgccaugaaccacagcgccaccaagggcgugacccugcugcugcccgagcccgaguggaccuaccccagacugagcugccccggcagcaccuuccagaaggcccugcugaucagcccccacagauucggcgagaccaagggcaacagcgccccccugaucaucagagagcccuucaucgccugcggccccaacgagugcaagcacuucgcccugacccacuacgccgcccagcccggcggcuacuacaacggcaccagaggcgacagaaacaagcugagacaccugaucagcgugaagcugggcaagauccccaccguggagaacagcaucuuccacauggccgccuggagcggcagcgccugccacgacggcaaggaguggaccuacaucggcguggacggccccgacaacaacgcccugcugaagaucaaguacggcgaggccuacaccgacaccuaccacagcuacgccaacaacauccugagaacccaggagagcgccugcaacugcaucggcggcaacugcuaccugauggugaccgacggcagcgccagcggcgugagcgagugcagauuccugaagaucagagagggcagaaucaucaaggagaucuuccccaccggcagagugaagcacaccgaggagugcaccugcggcuucgccagcaacaagaccaucgagugcgccugcagagacaacagcuacaccgccaagagacccuucgugaagcugaacguggagaccgacaccgccgagaucagacugaugugcaccgacaccuaccuggacacccccagacccgacgacggcagcaucaccggccccugcgagagcaacggcgacaagggcagcggcggcaucaagggcggcuucgugcaccagagaauggccagcaagaucggcagaugguacagcagaaccaugagcaagaccgagagaaugggcaugggccuguacgugaaguacgacggcgaccccugggccgacagcgacgcccuggccuucagcggcgugauggugagcaugaaggagcccggcugguacagcuucggcuucgagaucaaggacaagaagugcgacgugcccugcaucggcaucgagauggugcacgacggcggcaaggagaccuggcacagcgccgccaccgccaucuacugccugaugggcagcggccagcugcugugggacaccgugaccggcguggacauggcccuguga

SEQ ID NO: 189515 - RNA, 1401 nt, Artificial Sequence; identical to SEQ ID NO: 189021
  derived and/or modified CDS sequence (opt4) from neuraminidase__InfluenzaB__AGX19924

SEQ ID NO: 189516 - RNA, 1401 nt, Artificial Sequence; identical to SEQ ID NO: 189021
  derived and/or modified CDS sequence (opt4) from neuraminidase__InfluenzaB__AGX19935

SEQ ID NO: 189517 - RNA, 1401 nt, Artificial Sequence; identical to SEQ ID NO: 189021
  derived and/or modified CDS sequence (opt4) from neuraminidase__InfluenzaB__AGX19946

SEQ ID NO: 189518 - RNA, 1401 nt, Artificial Sequence; identical to SEQ ID NO: 189021
  derived and/or modified CDS sequence (opt4) from neuraminidase__InfluenzaB__AGX19957

SEQ ID NO: 189519 - RNA, 1401 nt, Artificial Sequence
  derived and/or modified CDS sequence (opt4) from neuraminidase__InfluenzaB__AGX19968
augcugcccagcaccauccagacccugacccuguuccugaccagcggcggcgugcugcugagccuguacgugagcgccagccugagcuaccugcuguacagcgacauccugcugaaguucagccccaccgagaucaccgcccccaccaugccccuggacugcgccaacgccagcaacgugcaggccgugaacagaagcgccaccaagggcgugacccugcugcugcccgagcccgaguggaccuaccccagacugagcugccccggcagcaccuuccagaaggcccugcugaucagcccccacagauucggcgagaccaagggcaacagcgccccccugaucaucagagagcccuucaucgccugcggccccaacgagugcaagcacuucgcccugacccacuacgccgcccagcccggcggcuacuacaacggcaccagaggcgacagaaacaagcugagacaccugaucagcgugaagcugggcaagauccccaccguggagaacagcaucuuccacauggccgccuggagcggcagcgccugccacgacggcaaggaguggaccuacaucggcguggacggccccgacaacgacgcccugcugaaggugaaguacggcgaggccuacaccgacaccuaccacagcuacgccaacaagauccugagaacccaggagagcgccugcaacugcaucggcggcaacugcuaccugaugaucaccgacggcagcgccagcggcgugagcgagugcagauuccugaagaucagagagggcagaaucaucaaggagaucuuccccaccggcagagugaagcacaccgaggagugcaccugcggcuucgccagcaacaagaccaucgagugcgccugcagagacaacagcuacaccgccaagagacccuucgugaagcugaacguggagaccgacaccgccgagaucagacugaugugcaccgacaccuaccuggacacccccagacccaacgacggcagcaucaccggccccugcgagagcaacggcgacaagggcagcggcggcaucaagggcggcuucgugcaccagagaauggagagcaagaucggcagaugguacagcagaaccaugagcaagaccgagagaaugggcaugggccuguacgugaaguacgacggcgaccccugggccgacagcgacgcccuggccuucagcggcgugauggugagcaugaaggagcccggcugguacagcuucggcuucgagaucaaggacaagaagugcgacgugcccugcaucggcaucgagauggugcacgacggcggcaaggagaccuggcacagcgccgccaccgccaucuacugccugaugggcagcggccagcugcugugggacaccgugaccggcgugaacauggcccuguga

SEQ ID NO: 189520 - RNA, 1401 nt, Artificial Sequence; identical to SEQ ID NO: 189473
  derived and/or modified CDS sequence (opt4) from neuraminidase__InfluenzaB__AGX19979

SEQ ID NO: 189521 - RNA, 1401 nt, Artificial Sequence; identical to SEQ ID NO: 189473
  derived and/or modified CDS sequence (opt4) from neuraminidase__InfluenzaB__AGX19990

SEQ ID NO: 189522 - RNA, 1401 nt, Artificial Sequence; identical to SEQ ID NO: 189021
  derived and/or modified CDS sequence (opt4) from neuraminidase__InfluenzaB__AGX20001

SEQ ID NO: 189523 - RNA, 1401 nt, Artificial Sequence; identical to SEQ ID NO: 189021
  derived and/or modified CDS sequence (opt4) from neuraminidase__InfluenzaB__AGX20012

SEQ ID NO: 189524 - RNA, 1401 nt, Artificial Sequence; identical to SEQ ID NO: 189021
  derived and/or modified CDS sequence (opt4) from neuraminidase__InfluenzaB__AGX20023

SEQ ID NO: 189525 - RNA, 1401 nt, Artificial Sequence; identical to SEQ ID NO: 189021
  derived and/or modified CDS sequence (opt4) from neuraminidase__InfluenzaB__AGX20034

SEQ ID NO: 189526 - RNA, 1401 nt, Artificial Sequence; identical to SEQ ID NO: 189021
  derived and/or modified CDS sequence (opt4) from neuraminidase__InfluenzaB__AGX20045

SEQ ID NO: 189527 - RNA, 1401 nt, Artificial Sequence
  derived and/or modified CDS sequence (opt4) from neuraminidase__InfluenzaB__AGX20056
augcugcccagcaccauccagacccugacccuguuccugaccagcggcggcgugcugcugagccuguacgugagcgccagccugagcuaccugcuguacagcgacauccugcugaaguucagccccaccgagaucaccgcccccaccaugccccuggacugcgccaacgccagcaacgugcaggccgugaacagaagcgccaccaagggcgugacccugcugcugcccgagcccgaguggaccuaccccagacugagcugccccggcagcaccuuccagaaggcccugcugaucagcccccacagauucggcgagaccaagggcaacagcgccccccugaugaucagagagcccuucaucgccugcggccccaacgagugcaagcacuucgcccugacccacuacgccgcccagcccggcggcuacuacaacggcaccagaggcgacagaaacaagcugagacaccugaucagcgugaagcugggcaagauccccaccguggagaacagcaucuuccacauggccgccuggagcggcagcgccugccacgacggcaaggaguggaccuacaucggcguggacggccccgacaacaacgcccugcugaaggugaaguacggcgaggccuacaccgacaccuaccacagcuacgccaacaagauccugagaacccaggagagcgccugcaacugcaucggcggcaacugcuaccugauggugaccgacggcagcgccagcggcgugagcgagugcagauuccugaagaucagagagggcagaaucaucaaggagaucuuccccaccggcagagugaagcacaccgaggagugcaccugcggcuucgccagcaacaagaccaucgagugcgccugcagagacaacagcuacaccgccaagagacccuucgugaagcugaacguggagaccgacaccgccgagaucagacugaugugcaccgacaccuaccuggacacccccagacccaacgacggcagcaucaccggccccugcgagagcaacggcgacaagggcagcggcggcaucaagggcggcuucgugcaccagagaauggagagcaagaucggcagaugguacagcagaaccaugagcaagaccgagagaaugggcaugggccuguacgugaaguacgacggcgaccccugggccgacagcgacgcccuggccuucagcggcgugauggugagcaugaaggagcccggcugguacagcuucggcuucgagaucaaggacaagaagugcgacgugcccugcaucggcaucgagauggugcacgacggcggcaaggagaccuggcacagcgccgccaccgccaucuacugccugaugggcagcggccagcugcugugggacaccgugaccggcguggacauggcccuguga

SEQ ID NO: 189528 - RNA, 1401 nt, Artificial Sequence
  derived and/or modified CDS sequence (opt4) from neuraminidase__InfluenzaB__AGX20067
augcugcccagcaccauccagacccugacccuguuccugaccagcggcggcgugcugcugagccuguacgugagcgccagccugagcuaccugcuguacagcgacauccugcugaaguucagccccaccgagaucaccgcccccaccaugccccuggacugcgccaacgccagcaacgugcaggccgugaacagaagcgccaccaagggcgugacccugcugcugcccgagcccgaguggaccuaccccagacugagcugccccggcagcaccuuccagaaggcccugcugaucagcccccacagauucggcgagaccaagggcaacagcgccccccugaucaucagagagcccuucaucgccugcggccccaacgagugcaagcacuucgcccugacccacuacgccgcccagcccggcggcuacuacaacggcaccagaggcgacagaaacaagcugagacaccugaucagcgugaagcugggcaagauccccaccguggagaacagcaucuuccacauggccgccuggagcggcagcgccugccacgacggcaaggaguggaccuacaucggcguggacggccccgacaacaacgcccugcugaaggugaaguacggcgaggccuacaccgacaccuaccacagcuacgccaacaagauccugagaacccaggagagcgccugcaacugcaucggcggcaacugcuaccugauggugaccgacggcagcgccagcggcgugagcgagugcagauuccugaagaucagagagggcagaaucaucaaggagaucuuccccaccggcagagugaagcacaccgaggagugcaccugcggcuucgccagcaacaagaccaucgagugcgccugcagagacaacagcuacaccgccaagagacccuucgugaagcugaacguggagaccgacaccgccgagaucagacugaugugcaccgacaccuaccuggacacccccagacccaacgacggcagcaucaccggccccugcgagagcaacggcgacaagggcagcggcggcaucaagggcggcuucgugcaccagagaauggagagcaagaucggcagaugguacagcagaaccaugagcaagaccgagagaaugggcaugggccuguacgugaaguacgacggcgaccccugggccgacagcgacgcccuggccuucagcggcgugauggugagcaugaaggagcccggcugguacagcuucggcuucgagaucaaggacaagaagugcgacgugcccugcaucggcaucgagauggugcacgacggcggcaaggagaccuggcacagcgccgccaccgccaucuacugccugaugggcagcggccagcugcugugggacaccgugaccggcguggacauggcccuguga

SEQ ID NO: 189529 - RNA, 1401 nt, Artificial Sequence; identical to SEQ ID NO: 189021
  derived and/or modified CDS sequence (opt4) from neuraminidase__InfluenzaB__AGX20078

SEQ ID NO: 189530 - RNA, 1401 nt, Artificial Sequence; identical to SEQ ID NO: 189021
  derived and/or modified CDS sequence (opt4) from neuraminidase__InfluenzaB__AGX20089

SEQ ID NO: 189531 - RNA, 1401 nt, Artificial Sequence
  derived and/or modified CDS sequence (opt4) from neuraminidase__InfluenzaB__AGX20100
augcugcccagcaccauccagacccugacccuguuccugaccagcggcggcgugcugcugagccuguacgugagcgccagccugagcuaccugcuguacagcgacauccugcugaaguuccccagcaccgagaucaccgcccccaccaugccccuggacugcgccaacgccagcaacgugcaggccgugaacagaagcgccaccaagggcgugacccugcugcugcccgagcccgaguggaccuaccccagacugagcugccccggcagcaccuuccagaaggcccugcugaucagcccccacagauucggcgagaccaagggcaacagcgccccccugaucaucagagagcccuucaucgccugcggccccaaggagugcaagcacuucgcccugacccacuacgccgcccagcccggcggcuacuacaacggcaccagaggcgacagaaacaagcugagacaccugaucagcgugaagcugggcaagauccccaccguggagaacagcaucuuccacauggccgccuggagcggcagcgccugccacgacggcaaggaguggaccuacaucggcguggacggccccgacaacaacgccgugcugaagaucaaguacggcgaggccuacaccgacaccuaccacagcuacgccaacaacauccugagaacccaggagagcgccugcaacugcaucggcggcaacugcuaccugaugaucaccgacggcagcgccagcggcgugagcgagugcagauuccugaagaucagagagggcagaaucaucaaggagaucuuccccaccggcagaauccagcacaccgaggagugcaccugcggcuucgccagcaacaagaccaucgagugcgccugcagagacaacagcuacaccgccaagagacccuucgugaagcugaacguggagaccgacaccgccgagaucagacugaugugcaccaagaccuaccuggacacccccagacccgacgacggcagcaucaccggccccugcgagagcaacggcggcaagggcagcggcggcaucaagggcggcuucgugcaccagagaauggccagcaagaucggcagaugguacagcagaaccaugagcaagaccgagagaaagggcaugggccuguacgugaaguacgacggcgaccccugggccgacagcgacgcccuggccuucagcggcgugauggugagcauggaggagcccggcugguacagcuucggcuucgagaucaaggacaagaagugcgacgugcccugcaucggcaucgagauggugcacgacggcggcaaggagaccuggcacagcgccgccaccgccaucuacugccugaugggcagcggccagcugcugugggacaccgugaccggcgugaacauggcccuguga

SEQ ID NO: 189532 - RNA, 1401 nt, Artificial Sequence
  derived and/or modified CDS sequence (opt4) from neuraminidase__InfluenzaB__AGX20111
augcugcccagcaccauccagacccugacccuguuccugaccagcggcggcgugcugcugagccuguacgugagcgccagccugagcuaccugcuguacagcgacauccugcugaaguucagccccaccgagaucaccgcccccaccaugccccuggacugcgccaacgccagcaacgugcaggccgugaacagaagcgccaccaagggcgugacccugcugcugcccgagcccgaguggaccuaccccagacugagcugccccggcagcaccuuccagaaggcccugcugaucagcccccacagauucggcgagaccaagggcaacagcgccccccugaucaucagagagcccuucaucgccugcggccccaacgagugcaagcacuucgcccugacccacuacgccgcccagcccggcggcuacuacaacggcaccagaggcgacagaaacaagcugagacaccugaucagcgugaagcugggcaagauccccaccguggagaacagcaucuuccacauggccgccuggagcggcagcgccugccacgacggcaaggaguggaccuacaucggcguggacggccccgacaacaacgcccugcugaaggugaaguacggcgaggccuacaccgacaccuaccacagcuacgccaacaagauccugagaacccaggagagcgccugcaacugcaucggcggcaacugcuaccugaugaucaccgacggcagcgccagcggcgugagcgagugcagauuccugaagaucagagagggcagaaucaucaaggagaucuuccccaccggcagagugaagcacaccgaggagugcaccugcggcuucgccagcaacaagaccaucgagugcgccugcagagacaacagcuacaccgccaagagacccuucgugaagcugaacguggagaccgacaccgccgagaucagacugaugugcaccgacaccuaccuggacacccccagacccgacgacggcagcaucaccggccccugcgagagcaacggcgacaagggcagcggcggcaucaagggcggcuucgugcaccagagaauggagagcaagaucggcagaugguacagcagaaccaugagcaagaccgagagaaugggcaugggccuguacgugaaguacgacggcgaccccugggccgacagcgacgcccugaccuucagcggcgugauggugagcaugaaggagcccggcugguacagcuucggcuucgagaucaaggacaagaagugcgacgugcccugcaucggcaucgagauggugcacgacggcggcaaggagaccuggcacagcgccgccaccgccaucuacugccugaugggcagcggccagcugcugugggacaccgugaccggcguggacauggcccuguga

SEQ ID NO: 189533 - RNA, 1401 nt, Artificial Sequence
  derived and/or modified CDS sequence (opt4) from neuraminidase__InfluenzaB__AGX20122
augcugcccagcaccauccagacccugacccuguuccugaccagcggcggcgugcugcugagccuguacgugagcgcccugcugagcuaccugcuguacagcgacauccugcugaaguucagccccaccgagaucaccgcccccaccaugagccuggacugcgccaacgccagcaacgugcaggccgugaacagaagcgccaccaagggcgugaccuuccugcugcccgagcccgaguggaccuaccccagacugagcugccccggcagcaccuuccagagagcccugcugaucagcccccacagauucggcgagaccaagggcaacagcgccccccugaucaucagagagcccuucaucgccugcggccccaacgagugcaagcacuucgcccugacccacuacgccgcccagcccggcggcuacuacaacggcaccagaggcgacagaaacaagcugagacaccugaucagcgugaagcugggcaagauccccaccguggagaacagcaucuuccacauggccgccuggagcggcagcgccugccacgacggcaaggaguggaccuacaucggcguggacggccccgacaacgacgcccugcugaaggugaaguacggcgaggccuacaccgacaccuaccacagcuacgccaacaagauccugagaacccaggagagcgccugcaacugcaucggcggcaacugcuaccugaugaucaccgacggcagcgccagcggcgugagcgagugcagauuccugaagaucagagagggcagaaucaucaaggagaucuuccccaccggcagagugaagcacaccgaggagugcaccugcggcuucgccagcaacaagaccaucgagugcgccugcagagacaacagcuacaccgccaagagacccuucgugaagcugaacguggagaccgacaccgccgagaucagacugaugugcaccgacaccuaccuggacacccccagacccgacgacggcagcaucaccggccccugcgagagcaacggcgacaagggcagcggcggcaucaagggcggcuucgugcaccagagaauggagagcaagaucggcagaugguacagcagaaccaugagcaagaccgagagaaugggcaugggccuguacgugaaguacgacggcgaccccugggccgacagcgacgcccuggccuucagcggcgugauggugagcaugaaggagcccggcugguacagcuucggcuucgagaucaaggacaagaagugcgacgugcccugcaucggcaucgagauggugcacgacggcggcaaggagaccuggcacagcgccgccaccgccaucuacugccugaugggcagcggccagcugcugugggacaccgugaccggcguggacauggcccuguga

SEQ ID NO: 189534 - RNA, 1401 nt, Artificial Sequence
  derived and/or modified CDS sequence (opt4) from neuraminidase__InfluenzaB__AGX20133
augcugcccagcaccauccagacccugacccuguuccugaccagcggcggcgugcugcugagccuguacgugagcgcccugcugagcuaccugcuguacagcgacgugcugcugaaguucagccccaccgagaucaccgcccccaccaugagccuggacugcgccaacgccagcaacgugcaggccgugaacagaagcgccaccaagggcgugaccuuccugcugcccgagcccgaguggaccuaccccagacugagcugccccggcagcaccuuccagaaggcccugcugaucagcccccacagauucggcgagaccaagggcaacagcgccccccugaucaucagagagcccuucaucgccugcggccccaacgagugcaagcacuucgcccugacccacuacgccgcccagcccggcggcuacuacaacggcaccagaggcgacagaaacaagcugagacaccugaucagcgugaagcugggcaagauccccaccguggagaacagcaucuuccacauggccgccuggagcggcagcgccugccacgacggcaaggaguggaccuacaucggcguggacggccccgacaacgacgcccugcugaaggugaaguacggcgaggccuacaccgacaccuaccacagcuacgccaacaagauccugagaacccaggagagcgccugcaacugcaucggcggcaacugcuaccugaugaucaccgacggcagcgccagcggcgugagcgagugcagauuccugaagaucagagagggcagaaucaucaaggagaucuuccccaccggcagagugaagcacaccgaggagugcaccugcggcuucgccagcaacaagaccaucgagugcgccugcagagacaacagcuacaccgccaagagacccuucgugaagcugaacguggagaccgacaccgccgagaucagacugaugugcaccgacaccuaccuggacacccccagacccgacgacggcagcaucaccggccccugcgagagcaacggcgacaagggcagcggcggcaucaagggcggcuucgugcaccagagaauggagagcaagaucggcagaugguacagcagaaccaugagcaagaccgagagaaugggcaugggccuguacgugaaguacgacggcgaccccugggccgacagcgacgcccuggccuucagcggcgugauggugagcaugaaggagcccggcugguacagcuucggcuucgagaucaaggacaagaagugcgacgugcccugcaucggcaucgagauggugcacgacggcggcaaggagaccuggcacagcgccgccaccgccaucuacugccugaugggcagcggccagcugcugugggacaccgugaccggcguggacauggcccuguga

SEQ ID NO: 189535 - RNA, 1401 nt, Artificial Sequence
  derived and/or modified CDS sequence (opt4) from neuraminidase__InfluenzaB__AGX20144
augcugcccagcaccauccagacccugacccuguuccugaccagcggcggcgugcugcugagccuguacgugagcgcccugcugagcuaccugcuguacagcgacauccugcugaaguucagccccaccgagaucaccgcccccaccaugagccuggacugcgccaacgccagcaacgugcaggccgugaacagaagcgccaccaagggcgugaccuuccugcugcccgagcccgaguggaccuaccccagacugagcugccccggcagcaccuuccagaaggcccugcugaucagcccccacagauucggcgagaccaagggcaacagcgccccccugaucaucagagagcccuucaucgccugcggccccaacgagugcaagcacuucgcccugacccacuacgccgcccagcccggcggcuacuacaacggcaccagaggcgacagaaacaagcugagacaccugaucagcgugaagcugggcaagauccccaccguggagaacagcaucuuccacauggccgccuggagcggcagcgccugccacgacggcaaggaguggaccuacaucggcguggacggccccgacaacgacgcccugcugaaggugaaguacggcgaggccuacaccgacaccuaccacagcuacgccaacaagauccugagaacccaggagagcgccugcaacugcaucggcggcaacugcuaccugaugaucaccgacggcagcgccagcggcaucagcgagugcagauuccugaagaucagagagggcagaaucaucaaggagaucuuccccaccggcagagugaagcacaccgaggagugcaccugcggcuucgccagcaacaagaccaucgagugcgccugcagagacaacagcuacaccgccaagagacccuucgugaagcugaacguggagaccgacaccgccgagaucagacugaugugcaccgacaccuaccuggacacccccagacccgacgacggcagcaucaccggccccugcgagagcaacggcgacaagggcagcggcggcaucaagggcggcuucgugcaccagagaauggagagcaagaucggcagaugguacagcagaaccaugagcaagaccgagagaaugggcaugggccuguacgugaaguacgacggcgaccccugggccgacagcgacgcccuggccuucagcggcgugauggugagcaugaaggagcccggcugguacagcuucggcuucgagaucaaggacaagaagugcgacgugcccugcaucggcaucgagauggugcacgacggcggcaaggagaccuggcacagcgccgccaccgccaucuacugccugaugggcagcggccagcugcugugggacaccgugaccggcguggacauggcccuguga

SEQ ID NO: 189536 - RNA, 1401 nt, Artificial Sequence; identical to SEQ ID NO: 189535
  derived and/or modified CDS sequence (opt4) from neuraminidase__InfluenzaB__AGX20155

SEQ ID NO: 189537 - RNA, 1401 nt, Artificial Sequence; identical to SEQ ID NO: 189535
  derived and/or modified CDS sequence (opt4) from neuraminidase__InfluenzaB__AGX20166

SEQ ID NO: 189538 - RNA, 1401 nt, Artificial Sequence; identical to SEQ ID NO: 188955
  derived and/or modified CDS sequence (opt4) from neuraminidase__InfluenzaB__AGX20177

SEQ ID NO: 189539 - RNA, 1401 nt, Artificial Sequence; identical to SEQ ID NO: 188955
  derived and/or modified CDS sequence (opt4) from neuraminidase__InfluenzaB__AGX20188

SEQ ID NO: 189540 - RNA, 1401 nt, Artificial Sequence; identical to SEQ ID NO: 188932
  derived and/or modified CDS sequence (opt4) from neuraminidase__InfluenzaB__AGX20199

SEQ ID NO: 189541 - RNA, 1401 nt, Artificial Sequence; identical to SEQ ID NO: 188955
  derived and/or modified CDS sequence (opt4) from neuraminidase__InfluenzaB__AGX20210

SEQ ID NO: 189542 - RNA, 1401 nt, Artificial Sequence; identical to SEQ ID NO: 189535
  derived and/or modified CDS sequence (opt4) from neuraminidase__InfluenzaB__AGX20221

SEQ ID NO: 189543 - RNA, 1401 nt, Artificial Sequence
  derived and/or modified CDS sequence (opt4) from neuraminidase__InfluenzaB__AGX20232
augcugcccagcaccauccagacccugacccuguuccugaccagcggcggcgugcugcugagccuguacgugagcgccagccugagcuaccugcuguacagcggcauccugcugaaguucagccccaccgagaucaccgcccccaccaugccccuggacugcgccaacgccagcaacgugcaggccgugaacagaagcgccaccaagggcgugaccuuccugcugcccgagcccgaguggaccuaccccagacugagcugccccggcagcaccuuccagaaggcccugcugaucagcccccacagauucggcgagaccaagggcaacagcgccccccugaucaucagagagcccuucaucgccugcggccccaacgagugcaagcacuucgcccugacccacuacgccgcccagcccggcggcuacuacaacggcaccagaggcgacagaaacaagcugagacaccugaucagcgugaagcugggcaagauccccaccguggagaacagcaucuuccacauggccgccuggagcggcagcgccugccacgacggcaaggaguggaccuacaucggcguggacggccccgacaacaacgcccugcugaaggugaaguacggcgaggccuacaccgacaccuaccacagcuacgccaacaagauccugagaacccaggagagcgccugcaacugcaucggcggcaacugcuaccugaugaucaccgacggcagcgccagcggcgugagcgagugcagauuccugaagaucagagagggcagaaucaucaaggagaucuuccccaccggcagagugaagcacaccgaggagugcaccugcggcuucgccagcaacgagaccaucgagugcgccugcagagacaacagcuacaccgccaagagacccuucgugaagcugaacguggagaccgacaccgccgagaucagacugaugugcaccgacaccuaccuggacacccccagacccaacgacggcagcaucaccggccccugcgagagcaacggcgacaagggcggcggcggcaucaagggcggcuucgugcaccagagaauggagagcaagaucggcagaugguacagcagaaccaugagcaagaccgagagaaugggcaugggccuguacgugaaguacgacggcgaccccugggccgacagcgacgcccuggccuucagcggcgugauggugagcaugaaggagcccggcugguacagcuucggcuucgagaucaaggacaagaagugcgacgugcccugcaucggcaucgagauggugcacgacggcggcaaggagaccuggcacagcgccgccaccgccaucuacugccugaugggcagcggccagcugcugugggacaccgugaccggcguggacauggcccuguga

SEQ ID NO: 189544 - RNA, 1401 nt, Artificial Sequence; identical to SEQ ID NO: 188955
  derived and/or modified CDS sequence (opt4) from neuraminidase__InfluenzaB__AGX20243

SEQ ID NO: 189545 - RNA, 1401 nt, Artificial Sequence; identical to SEQ ID NO: 189535
  derived and/or modified CDS sequence (opt4) from neuraminidase__InfluenzaB__AGX20254

SEQ ID NO: 189546 - RNA, 1401 nt, Artificial Sequence; identical to SEQ ID NO: 188932
  derived and/or modified CDS sequence (opt4) from neuraminidase__InfluenzaB__AGX20265

SEQ ID NO: 189547 - RNA, 1401 nt, Artificial Sequence; identical to SEQ ID NO: 189535
  derived and/or modified CDS sequence (opt4) from neuraminidase__InfluenzaB__AGX20276

SEQ ID NO: 189548 - RNA, 1401 nt, Artificial Sequence; identical to SEQ ID NO: 188955
  derived and/or modified CDS sequence (opt4) from neuraminidase__InfluenzaB__AGX20287

SEQ ID NO: 189549 - RNA, 1401 nt, Artificial Sequence
  derived and/or modified CDS sequence (opt4) from neuraminidase__InfluenzaB__AGX20298
augcugcccagcaccauccagacccugacccuguuccugaccagcggcggcgugcugcugagccuguacgugagcgcccugcugagcuaccugcuguacagcgacauccugcugaaguucagccccaccgagaucaccgcccccaccaugagccuggacugcgccaacgccagcaacgugcaggccgugaacagaagcgccaccaagggcgugaccuuccugcugcccgagcccgaguggaccuaccccagacugagcugccccggcagcaccuuccagaaggcccugcugaucagcccccacagauucggcgagaccaagggcaacagcgccccccugaucaucagagagcccuucaucgccugcggccccaacgagugcaagcacuucgcccugacccacuacgccgcccagcccggcggcuacuacaacggcaccagaggcgacagaaacaagcugagacaccugaucagcgugaagcugggcaagauccccaccguggagaacagcaucuuccacauggccgccuggagcggcagcgccugccacgacggcaaggaguggaccuacaucggcguggacggccccgacaacgacgcccugcugaaggugaaguacggcgaggccuacaccgacaccuaccacagcuacgccaacaagauccugagaacccaggagagcgccugcaacugcaucggcggcaacugcuaccugaugaucaccgacggcagcgccagcggcgugagcgagugcagauuccugaagaucagagagggcagaaucaucaaggagaucuuccccaccggcagagugaagcacaccgaggagugcaccugcggcuucgccagcaacaagaccaucgagugcgccugcagagacaacagcuacaccgccaagagacccuucgugaagcugaacguggagaccgacaccgccgagaucagacugaugugcaccgacaccuaccuggacacccccagacccgacgacggcagcaucaccggccccugcgagagcaacggcgacaagggcagcggcggcaucaagggcggcuucgugcaccagagaauggagagcaagaucggcagaugguacagcagaaccaugagcaagaccgagagaaugggcaugggccuguacgugaaguacgacggcgaccccugggccgacagcgacgcccuggccuucagcggcgugauggugagcaugaaggagcccggcugguacagcuucggcuucgagaucaaggacaagaagugcgacgugcccugcaucggcaucgagauggugcacgacggcggcaaggagaccuggcagagcgccgccaccgccaucuacugccugaugggcagcggccagcugcugugggacaccgugaccggcguggacauggcccuguga

SEQ ID NO: 189550 - RNA, 1401 nt, Artificial Sequence; identical to SEQ ID NO: 188932
  derived and/or modified CDS sequence (opt4) from neuraminidase__InfluenzaB__AGX20320

SEQ ID NO: 189551 - RNA, 1401 nt, Artificial Sequence; identical to SEQ ID NO: 188955
  derived and/or modified CDS sequence (opt4) from neuraminidase__InfluenzaB__AGX20331

SEQ ID NO: 189552 - RNA, 1401 nt, Artificial Sequence
  derived and/or modified CDS sequence (opt4) from neuraminidase__InfluenzaB__AGX20342
augcugcccagcaccauccagacccugacccuguuccugaccagcggcggcgugcugcugagccuguacgugagcgccagccugagcuaccugcuguacagcgacauccugcugaaguucagccccaccgagaucaccgcccccaccaugccccuggacugcgccaacgccagcaacgugcaggccgugaacagaagcgccaccaagggcgugacccugcugcugcccgagcccgaguggaccuaccccagacugagcugccccggcagcaccuuccagaaggcccugcugaucagcccccacagauucggcgagaccaagggcaacagcgccccccugaucaucagagagcccuucaucgccugcggccccaacgagugcaagcacuucgcccugacccacuacgccgcccagcccggcggcuacuacaacggcaccagaggcgacagaaacaagcugagacaccugaucagcgugaagcugggcaagauccccaccguggagaacagcaucuuccacauggccgccuggagcggcagcgccugccacgacggcaaggaguggaccuacaucggcguggacggccccgacaacaacgcccugcugaaggugaaguacggcgaggccuacaccgacaccuaccacagcuacgccaacaagauccugagaacccaggagagcgccugcaacugcaucggcggcaacugcuaccugauggugaccgacggcagcgccagcggcgugagcgagugcagauuccugaagaucagagagggcagaaucaucaaggagaucuuccccaccggcagagugaagcacaccgaggagugcaccugcggcuucgccagcaacaagaccaucgagugcgccugcagagacaacagcuacaccgccaagagacccuucgugaagcugaacguggagaccgacaccgccgagaucagacugaugugcaccgacaccuaccuggacacccccagacccgacgacggcagcaucaccggccccugcgagagcaacggcgacaagggcagcggcggcaucaagggcggcuucgugcaccagagaauggagagcaagaucggcagaugguacagcagaaccaugagcaagaccgagagaaugggcaugggccuguacgugaaguacgacggcgaccccugggccgacagcgacgcccuggccuucagcggcgugauggugagcaugaaggagcccggcugguacagcuucggcuucgagaucaaggacaagaagugcgacgugcccugcaucggcaucgagauggugcacgacggcggcaaggagaccuggcacagcgccgccaccgccaucuacugccugaugggcagcggccagcugcugugggacaccgugaccggcguggacauggcccuguga

SEQ ID NO: 189553 - RNA, 1401 nt, Artificial Sequence
  derived and/or modified CDS sequence (opt4) from neuraminidase__InfluenzaB__AGX20353
augcugcccagcaccauccagacccugacccuguuccugaccagcggcggcgugcugcugagccuguacgugagcgcccugcugagcuaccugcuguacagcgacauccugcugaaguucagccccaccgagaucaucgcccccaccaugagccuggacugcgccaacgccagcaacgugcaggccgugaacagaagcgccaccaagggcgugaccuuccugcugcccgagcccgaguggaccuaccccagacugagcugccccggcagcaccuuccagaaggcccugcugaucagcccccacagauucggcgagaccaagggcaacagcgccccccugaucaucagagagcccuucaucgccugcggccccaacgagugcaagcacuucgcccugacccacuacgccgcccagcccggcggcuacuacaacagaaccagaggcgacagaaacaagcugagacaccugaucagcgugaagcugggcaagauccccaccguggagaacagcaucuuccacauggccgccuggagcggcagcgccugccacgacggcaaggaguggaccuacaucggcguggacggccccgacaacgacgcccugcugaaggugaaguacggcgaggccuacaccgacaccuaccacagcuacgccaacaagauccugagaacccaggagagcgccugcaacugcaucggcggcaacugcuaccugaugaucaccgacggcagcgccagcggcaucagcgagugcagauuccugaagaucagagagggcagaaucaucaaggagaucuuccccaccggcagagugaagcacaccgaggagugcaccugcggcuucgccagcaacaagaccaucgagugcgccugcagagacaacagcuacaccgccaagagacccuucgugaagcugaacguggagaccgacaccgccgagaucagacugaugugcaccgacaccuaccuggacacccccagacccgacgacggcagcaucaccggccccugcgagagcaacggcgacaagggcagcggcggcaucaagggcggcuucgugcaccagagaauggagagcaagaucggcagaugguacagcagaaccaugagcaagaccgagagaaugggcaugggccuguacgugaaguacgacggcgaccccugggccgacagcgacgcccuggccuucagcggcgugauggugagcaugaaggagcccggcugguacagcuucggcuucgagaucaaggacaagaagugcgacgugcccugcaucggcaucgagauggugcacgacggcggcaaggagaccuggcacagcgccgccaccgccaucuacugccugaugggcagcggccagcugcugugggacaccgugaccggcguggacauggcccuguga

SEQ ID NO: 189554 - RNA, 1401 nt, Artificial Sequence; identical to SEQ ID NO: 188955
  derived and/or modified CDS sequence (opt4) from neuraminidase__InfluenzaB__AGX20364

SEQ ID NO: 189555 - RNA, 1401 nt, Artificial Sequence; identical to SEQ ID NO: 188950
  derived and/or modified CDS sequence (opt4) from neuraminidase__InfluenzaB__AGX20375

SEQ ID NO: 189556 - RNA, 1401 nt, Artificial Sequence
  derived and/or modified CDS sequence (opt4) from neuraminidase__InfluenzaB__AGX20386
augcugcccagcaccauccagacccugacccuguuccugaccagcggcggcgugcugcugagccuguacgugagcgcccugcugagcuaccugcuguacagcgacauccugcugaaguucagccccaccgagaucaccgcccccaccaugagccuggacugcgccaacgccagcaacgugcaggccgugaacagaagcgccaccaagggcgugaccuuccugcugcccgagcccgaguggacccaccccagacugagcugccccggcagcaccuuccagaaggcccugcugaucagcccccacagauucggcgagaccaagggcaacagcgccccccugaucaucagagagcccuucaucgccugcggccccaacgagugcaagcacuucgcccugacccacuacgccgcccagcccggcggcuacuacaacggcaccagaggcgacagaaacaagcugagacaccugaucagcgugaagcugggcaagauccccaccguggagaacagcaucuuccacauggccgccuggagcggcagcgccugccacgacggcaaggaguggaccuacaucggcguggacggccccgacaacgacgcccugcugaaggugaaguacggcgaggccuacaccgacaccuaccacagcuacgccaacaagauccugagaacccaggagagcgccugcaacugcaucggcggcaacugcuaccugaugaucaccgacggcagcgccagcggcaucagcgagugcagauuccugaagaucagagagggcagaaucaucaaggagaucuuccccaccggcagagugaagcacaccgaggagugcaccugcggcuucgccagcaacaagaccaucgagugcgccugcagagacaacagcuacaccgccaagagacccuucgugaagcugaacguggagaccgacaccgccgagaucagacugaugugcaccgacaccuaccuggacacccccagacccgacgacggcagcaucaccggccccugcgagagcaacggcgacaagggcagcggcggcaucaagggcggcuucgugcaccagagaauggagagcaagaucggcagaugguacagcagaaccaugagcaagaccgagagaaugggcaugggccuguacgugaaguacgacggcgaccccugggccgacagcgacgcccuggccuucagcggcgugauggugagcaugaaggagcccggcugguacagcuucggcuucgagaucaaggacaagaagugcgacgugcccugcaucggcaucgagauggugcacgacggcggcaaggagaccuggcacagcgccgccaccgccaucuacugccugaugggcagcggccagcugcugugggacaccgugaccggcguggacauggcccuguga

SEQ ID NO: 189557 - RNA, 1401 nt, Artificial Sequence; identical to SEQ ID NO: 188955
  derived and/or modified CDS sequence (opt4) from neuraminidase__InfluenzaB__AGX20397

SEQ ID NO: 189558 - RNA, 1401 nt, Artificial Sequence; identical to SEQ ID NO: 188950
  derived and/or modified CDS sequence (opt4) from neuraminidase__InfluenzaB__AGX20408

SEQ ID NO: 189559 - RNA, 1401 nt, Artificial Sequence; identical to SEQ ID NO: 188932
  derived and/or modified CDS sequence (opt4) from neuraminidase__InfluenzaB__AGX20419

SEQ ID NO: 189560 - RNA, 1401 nt, Artificial Sequence
  derived and/or modified CDS sequence (opt4) from neuraminidase__InfluenzaB__AGX20430
augcugcccagcaccauccagacccugacccuguuccugaccagcggcggcgugcugcugagccuguacgugagcgcccugcugagcuaccugcuguacagcgacauccugcugaaguucagccccaccgagaucaccgcccccaccaugagccuggacugcgccaacgccagcaacgugcaggccgugaacagaagcgccaccaagggcgugaccuuccugcugcccgagcccgaguggaccuaccccagacugagcugccccggcagcaccuuccagagagcccugcugaucagcccccacagauucggcgaggccaagggcaacagcgccccccugaucaucagagagcccuucaucgccugcggccccaacgagugcaagcacuucgcccugacccacuacgccgcccagcccggcggcuacuacaacggcaccagaggcgacagaaacaagcugagacaccugaucagcgugaagcugggcaagauccccaccguggagaacagcaucuuccacauggccgccuggagcggcagcgccugccacgacggcaaggaguggaccuacaucggcguggacggccccgacaacgacgcccugcugaaggugaaguacggcgaggccuacaccgacaccuaccacagcuacgccaacaagauccugagaacccaggagagcgccugcaacugcaucggcggcaacugcuaccugaugaucaccgacggcagcgccagcggcgugagcgagugcagauuccugaagaucagagagggcagaaucaucaaggagaucuuccccaccggcagagugaagcacaccgaggagugcaccugcggcuucgccagcaacaagaccaucgagugcgccugcagagacaacagcuacaccgccaagagacccuucgugaagcugaacguggagaccgacaccgccgagaucagacugaugugcaccgacaccuaccuggacacccccagacccgacgacggcagcaucaccggccccugcgagagcaacggcgacaagggcagcggcggcaucaagggcggcuucgugcaccagagaauggagagcaagaucggcagaugguacagcagaaccaugagcaagaccgagagaaugggcaugggccuguacgugaaguacgacggcgaccccugggccgacagcgacgcccuggccuucagcggcgugauggugagcaugaaggagcccggcugguacagcuucggcuucgagaucaaggacaagaagugcgacgugcccugcaucggcaucgagauggugcacgacggcggcaaggagaccuggcacagcgccgccaccgccaucuacugccugaugggcagcggccagcugcugugggacaccgugaccggcguggacauggcccuguga

SEQ ID NO: 189561 - RNA, 1401 nt, Artificial Sequence; identical to SEQ ID NO: 188932
  derived and/or modified CDS sequence (opt4) from neuraminidase__InfluenzaB__AGX20441

SEQ ID NO: 189562 - RNA, 1401 nt, Artificial Sequence
  derived and/or modified CDS sequence (opt4) from neuraminidase__InfluenzaB__AGX20452
augcugcccagcaccauccagacccugacccuguuccugaccagcggcggcgugcugcugagccuguacgugagcgccagccugagcuaccugcuguacagcgacauccugcugaaguucagccccaccgagaucaccgcccccaccaugagccuggacugcgccaacgccagcaacgugcaggccgugaacagaagcgccaccaagggcgugaccuuccugcugcccgagcccgaguggaccuaccccagacugagcugccccggcagcaccuuccagaaggcccugcugaucagcccccacagauucggcgagaccaagggcaacagcgccccccugaucaucagagagcccuucaucgccugcggccccaacgagugcaagcacuucgcccugacccacuacgccgcccagcccggcggcuacuacaacggcaccagaggcgacagaaacaagcugagacaccugaucagcgugaagcugggcaagauccccaccguggagaacagcaucuuccacauggccgccuggagcggcagcgccugccacgacggcaaggaguggaccuacaucggcguggacggccccgacaacgacgcccugcugaaggugaaguacggcgaggccuacaccgacaccuaccacagcuacgccaacaagauccugagaacccaggagagcgccugcaacugcaucggcggcaacugcuaccugaugaucaccgacggcagcgccagcggcgugagcgagugcagauuccugaagaucagagagggcagaaucaucaaggagaucuuccccaccggcagagugaagcacaccgaggagugcaccugcggcuucgccagcaacaagaccaucgagugcgccugcagagacaacagcuacaccgccaagagacccuucgugaagcugaacguggagaccgacaccgccgagaucagacugaugugcaccgacaccuaccuggacacccccagacccgacgacggcagcaucaccggccccugcgagagcaacggcgacaagggcagcggcggcaucaagggcggcuucgugcaccagagaauggagagcaagaucggcagaugguacagcagaaccaugagcaagaccgagagaaugggcaugggccuguacgugaaguacgacggcgaccccugggccgacagcgacgcccuggccuucagcggcgugauggugagcaugaaggagcccggcugguacagcuucggcuucgagaucagagacaagaagugcgacgugcccugcaucggcaucgagauggugcacgacggcggcaaggagaccuggcacagcgccgccaccgccaucuacugccugaugggcagcggccagcugcugugggacaccgugaccggcguggacauggcccuguga

SEQ ID NO: 189563 - RNA, 1401 nt, Artificial Sequence; identical to SEQ ID NO: 188955
  derived and/or modified CDS sequence (opt4) from neuraminidase__InfluenzaB__AGX20463

SEQ ID NO: 189564 - RNA, 1401 nt, Artificial Sequence; identical to SEQ ID NO: 188955
  derived and/or modified CDS sequence (opt4) from neuraminidase__InfluenzaB__AGX20474

SEQ ID NO: 189565 - RNA, 1401 nt, Artificial Sequence; identical to SEQ ID NO: 188955
  derived and/or modified CDS sequence (opt4) from neuraminidase__InfluenzaB__AGX20485

SEQ ID NO: 189566 - RNA, 1401 nt, Artificial Sequence; identical to SEQ ID NO: 189535
  derived and/or modified CDS sequence (opt4) from neuraminidase__InfluenzaB__AGX20496

SEQ ID NO: 189567 - RNA, 1401 nt, Artificial Sequence; identical to SEQ ID NO: 188955
  derived and/or modified CDS sequence (opt4) from neuraminidase__InfluenzaB__AGX20507

SEQ ID NO: 189568 - RNA, 1401 nt, Artificial Sequence; identical to SEQ ID NO: 188955
  derived and/or modified CDS sequence (opt4) from neuraminidase__InfluenzaB__AGX20518

SEQ ID NO: 189569 - RNA, 1401 nt, Artificial Sequence
  derived and/or modified CDS sequence (opt4) from neuraminidase__InfluenzaB__AGX20529
augcugcccagcaccauccagacccugacccuguuccugaccagcggcggcgugcugcugagccuguacgugagcgcccugcugagcuaccugcuguacagcgacauccugcugaaguucagccccaccgagaucaccgcccccaccaugagccuggacugcgccaacgccagcaacgugcaggccgugaacagaagcgccaccaagggcgugaccuuccugcugcccgagcccgaguggaccuaccccagacugagcugccccggcagcaccuuccagaaggcccugcugaucagcccccacagauucggcgagaccaagggcaacagcgccccccugaucaucagagagcccuucaucgccugcggccccaacgagugcaagcacuucgcccugacccacuacgccgcccagcccggcggcuacuacaacggcaccagaggcgacagaaacaagcugagacaccugaucagcgugaagcugggcaagauccccaccguggagaacagcaucuuccacauggccgccuggagcggcagcgccugccacgacggcaaggaguggaccuacaucggcguggacggccccgacaacgacgcccugcugaaggugaaguacggcgaggccuacaccgacaccuaccacagcuacgccaacaagauccugagaacccaggagagcgccugcaacugcaucggcggcaacugcuaccugaugaucaccgacggcagcgccagcggcgugagcgagugcagauuccugaagaucagagagggcagaaucaucaaggagaucuuccccaccggcagagugaagcacaccgaggagugcaccugcggcuucgccagcaacaagaccaucgagugcaccugcagagacaacagcuacaccgccaagagacccuucgugaagcugaacguggagaccgacaccgccgagaucagacugaugugcaccgacaccuaccuggacacccccagacccgacgacggcagcaucaccggccccugcgagagcaacggcgacaagggcagcggcggcaucaagggcggcuucgugcaccagagaauggagagcaagaucggcagaugguacagcagaaccaugagcaagaccgagagaaugggcaugggccuguacgugaaguacgacggcgaccccugggccgacagcgacgcccuggccuucagcggcgugauggugagcaugaaggagcccggcugguacagcuucggcuucgagaucaaggacaagaagugcgacgugcccugcaucggcaucgagauggugcacgacggcggcaaggagaccuggcacagcgccgccaccgccaucuacugccugaugggcagcggccagcugcugugggacaccgugaccggcguggacauggcccuguga

SEQ ID NO: 189570 - RNA, 1401 nt, Artificial Sequence; identical to SEQ ID NO: 189533
  derived and/or modified CDS sequence (opt4) from neuraminidase__InfluenzaB__AGX20540

SEQ ID NO: 189571 - RNA, 1401 nt, Artificial Sequence; identical to SEQ ID NO: 189179
  derived and/or modified CDS sequence (opt4) from neuraminidase__InfluenzaB__AGX20551

SEQ ID NO: 189572 - RNA, 1401 nt, Artificial Sequence; identical to SEQ ID NO: 188932
  derived and/or modified CDS sequence (opt4) from neuraminidase__InfluenzaB__AGX20562

SEQ ID NO: 189573 - RNA, 1401 nt, Artificial Sequence; identical to SEQ ID NO: 188955
  derived and/or modified CDS sequence (opt4) from neuraminidase__InfluenzaB__AGX20573

SEQ ID NO: 189574 - RNA, 1401 nt, Artificial Sequence
  derived and/or modified CDS sequence (opt4) from neuraminidase__InfluenzaB__AGX20584
augcugcccagcaccauccagacccugacccuguuccugaccagcggcggcgugcugcugagccuguacgugagcgccagccugagcuaccugcuguacagcgacauccugcugaaguucagcagcaccgagaucaccgcccccaccaugccccuggacugcgccaacgccagcaacgugcaggccgugaacagaagcgccaccaagggcgugacccugcugcugcccgagcccgaguggaccuaccccagacugagcugccccggcagcaccuuccagaaggcccugcugaucagcccccacagauucggcgagaccaagggcaacagcgccccccugaucaucagagagcccuucaucgccugcggccccaacgagugcaagcacuucgcccugacccacuacgccgcccagcccggcggcuacuacaacggcaccagaggcgacagaaacaagcugagacaccugaucagcgugaagcugggcaagauccccaccguggagaacagcaucuuccacauggccgccuggagcggcagcgccugccacgacggcaaggaguggaccuacaucggcguggacggccccgacaacaacgcccugcugaaggugaaguacggcgaggccuacaccgacaccuaccacagcuacgccaacaagauccugagaacccaggagagcgccugcaacugcaucggcggcaacugcuaccugaugaucaccgacggcagcgccagcggcgugagcgagugcagauuccugaagaucagagagggcagaaucaucaaggagaucuuccccaccggcagagugaagcacaccgaggagugcaccugcggcuucgccagcaacaagaccaucgagugcgccugcagagacaacagcuacaccgccaagagacccuucgugaagcugaacguggagaccgacaccgccgagaucagacugaugugcaccgacaccuaccuggacacccccagacccaacgacggcagcaucaccggccccugcgagagcaacggcgacaagggcagcggcggcaucaagggcggcuucgugcaccagagaauggagagcagaaucggcagaugguacagcagaaccaugagcaagaccgagagaaugggcaugggccuguacgugaaguacgacggcgaccccuggaccgacagcgacgcccugaccuucagcggcgugauggugagcaugaaggagcccggcugguacagcuucggcuucgagaucaaggacaagaagugcgacgugcccugcaucggcaucgagauggugcacgacggcggcaaggagaccuggcacagcgccgccaccgccaucuacugccugaugggcagcggccagcugcugugggacaccgugaccggcguggacauggcccuguga

SEQ ID NO: 189575 - RNA, 1401 nt, Artificial Sequence; identical to SEQ ID NO: 188955
  derived and/or modified CDS sequence (opt4) from neuraminidase__InfluenzaB__AGX20595

SEQ ID NO: 189576 - RNA, 1401 nt, Artificial Sequence; identical to SEQ ID NO: 189533
  derived and/or modified CDS sequence (opt4) from neuraminidase__InfluenzaB__AGX20606

SEQ ID NO: 189577 - RNA, 1401 nt, Artificial Sequence; identical to SEQ ID NO: 189533
  derived and/or modified CDS sequence (opt4) from neuraminidase__InfluenzaB__AGX20617

SEQ ID NO: 189578 - RNA, 1401 nt, Artificial Sequence; identical to SEQ ID NO: 189560
  derived and/or modified CDS sequence (opt4) from neuraminidase__InfluenzaB__AGX20628

SEQ ID NO: 189579 - RNA, 1401 nt, Artificial Sequence; identical to SEQ ID NO: 188960
  derived and/or modified CDS sequence (opt4) from neuraminidase__InfluenzaB__AGX20639

SEQ ID NO: 189580 - RNA, 1401 nt, Artificial Sequence
  derived and/or modified CDS sequence (opt4) from neuraminidase__InfluenzaB__AGX20650
augcugcccagcaccauccagacccugacccuguuccugaccagcggcggcgugcugcugagccuguacgugagcgcccugcugagcuaccugcuguacagcgacauccugcugaaguucagccccaccgagaucaccgcccccaccaugagccuggacugcgccaacgccagcaacgugcaggccgugaacagaagcgccaccaagggcgugaccuuccugcugcccgagcccgaguggaccuaccccagacugagcugccccggcagcaccuuccagaaggcccugcugaucagcccccacagauucggcgagaccaagggcaacagcgccccccugaucaucagagagcccuucaucgccugcggccccaacgagugcaagcacuucgcccugacccacuacgccgcccagcccggcggcuacuacaacggcaccagaggcgacagaaacaagcugagacaccugaucagcgugaagcugggcaagauccccaccguggagaacagcaucuuccacauggccgccuggagcggcagcgccugccacgacggcaaggaguggaccuacaucggcguggacggccccgacaacgacgcccugcugaaggugaaguacggcgaggccuacaccgacaccuaccacagcuacgccaacaagauccugagaacccaggagagcaccugcaacugcaucggcggcaacugcuaccugaugaucaccgacggcagcgccagcggcgugagcgagugcagauuccugaagaucagagagggcagaaucaucaaggagaucuuccccaccggcagagugaagcacaccgaggagugcaccugcggcuucgccagcaacaagaccaucgagugcgccugcagagacaacagcuacaccgccaagagacccuucgugaagcugaacguggagaccgacaccgccgagaucagacugaugugcaccgacaccuaccuggacacccccagacccgacgacggcagcaucaccggccccugcgagagcaacggcgacaagggcagcggcggcaucaagggcggcuucgugcaccagagaauggagagcaagaucggcagaugguacagcagaaccaugagcaagaccgagagaaugggcaugggccuguacgugaaguacgacggcgaccccugggccgacagcgacgcccuggccuucagcggcgugauggugagcaugaaggagcccggcugguacagcuucggcuucgagaucaaggacaagaagugcgacgugcccugcaucggcaucgagauggugcacgacggcggcaaggagaccuggcacagcgccgccaccgccaucuacugccugaugggcagcggccagcugcugugggacaccgugaccggcguggacauggcccuguga

SEQ ID NO: 189581 - RNA, 1401 nt, Artificial Sequence
  derived and/or modified CDS sequence (opt4) from neuraminidase__InfluenzaB__AGX20661
augcugcccagcaccauccagacccugacccuguuccugaccagcggcggcgugcugcugagccuguacgugagcgccagccugagcuaccugcuguacagcgacauccugcugaaguucagccccaccgagaucaccgcccccaccaugccccuggacugcgccaacgccagcaacgugcaggccgugaacagaagcgccaccaagggcgugacccugcugcugcccgagcccgaguggaccuaccccagacugagcugccccggcagcaccuuccagaaggcccugcugaucagcccccacagauucggcgagaccaagggcaacagcgccccccugaucaucagagagcccuucaucgccugcggccccaacgagugcaagcacuucgcccugacccacuacgccgcccagcccggcggcuacuacaacggcaccagaggcgacagaaacaagcugagacaccugaucagcgugaaccugggcaagauccccaccguggagaacagcaucuuccacauggccgccuggagcggcagcgccugccacgacggcaaggaguggaccuacaucggcguggacggccccgacaacaacgcccugcugaaggugaaguacggcgaggccuacaccgacaccuaccacagcuacgccaacaacauccugagaacccaggagagcgccugcaacugcaucggcggcaacugcuaccugaugaucaccgacggcagcgccagcggcgugagcgagugcagauuccugaagaucagagagggcagaaucaucaaggagaucuuccccaccggcagagugaagcacaccgaggagugcaccugcggcuucgccagcaacaagaccaucgagugcgccugcagagacaacagcuacaccgccaagagacccuucgugaagcugaacguggagaccgacaccgccgagaucagacugaugugcaccgacaccuaccuggacacccccagacccaacgacggcagcaucaccggccccugcgagagcaacggcgacaagggcagcggcggcaucaagggcggcuucgugcaccagagaauggagagcaagaucggcagaugguacagcagaaccaugagcaagaccgagagaaugggcaugggccuguacgugaaguacgacggcgaccccuggaccgacagcgacgcccuggccuucagcggcgugauggugagcaugaaggagcccggcugguacagcuucggcuucgagaucaaggacaagaagugcgacgugcccugcaucggcaucgagauggugcacgacggcggcaaggagaccuggcacagcgccgccaccgccaucuacugccugaugggcagcggccagcugcugugggacaccgugaccggcguggacauggcccuguga

SEQ ID NO: 189582 - RNA, 1401 nt, Artificial Sequence; identical to SEQ ID NO: 189016
  derived and/or modified CDS sequence (opt4) from neuraminidase__InfluenzaB__AGX20683

SEQ ID NO: 189583 - RNA, 1401 nt, Artificial Sequence; identical to SEQ ID NO: 189179
  derived and/or modified CDS sequence (opt4) from neuraminidase__InfluenzaB__AGX20694

SEQ ID NO: 189584 - RNA, 1401 nt, Artificial Sequence
  derived and/or modified CDS sequence (opt4) from neuraminidase__InfluenzaB__AGX20705
augcugcccagcaccauccagacccugacccuguuccugaccagcggcggcgugcugcugagccuguacgugagcgccagccugagcuaccugcuguacagcggcauccugcugaaguucagccccaccgagaucaccgcccccaccaugccccuggacugcgccaacgccagcgacgugcaggccgugaacagaagcgccaccaagggcgugacccugcugcugcccgagcccgaguggaccuaccccagacugagcugccccggcagcaccuuccagaaggcccugcugaucagcccccacagauucggcgagaccaagggcaacagcgccccccugaucaucagagagcccuucaucgccugcggccccaacgagugcaagcacuucgcccugacccacuacgccgcccagcccggcggcuacuacaacggcaccagaggcgacagaaacaagcugagacaccugaucagcgugaagcugggcaagauccccaccguggagaacagcaucuuccacauggccgccuggagcggcagcgccugccacgacggcaaggaguggaccuacaucggcguggacggccccgacaacaacgcccugcugaaggugaaguacggcgaggccuacaccgacaccuaccacagcuacgccaacaagauccugagaacccaggagagcgccugcaacugcaucggcggcaacugcuaccugaugaucaccgacggcagcgccagcggcgugagcgagugcagauuccugaagaucagagagggcagaaucaucaaggagaucuuccccaccggcagagugaagcacaccgaggagugcaccugcggcuucgccagcaacaagaccaucgagugcgccugcagagacaacagcuacaccgccaagagacccuucgugaagcugaacguggagaccgacaccgccgagaucagacugaugugcaccgacaccuaccuggacacccccagacccaacgacggcagcaucaccggccccugcgagagcaacggcgacaagggcagcggcggcaucaagggcggcuucgugcaccagagaauggagagcaagaucggcagaugguacagcagaaccaugagcaagaccgagagaaugggcaugggccuguacgugaaguacgacggcgaccccugggccgacagcgacgcccugaccuucagcggcgugauggugagcaugaaggagcccggcugguacagcuucggcuucgagaucaaggacaagaagugcgacgugcccugcaucggcaucgagauggugcacgacggcggcaaggagaccuggcacagcgccgccaccgccaucuacugccugaugggcagcggccagcugcugugggacaccgugaccggcguggacauggcccuguga

SEQ ID NO: 189585 - RNA, 1401 nt, Artificial Sequence
  derived and/or modified CDS sequence (opt4) from neuraminidase__InfluenzaB__AGX20716
augcugcccagcaccauccagacccugacccuguuccugaccagcggcggcgugcugcugagccuguacgugagcgccagccugagcuaccugcuguacagcgacauccugcugaaguucagccccaccgagaucaccgcccccaccaugccccuggacugcgccaacgccagcaacgugcaggccgugaacagaagcgccaccaagggcgugacccugcugcugcccgagcccgaguggaccuaccccagacugagcugccccggcagcaccuuccagaaggcccugcugaucagcccccacagauucggcgagaccaagggcaacagcgccccccugaucaucagagagcccuucaucgccugcggccccaacgagugcaagcacuucgcccugacccacuacgccgcccagcccggcggcuacuacaacggcaccagaggcgacagaaacaagcugagacaccugaucagcgugaagcugggcaagauccccaccguggagaacagcaucuuccacauggccgccuggagcggcagcgccugccacgacggcaaggaguggaccuacaucggcguggacggccccgacaacaacgcccugcugaaggugaaguacggcgaggccuacaccgacaccuaccacagcuacgccaacaagauccugagaacccaggagagcgccugcaacugcaucggcggcaacugcuaccugaugaucaccgacggcagcgccagcggcgugagcgagugcagauuccugaagaucagagagggcagaaucaucaaggagaucuuccccaccggcagagugaagcacaccgaggagugcaccugcggcuucgccagcaacaagaccaucgagugcgccugcagagacaacagcuacaccgccaagagacccuucgugaagcugaacguggagaccgacaccgccgagaucagacugaugugcaccgacaccuaccuggacacccccagacccaacgacggcagcaucaccggccccugcgagagcgacggcgacaagggcagcggcggcaucaagggcggcuucgugcaccagagaaucgagagcagaaucggcagaugguacagcagaaccaugagcaagaccgagagaaugggcaugggccuguacgugaaguacgacggcgaccccugggccgacagcgacgcccuggccuucagcggcgugauggugagcaugaaggagcccggcugguacagcuucggcuucgagaucaaggacaagaagugcgacgugcccugcaucggcaucgagauggugcacgacggcggcaaggagaccuggcacagcgccgccaccgccaucuacugccugaugggcagcggccagcugcugugggacaccgugaccggcguggacauggcccuguga

SEQ ID NO: 189586 - RNA, 1401 nt, Artificial Sequence
  derived and/or modified CDS sequence (opt4) from neuraminidase__InfluenzaB__AGX20727
augcugcccagcaccauccagacccugacccuguuccugaccagcggcggcgugcugcugagccuguacgugagcgcccugcugagcuaccugcuguacagcgacauccugcugaaguucagccccaccgagaucaccgcccccaccaugagccuggacugcgccaacgccagcaacgugcaggccgugaacagaagcgccaccaagggcgugaccuuccugcugcccgagcccgaguggaccuaccccagacugagcugccccggcagcaccuuccagaaggcccugcugaucagcccccacagauucggcgagaccaagggcaacagcgccccccugaucaucagagagcccuucaucgccugcggccccaacgagugcaagcacuucgcccugacccacuacgccgcccagcccggcggcuacuacaacggcaccagaggcgacagaaacaagcugagacaccugaucagcgugaagcugggcaagauccccaccguggagaacagcaucuuccacauggccgccuggagcggcagcgccugccacgacggcaaggaguggaccuacaucggcguggacggccccgacaacgacgcccugcugaaggugaaguacggcgaggccuacaccgacaccuaccacagcuacgccaacaagauccugagaacccaggagagcgccugcaacugcaucggcggcaacugcuaccugaugaucaccgacggcagcgccagcggcgugagcgagugcagauuccugaagaucagagagggcagaaucaucaaggagaucuuccccaccggcagagugaagcacaccgaggagugcaccugcggcuucgccagcaacaagaccaucgagugcgccugcagagacaacagcuacaccgccaagagacccuucgugaagcugaacguggagaccgacaccgccgagaucagacugaugugcaccgacaccuaccuggacacccccagacccgacgacggcagcaccaccggccccugcgagagcaacggcgacaagggcagcggcggcaucaagggcggcuucgugcaccagagaauggagagcaagaucggcagaugguacagcagaaccaugagcaagaccgagagaaugggcaugggccuguacgugaaguacgacggcgaccccugggccgacagcgacgcccuggccuucagcggcgugauggugagcaugaaggagcccggcugguacagcuucggcuucgagaucaaggacaagaagugcgacgugcccugcaucggcaucgagauggugcacgacggcggcaaggagaccuggcacagcgccgccaccgccaucuacugccugaugggcagcggccagcugcugugggacaccgugaccggcguggacauggcccuguga

SEQ ID NO: 189587 - RNA, 1401 nt, Artificial Sequence; identical to SEQ ID NO: 189179
  derived and/or modified CDS sequence (opt4) from neuraminidase__InfluenzaB__AGX20738

SEQ ID NO: 189588 - RNA, 1401 nt, Artificial Sequence; identical to SEQ ID NO: 188955
  derived and/or modified CDS sequence (opt4) from neuraminidase__InfluenzaB__AGX20749

SEQ ID NO: 189589 - RNA, 1401 nt, Artificial Sequence
  derived and/or modified CDS sequence (opt4) from neuraminidase__InfluenzaB__AGX20760
augcugcccagcaccauccagacccugacccuguuccugaccagcggcggcgugcugcugagccuguacgugagcgccagccugagcuaccugcuguacagcgacauccugcugaaguucagccccaccgagaucaccgcccccaccaugccccuggacugcgccaacgccagcaacgugcaggccgugaacagaagcgccaccaagggcgugacccugcugcugcccgagcccgaguggaccuaccccagacugagcugccccggcagcaccuuccagaaggcccugcugaucagcccccacagauucggcgagaccaagggcaacagcgccccccugaucaucagagagcccuucaucgccugcggccccaacgagugcaagcacuucgcccugacccacuacgccgcccagcccggcggcuacuacaacggcaccagaggcgacagaaacaagcugagacaccugaucagcgugaagcugggcaagauccccaccguggagaacagcaucuuccacauggccgccuggagcggcagcgccugccacgacggcaaggaguggaccuacaucggcguggacggccccgacaacaacgcccugcugaaggugaaguacggcgaggccuacaccgacaccuaccacagcuacgccaacaagauccugagaacccaggagagcgccugcaacugcaucggcggcaacugcuaccugaugaucaccgacggcagcgccagcggcgugagcgagugcagauuccugaagaucagagagggcagaaucaucaaggagaucuuccccaccggcagagugaagcacaccgaggagugcaccugcggcuucgccagcaacaagaccaucgagugcgccugcagagacaacagcuacaccgccaagagacccuucgugaagcugaacguggagaccgacaccgccgagaucagacugaugugcaccgacaccuaccuggacacccccagacccaacgacggcagcaucaccggccccugcgagagcgacggcgacaagggcagcggcggcaucaagggcggcuucgugcaccagagaauggagagcagaaucggcagaugguacagcagaaccaugagcaagaccgagagaaugggcaugggccuguacgugaaguacgacggcgaccccugggccgacagcgacgcccuggccuucagcggcgugauggugagcaugaaggagcccggcugguacagcuucggcuucgagaucaaggacaagaagugcgacgugcccugcaucggcaucgagauggugcacgacggcggcaaggagaccuggcacagcgccgccaccgccaucuacugccugaugggcagcggccagcugcugugggacaccgugaccggcguggacauggcccuguga

SEQ ID NO: 189590 - RNA, 1401 nt, Artificial Sequence; identical to SEQ ID NO: 188955
  derived and/or modified CDS sequence (opt4) from neuraminidase__InfluenzaB__AGX20771

SEQ ID NO: 189591 - RNA, 1401 nt, Artificial Sequence
  derived and/or modified CDS sequence (opt4) from neuraminidase__InfluenzaB__AGX20782
augcugcccagcaccauccagacccugacccuguuccugaccagcggcggcgugcugcugagccuguacgugagcgccagccugagcuaccugcuguacagcgacauccugcugaaguucagccccaccgagaucaccgcccccaccaugccccuggacugcgccaacgccagcaacgugcaggccgugaaccacagcgccaccaagggcgugacccugcugcugcccgagcccgaguggaccuaccccagacugagcugccccggcagcaccuuccagaaggcccugcugaucagcagccacagauucggcgagaccaagggcaacagcgccccccugaucaucagagagcccuucguggccugcggccccaacgagugcaagcacuucgcccugacccacuacgccgcccagcccggcggcuacuacaacggcaccagaggcgacagaaacaagcugagacaccugaucagcgugaagcugggcaagauccccaccguggagaacagcaucuuccacauggccgccuggagcggcagcgccugccacgacggcaaggaguggaccuacaucggcguggacggccccgacaacaacgcccugcugaaggugaaguacggcgaggccuacaccgacaccuaccacagcuacgccaacaagauccugagaacccaggagagcgccugcaacugcaucggcggcaacugcuaccugaugaucaccgacggcagcgccagcggcgugagcgagugcagauuccugaagaucagagagggcagaaucaucaaggagaucuuccccaccggcagagugaagcacaccgaggagugcaccugcggcuucgccagcaacaagaccaucgagugcgccugcagagacaacagcuacaccgccaagagacccuucgugaagcugaacguggagaccgacaccgccgagaucagacugaugugcaccgacaccuaccuggacacccccagacccaacgacggcagcaucaccggccccugcgagagcgacggcgacaagggcagcggcggcaucaagggcggcuucgugcaccagagaauggagagcaagaucggcagaugguacagcagaaccaugagcagaaccgagagaaugggcaugggccuguacgugaaguacgacggcgaccccugggccgacagcgacgcccuggccuucagcggcgugauggugagcaugaaggagcccggcugguacagcuucggcuucgagaucaaggacaagaagugcgacgugcccugcaucggcaucgagauggugcacgacggcggcaaggagaccuggcacagcgccgccaccgccaucuacugccugaugggcagcggccagcugcugugggacaccgugaccggcguggacauggcccuguga

SEQ ID NO: 189592 - RNA, 1401 nt, Artificial Sequence
  derived and/or modified CDS sequence (opt4) from neuraminidase__InfluenzaB__AGX20793
augcugcccagcaccauccagacccugacccuguuccugaccagcggcggcgugcugcugagccuguacgugagcgcccugcugagcuaccugcuguacagcgacauccugcugaaguucagccccaccgagaucaccgcccccaccaugagccuggacugcgccaacaccagcaacgugcaggccgugaacagaagcgccaccaagggcgugaccuuccugcugcccgagcccgaguggaccuaccccagacugagcugccccggcagcaccuuccagaaggcccugcugaucagcccccacagauucggcgagaccaagggcaacagcgccccccugaucaucagagagcccuucaucgccugcggccccaacgagugcaagcacuucgcccugacccacuacgccgcccagcccggcggcuacuacaacggcaccagaggcgacagaaacaagcugagacaccugaucagcgugaagcugggcaagauccccaccguggagaacagcaucuuccacauggccgccuggagcggcagcgccugccacgacggcaaggaguggaccuacaucggcguggacggccccgacaacgacgcccugcugaaggugaaguacggcgaggccuacaccgacaccuaccacagcuacgccaacaagauccugagaacccaggagagcgccugcaacugcaucggcggcaacugcuaccugaugaucaccgacggcagcgccagcggcgugagcgagugcagauuccugaagaucagagagggcagaaucaucaaggagaucuuccccaccggcagagugaagcacaccgaggagugcaccugcggcuucgccagcaacaagaccaucgagugcgccugcagagacaacagcuacaccgccaagagacccuucgugaagcugaacguggagaccgacaccgccgagaucagacugaugugcaccgacaccuaccuggacacccccagacccgacgacggcagcaucaccggccccugcgagagcaacggcgacaagggcagcggcggcaucaagggcggcuucgugcaccagagaauggagagcaagaucggcagaugguacagcagaaccaugagcaagaccgagagaaugggcaugggccuguacgugaaguacgacggcgaccccugggccgacagcgacgcccuggccuucagcggcgugauggugagcaugaaggagcccggcugguacagcuucggcuucgagaucaaggacaagaagugcgacgugcccugcaucggcaucgagauggugcacgacggcggcaaggagaccuggcacagcgccgccaccgccaucuacugccugaugggcagcggccagcugcugugggacaccgugaccggcgugaacauggcccuguga

SEQ ID NO: 189593 - RNA, 1401 nt, Artificial Sequence
  derived and/or modified CDS sequence (opt4) from neuraminidase__InfluenzaB__AGX20804
augcugcccagcaccauccagacccugacccuguucaucaccagcggcggcgugcugcugagccuguacgugagcgcccugcugagcuaccugcuguacagcgacauccugcugaaguucagccccaccgagaucaccgcccccaccaugagccuggacugcgccaacgccagcaacgugcaggccgugaacagaagcgccaccaagggcgugaccuuccugcugcccgagcccgaguggaccuaccccagacugagcugccccggcagcaccuuccagaaggcccugcugaucagcccccacagauucggcgagaccaagggcaacagcgccccccugaucaucagagagcccuucaucgccugcggccccaacgagugcaagcacuucgcccugacccacuacgccgcccagcccggcggcuacuacaacggcaccagaggcgacagaaacaagcugagacaccugaucagcgugaagcugggcaagauccccaccguggagaacagcaucuuccacauggccgccuggagcggcagcgccugccacgacggcaaggaguggaccuacaucggcguggacggccccgacaacgacgcccugcugaaggugaaguacggcgaggccuacaccgacaccuaccacagcuacgccaacaagauccugagaacccaggagagcgccugcaacugcaucggcggcaacugcuaccugaugaucaccgacggcagcgccagcggcgugagcgagugcagauuccugaagaucagagagggcagaaucaucaaggagaucuuccccaccggcagagugaagcacaccgaggagugcaccugcggcuucgccagcaacaagaccaucgagugcgccugcagagacaacagcuacaccgccaagagacccuucgugaagcugaacguggagaccgacaccgccgagaucagacugaugugcaccgacaccuaccuggacacccccagacccgacgacggcagcaucaccggccccugcgagagcaacggcgacaagggcagcggcggcaucaagggcggcuucgugcaccagagaauggagagcaagaucggcagaugguacagcagaaccaugagcaagaccgagagaaugggcaugggccuguacgugaaguacgacggcgaccccugggccgacagcgacgcccuggccuucagcggcgugauggugagcaugaaggagcccggcugguacagcuucggcuucgagaucaaggacaagaagugcgacgugcccugcaucggcaucgagauggugcacgacggcggcaaggagaccuggcacagcgccgccaccgccaucuacugccugaugggcagcggccagcugcugugggacaccgugaccggcguggacauggcccuguga

SEQ ID NO: 189594 - RNA, 1401 nt, Artificial Sequence; identical to SEQ ID NO: 189016
  derived and/or modified CDS sequence (opt4) from neuraminidase__InfluenzaB__AGX20815

SEQ ID NO: 189595 - RNA, 1401 nt, Artificial Sequence; identical to SEQ ID NO: 189016
  derived and/or modified CDS sequence (opt4) from neuraminidase__InfluenzaB__AGX20826

SEQ ID NO: 189596 - RNA, 1401 nt, Artificial Sequence; identical to SEQ ID NO: 189016
  derived and/or modified CDS sequence (opt4) from neuraminidase__InfluenzaB__AGX20837

SEQ ID NO: 189597 - RNA, 1401 nt, Artificial Sequence; identical to SEQ ID NO: 189016
  derived and/or modified CDS sequence (opt4) from neuraminidase__InfluenzaB__AGX20848

SEQ ID NO: 189598 - RNA, 1401 nt, Artificial Sequence
  derived and/or modified CDS sequence (opt4) from neuraminidase__InfluenzaB__AGX20870
augcugcccagcaccauccagaugcugacccuguuccugaccagcggcggcgugcugcugagccuguacgugagcgccagccugagcuaccugcuguacagcgacauccugcugaaguucagccccaccgagaucaccgcccccaccaugccccuggacugcgccaacgccagcaacgugcacgccgugaacagaagcgccaccaagggcgugaccuuccugcugcccgagcccgaguggaccuaccccagacugagcugccccggcagcaccuuccagaaggcccugcugaucagcccccacagauucggcgagaccaagggcaacagcgccccccugaucaucagagagcccuucaucgccugcggccccaacgagugcaagcacuucgcccugacccacuacgccgcccagcccggcggcuacuacaacggcaccagaggcgacagaaacaagcugagacaccugaucagcgugaagcugggcaagauccccaccguggagaacagcaucuuccacauggccgccuggagcggcagcgccugccacgacggcaaggaguggaccuacaucggcguggacggccccgacaacaacgcccugcugaagaucaaguacggcgaggccuacaccgacaccuaccacagcuacgccaacaacauccugagaacccaggagagcgccugcaacugcaucggcggcaacugcuaccugaugaucaccgacggcagcgccagcggcgugagcgagugcagauuccugaagaucagagagggcagaaucaucaaggagaucuuccccaccggcagagugaagcacaccgaggagugcaccugcggcuucgccagcaacaagaccaucgagugcgccugcagagacaacagcuacaccgccaagagacccuucgugaagcugaacguggagaccgacaccgccgagaucagacugaugugcaccgacaccuaccuggacacccccagacccgacgacggcagcaucaccggccccugcgagagcaacggcgacaagggcagcggcggcaucaagggcggcuucgugcaccagagaauggccagcaagaucggcagaugguacagcagaaccaugagcaagaccgagagaaagggcaugggccuguacgugaaguacgacggcgagcccuggaccgacagcgacgcccuggccuucagaggcgugauggugagcaugaaggagcccggcugguacagcuucggcuucgagaucaaggacaagaagugcgacgugcccugcaucggcaucgagauggugcacgacggcggcaaggagaccuggcacagcgccgccaccgccaucuacugccugaugggcagcggccagcugcugugggacaccgugaccggcguggacauggcccuguga

SEQ ID NO: 189599 - RNA, 1401 nt, Artificial Sequence
  derived and/or modified CDS sequence (opt4) from neuraminidase__InfluenzaB__AGX20881
augcugcccagcaccauccagaugcugacccuguuccugaccagcggcggcgugcugcugagccuguacgugagcgccagccugagcuaccugcuguacagcgacauccugcugaaguucagccccaccgagaucaccgcccccaccaugccccuggacugcgccaacgccagcaacgugcacgccgugaacagaagcgccaccaagggcgugaccuuccugcugcccgagcccgaguggaccuaccccagacugagcugccccggcagcaccuuccagaaggcccugcugaucagcccccacagauucggcgagaccaagggcaacagcgccccccugaucaucagagagcccuucaucgccugcggccccaacgagugcaagcacuucgcccugacccacuacgccgcccagcccggcggcuacuacaacggcaccagaggcaacagaaacaagcugagacaccugaucagcgugaagcugggcaagauccccaccguggagaacagcaucuuccacauggccgccuggagcggcagcgccugccacgacggcaaggaguggaccuacaucggcguggacggccccgacaacaacgcccugcugaagaucaaguacggcgaggccuacaccgacaccuaccacagcuacgccaacaacauccugagaacccaggagagcgccugcaacugcaucggcggcaacugcuaccugaugaucaccgacggcagcgccagcggcgugagcgagugcagauuccugaagaucagagagggcagaaucaucaaggagaucuuccccaccggcagagugaagcacaccgaggagugcaccugcggcuucgccagcaacaagaccaucgagugcgccugcagagacaacagcuacaccgccaagagacccuucgugaagcugaacguggagaccgacaccgccgagaucagacugaugugcaccgacaccuaccuggacacccccagacccgacgacggcagcaucaccggccccugcgagagcaacggcgacaagggcagcggcggcaucaagggcggcuucgugcaccagagaauggccagcaagaucggcagaugguacagcagaaccaugagcaagaccgagagaaagggcaugggccuguacgugaaguacgacggcgaccccuggaccgacagcgacgcccuggccuucagaggcgugauggugagcaugaaggagcccggcugguacagcuucggcuucgagaucaaggacaagaagugcgacgugcccugcaucggcaucgagauggugcacgacggcggcaaggagaccuggcacagcgccgccaccgccaucuacugccugaugggcagcggccagcugcugugggacaccgugaccggcguggacauggcccuguga

SEQ ID NO: 189600 - RNA, 1401 nt, Artificial Sequence
  derived and/or modified CDS sequence (opt4) from neuraminidase__InfluenzaB__AGX20892
augcugcccagcaccauccagacccugacccuguuccugaccagcggcggcgugcugcugagccuguacgugagcgcccugcugagcuaccugcuguacagcgacauccugcugaaguucagccccaccgagaucaccgcccccaccaugagccuggacugcgccaacgccagcaacgugcaggccgugaacagaagcgccaccaagggcgugaccuuccugcugcccgagcccgaguggaccuaccccagacugagcugccccggcagcaccuuccagagagcccugcugaucagcccccacagauucggcgaggccaagggcaacagcgccccccugaucaucagagagcccuucaucgccugcggccccaacgagugcaagcacuucgcccugacccacuacgccgcccagcccggcggcuacuacaacggcaccagaggcgacagaaacaagcugagacaccugaucagcgugaagcugggcaagauccccaccguggagaacagcaucuuccacauggccgccuggagcggcagcgccugccacgacggcaaggaguggaccuacaucggcguggacggccccgacaacgacgcccugcugaaggugaaguacggcgaggccuacaccgacaccuaccacagcuacgccaacaagauccugagaacccaggagagcgccugcaacugcaucggcggcaacugcuaccugaugaucaccgacggcagcgccagcggcgugagcgagugcagauuccugaagaucagagagggcagaaucaucaaggagauccugcccaccggcagagugaagcacaccgaggagugcaccugcggcuucgccagcaacaagaccaucgagugcgccugcagagacaacagcuacaccgccaagagacccuucgugaagcugaacguggagaccgacaccgccgagaucagacugaugugcaccgacaccuaccuggacacccccagacccgacgacggcagcaucaccggccccugcgagagcaacggcgacaagggcagcggcggcaucaagggcggcuucgugcaccagagaauggagagcaagaucggcagaugguacagcagaaccaugagcaagaccgagagaaugggcaugggccuguacgugaaguacgacggcgaccccugggccgacagcgacgcccuggccuucagcggcgugauggugagcaugaaggagcccggcugguacagcuucggcuucgagaucaaggacaagaagugcgacgugcccugcaucggcaucgagauggugcacgacggcggcaaggagaccuggcacagcgccgccaccgccaucuacugccugaugggcagcggccagcugcugugggacaccgugaccggcguggacauggcccuguga

SEQ ID NO: 189601 - RNA, 1401 nt, Artificial Sequence; identical to SEQ ID NO: 189016
  derived and/or modified CDS sequence (opt4) from neuraminidase__InfluenzaB__AGX20903

SEQ ID NO: 189602 - RNA, 1401 nt, Artificial Sequence; identical to SEQ ID NO: 189016
  derived and/or modified CDS sequence (opt4) from neuraminidase__InfluenzaB__AGX20914

SEQ ID NO: 189603 - RNA, 1401 nt, Artificial Sequence
  derived and/or modified CDS sequence (opt4) from neuraminidase__InfluenzaB__AGX20925
augcugcccagcaccauccagacccugacccuguuccugaccagcggcggcgugcugcugagccuguacgugagcgcccugcugagcuaccugcuguacagcgacauccugcugaaguucagccccaccgagaucaccgcccccaccaugagccuggacugcgccaacgccagcaacgugcaggccgugaacagaagcgccaccaagggcgugaccuuccugcugcccgagcccgaguggaccuaccccagacugagcugccccggcagcaccuuccagaaggcccugcugaucagcccccacagauucggcgagaccaagggcaacagcgccccccugaucaucagagagcccuucaucgccugcggccccaacgagugcaagcacuucgcccugacccacuacgccgcccagcccggcggcuacuacaacggcaccagaggcgacagaaacaagcugagacaccugaucagcgugaagcugggcaagauccccaccguggagaacagcaucuuccacauggccgccuggagcggcagcgccugccacgacggcaaggaguggaccuacaucggcguggacggccccgacaacgacgcccugcugaaggugaaguacggcgaggccuacaccgacaccuaccacagcuacgccaacaagauccugagaacccaggagagcgccugcaacugcaucggcggcaacugcuaccugaugaucaccgacggcagcgccagcggcgugagcgagugcagauuccugaagauccaggagggcagaaucaucaaggagaucuuccccaccggcagagugaagcacaccgaggagugcaccugcggcuucgccagcaacaagaccaucgagugcgccugcagagacaacagcuacaccgccaagagacccuucgugaagcugaacguggagaccgacaccgccgagaucagacugaugugcaccgacaccuaccuggacacccccagacccgacgacggcagcaucaccggccccugcgagagcaacggcgacaagggcagcggcggcaucaagggcggcuucgugcaccagagaauggagagcaagaucggcagaugguacagcagaaccaugagcaagaccgagagaaugggcaugggccuguacgugaaguacgacggcgaccccugggccgacagcgacgcccuggccuucagcggcgugauggugagcaugaaggagcccggcugguacagcuucggcuucgagaucaaggacaagaagugcgacgugcccugcaucggcaucgagauggugcacgacggcggcaaggagaccuggcacagcgccgccaccgccaucuacugccugaugggcagcggccagcugcugugggacaccgugaccggcguggacauggcccuguga

SEQ ID NO: 189604 - RNA, 1401 nt, Artificial Sequence
  derived and/or modified CDS sequence (opt4) from neuraminidase__InfluenzaB__AGX20936
augcugcccagcaccauccagacccugacccuguuccugaccagcggcggcgugcugcugagccuguacgugagcgcccugcugagcuaccugcuguacagcgacauccugcccaaguucagccccaccgagaucaccgcccccaccaugagccuggacugcgccaacgccagcaacgugcaggccgugaacagaagcgccaccaagggcgugaccuuccugcugcccgagcccgaguggaccuaccccagacugagcugccccggcagcaccuuccagaaggcccugcugaucagcccccacagauucggcgagaccaagggcaacagcgccccccugaucaucagagagcccuucaucgccugcggccccaacgagugcaagcacuucgcccugacccacuacgccgcccagcccggcggcuacuacaacggcaccagaggcgacagaaacaagcugagacaccugaucagcgugaagcugggcaagauccccaccguggagaacagcaucuuccacauggccgccuggagcggcagcgccugccacgacggcaaggaguggaccuacaucggcguggacggccccgacaacgacgcccugcugaaggugaaguacggcgaggccuacaccgacaccuaccacagcuacgccaacaagauccugagaacccaggagagcgccugcaacugcaucggcggcaacugcuaccugaugaucaccgacggcagcgccagcggcgugagcgagugcagauuccugaagaucagagagggcagaaucaucaaggagaucuuccccaccggcagagugaagcacaccgaggagugcaccugcggcuucgccagcaacaagaccaucgagugcgccugcagagacaacagcuacaccgccaagagacccuucgugaagcugaacguggagaccgacaccgccgagaucagacugaugugcaccgacaccuaccuggacacccccagacccgacgacggcagcaucaccggccccugcgagagcaacggcgacaagggcagcggcggcaucaagggcggcuucgugcaccagagaauggagagcaagaucggcagaugguacagcagaaccaugagcaagaccgagagaaugggcaugggccuguacgugaaguacgacggcgaccccugggccgacagcgacgcccugguguucagcggcgugauggugagcaugaaggagcccggcugguacagcuucggcuucgagaucaaggacaagaagugcgacgugcccugcaucggcaucgagauggugcacgacggcggcaaggagaccuggcacagcgccgccaccgccaucuacugccugaugggcagcggccagcugcugugggacaccgugaccggcguggacauggcccuguga

SEQ ID NO: 189605 - RNA, 1401 nt, Artificial Sequence; identical to SEQ ID NO: 188955
  derived and/or modified CDS sequence (opt4) from neuraminidase__InfluenzaB__AGX20947

SEQ ID NO: 189606 - RNA, 1401 nt, Artificial Sequence
  derived and/or modified CDS sequence (opt4) from neuraminidase__InfluenzaB__AGX20958
augcugcccagcaccauccagacccugacccuguuccugaccagcggcggcgugcugcugagccuguacgugagcgcccugcugagcuaccugcuguacagcgacauccugcugaaguucagccccaccgagaucaccacccccaccaugagccuggacugcaccaacgccagcaacgugcaggccgugaacagaagcgccaccaagggcgugaccuuccugcugcccgagcccgaguggaccuaccccagacugagcugccccggcagcaccuuccagaaggcccugcugaucagcccccacagauucggcgagaccaagggcaacagcgccccccugaucaucagagagcccuucaucgccugcggccccaacgagugcaagcacuucgcccugacccacuacgccgcccagcccggcggcuacuacaacggcaccagaggcgacagaaacaagcugagacaccugaucagcgugaagcugggcaagauccccaccguggagaacagcaucuuccacauggccgccuggagcggcagcgccugccacgacggcaaggaguggaccuacaucggcguggacggccccgacaacgacgcccugcugaaggugaaguacggcgaggccuacaccgacaccuaccacagcuacgccaacaagauccugagaacccaggagagcgccugcaacugcaucggcggcaacugcuaccugaugaucaccgacggcagcgccagcggcgugagcgagugcagauuccugaagauccaggagggcagaaucaucaaggagaucuuccccaccggcagagugaagcacaccgaggagugcaccugcggcuucgccagcaacaagaccaucgagugcgccugcagagacaacagcuacaccgccaagagacccuucgugaagcugaacguggagaccgacaccgccgagaucagacugaugugcaccgacaccuaccuggacacccccagacccgacgacggcagcaucaccggccccugcgagagcaacggcgacaagggcagcggcggcaucaagggcggcuucgugcaccagagaauggagagcaagaucggcagaugguacagcagaaccaugagcaagaccgagagaaugggcaugggccuguacgugaaguacgacggcgaccccugggccgacagcgacgcccuggccuucagcggcgugauggugagcaugaaggagcccggcugguacagcuucggcuucgagaucaaggacaagaagugcgacgugcccugcaucggcaucgagauggugcacgacggcggcaaggagaccuggcacagcgccgccaccgccaucuacugccugaugggcagcggccagcugcugugggacaccgugaccggcguggacauggcccuguga

SEQ ID NO: 189607 - RNA, 1401 nt, Artificial Sequence; identical to SEQ ID NO: 189179
  derived and/or modified CDS sequence (opt4) from neuraminidase__InfluenzaB__AGX20969

SEQ ID NO: 189608 - RNA, 1401 nt, Artificial Sequence; identical to SEQ ID NO: 189592
  derived and/or modified CDS sequence (opt4) from neuraminidase__InfluenzaB__AGX20980

SEQ ID NO: 189609 - RNA, 1401 nt, Artificial Sequence
  derived and/or modified CDS sequence (opt4) from neuraminidase__InfluenzaB__AGX20991
augcugcccagcaccauccagacccugacccuguuccugaccagcggcggcgugcugcugagccuguacgugagcgcccugcugagcuaccugcuguacagcgacauccugcccaaguucagccccaccgagaucaccgcccccaccaugagccuggacugcgccaacgccagcaacgugcaggccgugaacagaagcgccaccaagggcgugaccuuccugcugcccgagcccgaguggaccuaccccagacugagcugccccggcagcaccuuccagaaggcccugcugaucagcccccacagauucggcgagaccaagggcaacagcgccccccugaucaucagagagcccuucaucgccugcggccccaacgagugcaagcacuucgcccugacccacuacgccgcccagcccggcggcuacuacaacggcaccagaggcgacagaaacaagcugagacaccugaucagcgugaagcugggcaagauccccaccguggagaacagcaucuuccacauggccgccuggagcggcagcgccugccacgacggcaaggaguggaccuacaucggcguggacggccccgacaacgacgcccugcugaaggugaaguacggcgaggccuacaccgacaccuaccacagcuacgccaacaagauccugagaacccaggagagcgccugcaacugcaucggcggcaacugcuaccugaugaucaccgacggcagcgccagcggcgugagcgagugcagauuccugaagaucagaaagggcagaaucaucaaggagaucuuccccaccggcagagugaagcacaccgaggagugcaccugcggcuucgccagcaacaagaccaucgagugcgccugcagagacaacagcuacaccgccaagagacccuucgugaagcugaacguggagaccgacaccgccgagaucagacugaugugcaccgacaccuaccuggacacccccagacccgacgacggcagcaucaccggccccugcgagagcaacggcgacaagggcagcggcggcaucaagggcggcuucgugcaccagagaauggagagcaagaucggcagaugguacagcagaaccaugagcaagaccgagagaaugggcaugggccuguacgugaaguacgacggcgaccccugggccgacagcgacgcccugguguucagcggcgugauggugagcaugaaggagcccggcugguacagcuucggcuucgagaucaaggacaagaagugcgacgugcccugcaucggcaucgagauggugcacgacggcggcaaggagaccuggcacagcgccgccaccgccaucuacugccugaugggcagcggccagcugcugugggacaccgugaccggcguggacauggcccuguga

SEQ ID NO: 189610 - RNA, 1401 nt, Artificial Sequence; identical to SEQ ID NO: 189016
  derived and/or modified CDS sequence (opt4) from neuraminidase__InfluenzaB__AGX21002

SEQ ID NO: 189611 - RNA, 1401 nt, Artificial Sequence
  derived and/or modified CDS sequence (opt4) from neuraminidase__InfluenzaB__AGX21013
augcugcccagcaccauccagacccugacccuguuccugaccagcggcggcgugcugcugagccuguacgugagcgcccugcugagcuaccugcuguacagcgacauccugcugaaguucagccccaccgagaucaccgcccccaccaugagccuggacugcgccaacgccagcaacgugcaggccgugaacagaagcgccaccaagggcgugaccuuccugcugcccgagcccgaguggaccuaccccagacugagcugccccggcagcaccuuccagaaggcccugcugaucagcccccacagauucggcgagaccaagggcaacagcgccccccugaucaucagagagcccuucaucgccugcggccccaacgagugcaagcacuucgcccugacccacuacgccgcccagcccggcggcuacuacaacggcaccagaggcgacagaaacaagcugagacaccugaucagcgugaagcugggcaagauccccaccguggagaacagcaucuuccacauggccgccuggagcggcagcgccugccacgacggcaaggaguggaccuacaucggcguggacggccccgacaacgacgcccugcugaaggugaaguacggcgaggccuacaccgacaccuaccacagcuacgccaacaagauccugagaacccaggagagcgccugcaacugcaucggcggcaacugcuaccugaugaucaccgacggcagcgccagcggcgugagcgagugcagauuccugaagaucagagagggcagaaucaucaaggagaucuuccccaccggcagagugaagcacaccgaggagugcaccugcggcuucgccagcaacaagaccaucgagugcgccugcagagacaacagcuacaccgccaagagacccuucgugaagcugaacguggagaccgacaccgccgagaucagacugaugugcaccaacaccuaccuggacacccccagacccgacgacggcagcaucaccggccccugcgagagcaacggcgacaagggcagcggcggcaucaagggcggcuucgugcaccagagaauggagagcaagaucggcagaugguacagcagaaccaugagcaagaccgagagaaugggcaugggccuguacgugaaguacgacggcgaccccugggccgacagcgacgcccuggccuucagcggcgugauggugagcaugaaggagcccggcugguacagcuucggcuucgagaucaaggacaagaagugcgacgugcccugcaucggcaucgagauggugcacgacggcggcaaggagaccuggcacagcgccgccaccgccaucuacugccugaugggcagcggccagcugcugugggacaccgugaccggcguggacauggcccuguga

SEQ ID NO: 189612 - RNA, 1401 nt, Artificial Sequence
  derived and/or modified CDS sequence (opt4) from neuraminidase__InfluenzaB__AGX21024
augcugcccagcaccauccagacccugacccuguuccugaccagcggcggcgugcugcugagccuguacgugagcgccagccugagcuaccugcuguacagcgacauccugcugaaguucagccccaccgagaucaccgcccccaccaugccccuggacugcgccaacgccagcaacgugcaggccgugaacagaagcgccaccaagggcgugacccugcugcugcccgagcccgaguggaccuaccccagacugagcugccccggcagcaccuuccagaaggcccugcugaucagccccaacagauucggcgagaccaagggcaacagcgccccccugaucaucagagagcccuucaucgccugcggccccaacgagugcaagcacuucgcccugacccacuacgccgcccagcccggcggcuacuacaacggcaccagaggcgacagaaacaagcugagacaccugaucagcgugaagcugggcaagauccccaccguggagaacagcaucuuccacauggccgccuggagcggcagcgccugccacgacggcaaggaguggaccuacaucggcguggacggccccgacaacaacgcccugcugaaggugaaguacggcgaggccuacaccgacaccuaccacagcuacgccaacaagauccugagaacccaggagagcgccugcaacugcaucggcggcaacugcuaccugaugaucaccgacggcagcgccagcggcgugagcgagugcagauuccugaagaucagagagggcagaaucaucaaggagaucuuccccaccggcagagugaagcacaccgaggagugcaccugcggcuucgccagcaacaagaccaucgagugcgccugcagagacaacagcuacaccgccaagagacccuucgugaagcugaacguggagaccgacaccgccgaggugagacugaugugcaccgacaccuaccuggacacccccagacccaacgacggcagcaucaccggccccugcgagagcgacggcgacaagggcagcggcggcaucaagggcggcuucgugcaccagagaauggagagcaagaucggcagaugguacagcagaaccaugagcaagaccgagagaaugggcaugggccuguacgugaaguacgacggcgaccccugggccgacagcgacgcccugaccuucagcggcgugauggugagcaugaaggagcccggcugguacagcuucggcuucgagaucaaggacaagaagugcgacgugcccugcaucggcaucgagauggugcacgacggcggcaaggagaccuggcacagcgccgccaccgccaucuacugccugaugggcagcggccagcugcugugggacaccgugaccggcguggacauggcccuguga

SEQ ID NO: 189613 - RNA, 1401 nt, Artificial Sequence; identical to SEQ ID NO: 189016
  derived and/or modified CDS sequence (opt4) from neuraminidase__InfluenzaB__AGX21035

SEQ ID NO: 189614 - RNA, 1401 nt, Artificial Sequence; identical to SEQ ID NO: 189179
  derived and/or modified CDS sequence (opt4) from neuraminidase__InfluenzaB__AGX21046

SEQ ID NO: 189615 - RNA, 1401 nt, Artificial Sequence; identical to SEQ ID NO: 189182
  derived and/or modified CDS sequence (opt4) from neuraminidase__InfluenzaB__AGX21057

SEQ ID NO: 189616 - RNA, 1401 nt, Artificial Sequence; identical to SEQ ID NO: 189600
  derived and/or modified CDS sequence (opt4) from neuraminidase__InfluenzaB__AGX21068

SEQ ID NO: 189617 - RNA, 1401 nt, Artificial Sequence
  derived and/or modified CDS sequence (opt4) from neuraminidase__InfluenzaB__AGX21079
augcugcccagcaccauccagacccugacccuguuccugaccagcggcggcgugcugcugagccuguacgugagcgccagccugagcuaccugcuguacagcgacauccugcugaaguucagccccaccgagaucaccgcccccgccaugccccuggacugcgccaacgccagcaacgugcaggccgugaacagaagcgccaccaagggcgugacccugcugcugcccgagcccgaguggaccuaccccagacugagcugccccggcagcaccuuccagaaggcccugcugaucagcccccacagauucggcgagaccaagggcaacagcgccccccugaucaucagagagcccuucaucgccugcggccccaacgagugcaagcacuucgcccugacccacuacgccgcccagcccggcggcuacuacaacggcaccagaggcgacagaaacaagcugagacaccugaucagcgugaagcugggcaagauccccaccguggagaacagcaucuuccacauggccgccuggagcggcagcgccugccacgacggcaaggaguggaccuacaucggcguggacggccccgacaacaacgcccugcugaaggugaaguacggcgaggccuacaccgacaccuaccacagcuacgccagcaagauccugagaacccaggagagcgccugcaacugcaucggcggcaacugcuaccugaugaucaccgacggcagcgccagcggcgugagcgagugcagauuccugaagaucagagagggcagaaucaucaaggagaucuuccccaccggcagagugaagcacaccgaggagugcaccugcggcuucgccagcaacaagaccaucgagugcgccugcagagacaacagcuacaccgccaagagacccuucgugaagcugaacguggagaccgacaccgccgagaucagacugaugugcaccgacaccuaccuggacacccccagacccaacgacggcagcaucaccggccccugcgagagcgacggcgacaagggcagcggcggcaucaagggcggcuucgugcaccagagaauggagagcaagaucggcagaugguacagcagaaccaugagcaagaccgagagaaugggcaugggccuguacgugaaguacgacggcgaccccugggccgacagcgacgcccuggccuucagcggcgugauggugagcaugaaggagcccggcugguacagcuucggcuucgagaucaaggacaagaagugcgacgugcccugcaucggcaucgagauggugcacgacggcggcaaggagaccuggcacagcgccgccaccgccaucuacugccugaugggcagcggccagcugcugugggacaccgugaccggcguggacauggcccuguga

SEQ ID NO: 189618 - RNA, 1401 nt, Artificial Sequence; identical to SEQ ID NO: 189182
  derived and/or modified CDS sequence (opt4) from neuraminidase__InfluenzaB__AGX21088

SEQ ID NO: 189619 - RNA, 1401 nt, Artificial Sequence; identical to SEQ ID NO: 189182
  derived and/or modified CDS sequence (opt4) from neuraminidase__InfluenzaB__AGX21099

SEQ ID NO: 189620 - RNA, 1401 nt, Artificial Sequence
  derived and/or modified CDS sequence (opt4) from neuraminidase__InfluenzaB__AGX21110
augcugcccagcaccauccagacccugacccuguuccugaccagcggcggcgugcugcugagccuguacgugagcgcccugcugagcuaccugcuguacagcgacauccugcugaaguucagccccaccgagaucaccgcccccaccaugagccuggacugcgccaacgccagcaacgugcaggccgugaacagauucgccaccaagggcgugaccuuccugcugcccgagcccgaguggaccuaccccagacugagcugccccggcagcaccuuccagaaggcccugcugaucagcccccacagauucggcgagaccaagggcaacagcgccccccugaucaucagagagcccuucaucgccugcggccccaacgagugcaagcacuucgcccugacccacuacgccgcccagcccggcggcuacuacaacggcaccagaggcgacagaaacaagcugagacaccugaucagcgugaagcugggcaagauccccaccguggagaacagcaucuuccacauggccgccuggagcggcagcgccugccacgacggcaaggaguggaccuacaucggcguggacggccccgacaacgacgcccugcugaaggugaaguacggcgaggccuacaccgacaccuaccacagcuacgccaacaagauccugagaacccaggagagcgccugcaacugcaucggcggcaacugcuaccugaugaucaccgacggcagcgccagcggcgugagcgagugcagauuccugaagaucagagagggcagaaucaucaaggagaucuuccccaccggcagagugaagcacaccgaggagugcaccugcggcuucgccagcaacaagaccaucgagugcgccugcagagacaacagcuacaccgccaagagacccuucgugaagcugaacguggagaccgacaccgccgagaucagacugaugugcaccgacaccuaccuggacacccccagacccgacgacggcagcaucaccggccccugcgagagcaacggcgacaagggcagcggcggcaucaagggcggcuucgugcaccagagaauggagagcaagaucggcagaugguacagcagaaccaugagcaagaccgagagaaugggcaugggccuguacgugaaguacgacggcgaccccugggccgacagcgacgcccuggccuucagcggcgugauggugagcaugaaggagcccggcugguacagcuucggcuucgagaucaaggacaagaagugcgacgugcccugcaucggcaucgagauggugcacgacggcggcaaggagaccuggcacagcgccgccaccgccaucuacugccugaugggcagcggccagcugcugugggacaccgugaccggcguggacauggcccuguga

SEQ ID NO: 189621 - RNA, 1401 nt, Artificial Sequence
  derived and/or modified CDS sequence (opt4) from neuraminidase__InfluenzaB__AGX21121
augcugcccagcaccauccagacccugacccuguuccugaccagcggcggcgugcugcugagccuguacgugagcgcccugcugagcuaccugcuguacagcgacauccugcugaaguucagccccaccgagaucaccgcccccaccaugagccuggacugcgccaacgccagcaacgugcaggccgugaacagaagcgccaccaagggcgugaccuuccugcugcccgagcccgaguggaccuaccccagacugagcugccccggcagcaccuuccagaaggcccugcugaucagcccccacagauucggcgagaccaagggcaacagcgccccccugaucaucagagagcccuucaucgccugcggccccaacgagugcaagcacuucgcccugacccacuacgccgcccagcccggcggcuacuacaacggcaccagaggcgacagaaacaagcugagacaccugaucagcgugaagcugggcaagauccccaccguggagaacagcaucuuccacauggccgccuggagcggcagcgccugccacgacggcaaggaguggaccuacaucggcguggacggccccgacaacgacgcccugcugaaggugaaguacggcgaggccuacaccgacaccuaccacagcuacgccaacaagauccugagaacccaggagagcgccugcaacugcaucggcggcaacugcuaccugaugaucaccgacggcagcgccagcggcgugagcgagugcagauuccugaagaucagagagggcagaaucaccaaggagaucuuccccaccggcagagugaagcacaccgaggagugcaccugcggcuucgccagcaacaagaccaucgagugcgccugcagagacaacagcuacaccgccaagagacccuucgugaagcugaacguggagaccgacaccgccgagaucagacugaugugcaccgacaccuaccuggacacccccagacccgacgacggcagcaucaccggccccugcgagagcaacggcgacaagggcagcggcggcaucaagggcggcuucgugcaccagagaauggagagcaagaucggcagaugguacagcagaaccaugagcaagaccgagagaaugggcaugggccuguacgugaaguacgacggcgaccccugggccgacagcgacgcccuggccuucagcggcgugauggugagcaugaaggagcccggcugguacagcuucggcuucgagaucaaggacaagaagugcgacgugcccugcaucggcaucgagauggugcacgacggcggcaaggagaccuggcacagcgccgccaccgccaucuacugccugaugggcagcggccagcugcugugggacaccgugaccggcguggacauggcccuguga

SEQ ID NO: 189622 - RNA, 1401 nt, Artificial Sequence; identical to SEQ ID NO: 189179
  derived and/or modified CDS sequence (opt4) from neuraminidase__InfluenzaB__AGX21132

SEQ ID NO: 189623 - RNA, 1401 nt, Artificial Sequence; identical to SEQ ID NO: 188955
  derived and/or modified CDS sequence (opt4) from neuraminidase__InfluenzaB__AGX21143

SEQ ID NO: 189624 - RNA, 1401 nt, Artificial Sequence; identical to SEQ ID NO: 189016
  derived and/or modified CDS sequence (opt4) from neuraminidase__InfluenzaB__AGX21154

SEQ ID NO: 189625 - RNA, 1401 nt, Artificial Sequence
  derived and/or modified CDS sequence (opt4) from neuraminidase__InfluenzaB__AGX21165
augcugcccagcaccauccagacccugacccuguuccugaccagcggcggcgugcugcugagccuguacgugagcgcccugcugagcuaccugcuguacagcgacauccugcugaaguucagccccaccgagaucaccgcccccaccaugagccuggacugcgccaacgccagcaacgugcaggccgugaacagaagcgccaccaagggcgugaccuuccugcugcccgagcccgaguggaccuaccccagacugagcugccccggcagcaccuuccagaaggcccugcugaucagcccccacagauucggcgagaccaagggcaacagcgccccccugaucaucagagagcccuucaucgccugcggccccaacgagugcaagcacuucgcccugacccacuacgccgcccagcccggcggcuacuacaacggcaccagaggcgacagaaacaagcugagacaccugaucagcgugaagcugggcaagauccccaccguggagaacagcaucuuccacauggccgccuggagcggcagcgccugccacgacggcaaggaguggaccuacaucggcguggacggccccgacaacgacgcccugcugaaggugaaguacggcgaggccuacaccgacaccuaccacagcuacgccaacaagauccugagaacccaggagagcgccugcaacugcaucggcggcaacugcuaccugaugaucaccgacggcagcgccagcggcgugagcgagugcagauuccugaagaucagagagggcagaaucaucaaggagaucuuccccaccggcagagugaagcacaccgaggagugcaccugcggcuucgccagcaacaagaccaucgagugcgccugcagagacaacagcuacaccgccaagagacccuucgugaagcugaacauggagaccgacaccgccgagaucagacugaugugcaccgacaccuaccuggacacccccagacccgacgacggcagcaucaccggccccugcgagagcaacggcgacaagggcagcggcggcaucaagggcggcuucgugcaccagagaauggagagcaagaucggcagaugguacagcagaaccaugagcaagaccgagagaaugggcaugggccuguacgugaaguacgacggcgaccccugggccgacagcgacgcccuggccuucagcggcgugauggugagcaugaaggagcccggcugguacagcuucggcuucgagaucaaggacaagaagugcgacgugcccugcaucggcaucgagauggugcacgacggcggcaaggagaccuggcacagcgccgccaccgccaucuacugccugaugggcagcggccagcugcugugggacaccgugaccggcguggacauggcccuguga

SEQ ID NO: 189626 - RNA, 1401 nt, Artificial Sequence; identical to SEQ ID NO: 189016
  derived and/or modified CDS sequence (opt4) from neuraminidase__InfluenzaB__AGX21176

SEQ ID NO: 189627 - RNA, 1401 nt, Artificial Sequence
  derived and/or modified CDS sequence (opt4) from neuraminidase__InfluenzaB__AGX21187
augcugcccagcaccauccagacccugacccuguuccugaccagcggcggcgugcugcugagccuguacgugagcgccagccugagcuaccugcuguacagcgacauccugcugaaguucagccccaccgagaucaccgcccccaccaugccccuggacugcgccaacgccagcaacgugcaggccgugaacagaagcgccaccaagggcgugacccugcugcugcccgagcccgaguggaccuaccccagacugagcugccccggcagcaccuuccagaaggcccugcugaucagcccccacagauucggcgagaccaagggcaacagcgccccccugaucaucagagagcccuucaucgccugcggccccaacgagugcaagcacuucgcccugacccacuacgccgcccagcccggcggcuacuacaacggcaccagaggcgacagaaacaagcugagacaccugaucagcgugaagcugggcaagauccccaccguggagaacagcaucuuccacauggccgccuggagcggcagcgccugccacgacggcaaggaguggaccuacaucggcguggacggccccgacaacaacgcccugcugaaggugaaguacggcgaggccuacaccgacaccuaccacagcuacgccaacaagauccugagaacccaggagagcgccugcaacugcaucggcggcaacugcuaccugaugaucaccgacggcagcgccagcggcgugagcgagugcagauuccugaagaucagagagggcagaaucaucaaggagaucuuccccaccggcagagugaagcacaccgaggagugcaccugcggcuucgccagcaacaagaccaucgagugcgugugcagagacaacagcuacaccgccaagagacccuucgugaagcugaacguggagaccgacaccgccgaggugagacugaugugcaccgacaccuaccuggacacccccagacccaacgacggcagcaucaccggccccugcgagagcgacggcgacaagggcagcggcggcaucaagggcggcuucgugcaccagagaauggagagcaagaucggcagaugguacagcagaaccaugagcaagaccgagagaaugggcaugggccuguacgugaaguacgacggcgaccccugggccgacagcgacgcccugaccuucagcggcgugauggugagcaugaaggagcccggcugguacagcuucggcuucgagaucaaggacaagaagugcgacgugcccugcaucggcaucgagauggugcacgacggcggcaaggagaccuggcacagcgccgccaccgccaucuacugccugaugggcagcggccagcugcugugggacaccgugaccggcguggacauggcccuguga

SEQ ID NO: 189628 - RNA, 1401 nt, Artificial Sequence
  derived and/or modified CDS sequence (opt4) from neuraminidase__InfluenzaB__AGX21198
augcugcccagcaccauccagaugcugacccuguuccugaccagcggcggcgugcugcugagccuguacgugagcgccagccugagcuaccugcuguacagcgacauccugcugaaguucagccccaccgagaucaccgcccccaccaugccccuggacugcgccaacgccagcaacgugcacgccgugaacagaagcgccaccaagggcgugaccuuccugcugcccgagcccgaguggaccuaccccagacugagcugccccggcagcaccuuccagaaggcccugcugaucagcccccacagauucggcgagaccaagggcaacagcgccccccugaucaucagagagcccuucaucgccugcgagcccaacgagugcaagcacuucgcccugacccacuacgccgcccagcccggcggcuacuacaacggcaccagaggcgacagaaacaagcugagacaccugaucagcgugaagcugggcaagauccccaccguggagaacagcaucuuccacauggccgccuggagcggcagcgccugccacgacggcaaggaguggaccuacaucggcguggacggccccgacaacaacgcccugcugaagaucaaguacggcgaggccuacaccgacaccuaccacagcuacgccaacaacauccugagaacccaggagagcgccugcaacugcaucggcggcaacugcuaccugaugaucaccgacggcagcgccagcggcgugagcgagugcagauuccugaagaucagagagggcagaaucaucaaggagaucuuccccaccggcagagugaagcacaccgaggagugcaccugcggcuucgccagcaacaagaccaucgagugcgccugcagagacaacagcuacaccgccaagagacccuucgugaagcugaacguggagaccgacaccgccgagaucagacugaugugcaccgacaccuaccuggacacccccagacccgacgacggcagcaucaccggccccugcgagagcaacggcgacaagggcagcggcggcaucaagggcggcuucgugcaccagagaauggccagcaagaucggcagaugguacagcagaaccaugagcaagaccgagagaaagggcaugggccuguacgugaaguacgacggcgaccccuggaccgacagcgacgcccuggccuucagaggcgugauggugagcaugaaggagcccggcugguacagcuucggcuucgagaucaaggacaagaagugcgacgugcccugcaucggcaucgagauggugcacgacggcggcaaggagaccuggcacagcgccgccaccgccaucuacugccugaugggcagcggccagcugcugugggacaccgugaccggcguggacauggcccuguga

SEQ ID NO: 189629 - RNA, 1401 nt, Artificial Sequence; identical to SEQ ID NO: 189016
  derived and/or modified CDS sequence (opt4) from neuraminidase__InfluenzaB__AGX21209

SEQ ID NO: 189630 - RNA, 1401 nt, Artificial Sequence; identical to SEQ ID NO: 189179
  derived and/or modified CDS sequence (opt4) from neuraminidase__InfluenzaB__AGX21220

SEQ ID NO: 189631 - RNA, 1401 nt, Artificial Sequence
  derived and/or modified CDS sequence (opt4) from neuraminidase__InfluenzaB__AGX21231
augcugcccagcaccauccagacccugacccuguuccugaccagcggcggcgugcugcugagccuguacgugagcgcccugcugagcuaccugcuguacagcgacauccugcugaaguucagccccaccgagaucaccgcccccaccaugagccuggacugcgccaacgccagcaacgugcaggccgugaacagaagcgccaccaagggcgugaccuuccugcugcccgagagcgaguggaccuaccccagacugagcugccccggcagcaccuuccagaaggcccugcugaucagcccccacagauucggcgagaccaagggcaacagcgccccccugaucaucagagagcccuucaucgccugcggccccaacgagugcaagcacuucgcccugacccacuacgccgcccagcccggcggcuacuacaacggcaccagaggcgacagaaacaagcugagacaccugaucagcgugaagcugggcaagauccccaccguggagaacagcaucuuccacauggccgccuggagcggcagcgccugccacgacggcaaggaguggaccuacaucggcguggacggccccgacaacgacgcccugcugaaggugaaguacggcgaggccuacaccgacaccuaccacagcuacgccaacaagauccugagaacccaggagagcgccugcaacugcaucggcggcaacugcuaccugaugaucaccgacggcagcgccagcggcgugagcgagugcagauuccugaagaucagagagggcagaaucaucaaggagaucuuccccaccggcagagugaagcacaccgaggagugcaccugcggcuucgccagcaacaagaccaucgagugcgccugcagagacaacagcuacaccgccaagagacccuucgugaagcugaacguggagaccgacaccgccgagaucagacugaugugcaccgacaccuaccuggacacccccagacccgacgacggcagcaucaccggccccugcgagagcaacggcgacaagggcagcggcggcaucaagggcggcuucgugcaccagagaauggagagcaagaucggcagaugguacagcagaaccaugagcaagaccgagagaaugggcaugggccuguacgugaaguacgacggcgaccccugggccgacagcgacgcccuggccuucagcggcgugauggugagcaugaaggagcccggcugguacagcuucggcuucgagaucaaggacaagaagugcgacgugcccugcaucggcaucgagauggugcacgacggcggcaaggagaccuggcacagcgccgccaccgccaucuacugccugaugggcagcggccagcugcugugggacaccgugaccggcguggacauggcccuguga

SEQ ID NO: 189632 - RNA, 1401 nt, Artificial Sequence; identical to SEQ ID NO: 189182
  derived and/or modified CDS sequence (opt4) from neuraminidase__InfluenzaB__AGX21242

SEQ ID NO: 189633 - RNA, 1401 nt, Artificial Sequence; identical to SEQ ID NO: 189016
  derived and/or modified CDS sequence (opt4) from neuraminidase__InfluenzaB__AGX21253

SEQ ID NO: 189634 - RNA, 1401 nt, Artificial Sequence
  derived and/or modified CDS sequence (opt4) from neuraminidase__InfluenzaB__AGX21264
augcugcccagcaccauccagacccugacccuguuccugaccagcggcggcgugcugcugagccuguacgugagcgccagccugagcuaccugcuguacagcgacauccugcugaaguucagcaccaccgagaucaccgcccccaccaugccccuggacugcgccaacgccagcaacgugcaggccgugaacagaagcgccaccaagggcgugacccugcugcugcccgagcccgaguggaccuaccccagacugagcugccccggcagcaccuuccagaaggcccugcugaucagcccccacagauucggcgagaacaagggcaacagcgccccccugaucaucagagagcccuucaucgccugcggccccaacgagugcaagcacuucgcccugacccacuacgccgcccagcccggcggcuacuacaacggcaccagaggcgacagaaacaagcugagacaccugaucagcgugaagcugggcaagauccccaccguggagaacagcaucuuccacauggccgccuggagcggcagcgccugccacgacggcaaggaguggaccuacaucggcguggacggccccgacaacaacgcccugcugaaggugaaguacggcgaggccuacaccgacaccuaccacagcuacgccaacaagauccugagaacccaggagagcgccugcaacugcaucggcggcaacugcuaccugaugaucaccgacggcagcgccagcggcgugagcgagugcagauuccugaagaucagagagggcagaaucaucaaggagaucuuccccaccggcagagugaagcacaccgaggagugcaccugcggcuucgccagcaacaagaccaucgagugcgccugcagagacaacagcuacaccgccaagagacccuucgugaagcugaacguggagaccgacaccgccgagaucagacugaugugcaccgacaccuaccuggacacccccagacccaacgacggcagcaucaccggccccugcgagagcgacggcgacaagggcagcggcggcaucaagggcggcuucgugcaccagagaauggagagcaagaucggcagaugguacagcagaaccaugagcaagaccgagagaaugggcaugggccuguacgugaaguacgacggcgaccccugggccgacagcgacgcccuggccuucagcggcgugauggugagcaugaaggagcccagcugguacagcuucggcuucgagaucaaggacaagaagugcgacgugcccugcaucggcaucgagauggugcacgacggcggcaaggagaccuggcacagcgccgccaccgccaucuacugccugaugggcagcggccagcugcugugggacaccgugaccggcguggacauggcccuguga

SEQ ID NO: 189635 - RNA, 1401 nt, Artificial Sequence; identical to SEQ ID NO: 188955
  derived and/or modified CDS sequence (opt4) from neuraminidase__InfluenzaB__AGX21275

SEQ ID NO: 189636 - RNA, 1401 nt, Artificial Sequence; identical to SEQ ID NO: 189016
  derived and/or modified CDS sequence (opt4) from neuraminidase__InfluenzaB__AGX21286

SEQ ID NO: 189637 - RNA, 1401 nt, Artificial Sequence
  derived and/or modified CDS sequence (opt4) from neuraminidase__InfluenzaB__AGX21297
augcugcccagcaccauccagacccugacccuguuccugaccagcggcggcgugcugcugagccuguacgugagcgccagccugagcuaccugcuguacagcgacauccugcugaaguucagccccaccgagaucaccgcccccaccaugccccuggacugcgccaacgccagcaacgugcaggccgugaacagaagcgccaccaagggcgugacccugcugcugcccgagcccgacuggaccuaccccagacugagcugccccggcagcaccuuccagaaggcccugcugaucagcccccacagauucggcgagaccaagggcaacagcgccccccugaucaucagagagcccuucaucgccugcggccccaacgagugcaagcacuucgcccugacccacuacgccgcccagcccggcggcuacuacaacggcaccagaggcgacagaaacaagcugagacaccugaucagcgugaagcugggcaagauccccaccguggagaacagcaucuuccacauggccgccuggagcggcagcgccugccacgacggcaaggaguggaccuacaucggcguggacggccccgacaacaacgcccugcugaaggugaaguacggcgaggccuacaccgacaccuaccacagcuacgccaacaagauccugagaacccaggagagcgccugcaacugcaucggcggcaacugcuaccugaugaucaccgacggcagcgccagcggcgugagcgagugcagauuccugaagaucagagagggcagaaucaucaaggagaucuuccccaccggcagagugaagcacaccgaggagugcaccugcggcuucgccagcaacaagaccaucgagugcgccugcagagacaacagcuacaccgccaagagacccuucgugaagcugaacguggagaccgacaccgccgaggugagacugaugugcaccgacaccuaccuggacacccccagacccaacgacggcagcaucaccggccccugcgagagcgacggcgacaagggcagcggcggcaucaagggcggcuucgugcaccagagaauggagagcaagaucggcagaugguacagcagaaccaugagcaagaccgagagaaugggcaugggccuguacgugaaguacgacggcgaccccugggccgacagcgacgcccugaccuucagcggcgugauggugagcaugaaggagcccggcugguacagcuucggcuucgagaucaaggacaagaagugcgacgugcccugcaucggcaucgagauggugcacgacggcggcaaggagaccuggcacagcgccgccaccgccaucuacugccugaugggcagcggccagcugcugugggacaccgugaccggcguggacauggcccuguga

SEQ ID NO: 189638 - RNA, 1401 nt, Artificial Sequence
  derived and/or modified CDS sequence (opt4) from neuraminidase__InfluenzaB__AGX21308
augcugcccagcaccauccagaugcugacccuguuccugaccagcggcggcgugcugcugagccuguacgugagcgccagccugagcuaccugcuguacagcgacauccugcugaaguucagccccaccgagaucaccgcccccaccaugccccuggacugcgccaacgccagcaacgugcacgccgugaacagaagcgccaccaagggcgugaccuuccugcugcccgagcccgaguggaccuaccccagacugagcugccccggcagcaccuuccagaaggcccugcugaucagcccccacagauucggcgagaccaagggcaacagcgccccccugaucaucagagagcccuucaucgccugcggccccaacgagugcaagcacuucgcccugacccacuacgccgcccagcccggcggcuacuacaacggcaccagaggcgacagaaacaagcugagacaccugaucagcgugaagcugggcaagauccccaccguggagaacagcaucuuccacauggccgccuggagcggcagcgccugccacgacggcaaggaguggaccuacaucggcguggacggccccgacaacaacgcccugcugaagaucaaguacggcgaggccuacaccgacaccuaccacagcuacgccaacaacauccugagaacccaggagagcgccugcaacugcaucggcggcaacugcuaccugaugaucaccgacggcagcgccagcggcgugagcgagugcagauuccugaagaucagagagggcagaaucaucaaggagaucuuccccaccggcagagugaagcacaccgaggagugcaccugcggcuucgccagcaacaagaccaucgagugcgccugcagagacaacagcuacaccgccaagagacccuucgugaagcugaacguggagaccgacaccgccgagaucagacugaugugcaccgacaccuaccuggacacccccagacccgacgacggcagcaucaccggccccugcgagagcaacggcgacaagggcagcggcggcaucaagggcggcuucgugcaccagagaauggccagcaagaucggcagaugguacagcagaaccaugagcaagaccgagagaaagggcaugggccuguacgugaaguacgacggcgaccccuggaccgacagcgacgcccuggcccugagaggcgugauggugagcaugaaggagcccggcugguacagcuucggcuucgagaucaaggacaagaagugcgacgugcccugcaucggcaucgagauggugcacgacggcggcaaggagaccuggcacagcgccgccaccgccaucuacugccugaugggcagcggccagcugcugugggacaccgugaccggcguggacauggcccuguga

SEQ ID NO: 189639 - RNA, 1401 nt, Artificial Sequence; identical to SEQ ID NO: 188960
  derived and/or modified CDS sequence (opt4) from neuraminidase__InfluenzaB__AGX21319

SEQ ID NO: 189640 - RNA, 1401 nt, Artificial Sequence; identical to SEQ ID NO: 188955
  derived and/or modified CDS sequence (opt4) from neuraminidase__InfluenzaB__AGX21330

SEQ ID NO: 189641 - RNA, 1401 nt, Artificial Sequence; identical to SEQ ID NO: 188955
  derived and/or modified CDS sequence (opt4) from neuraminidase__InfluenzaB__AGX21341

SEQ ID NO: 189642 - RNA, 1401 nt, Artificial Sequence; identical to SEQ ID NO: 189182
  derived and/or modified CDS sequence (opt4) from neuraminidase__InfluenzaB__AGX21352

SEQ ID NO: 189643 - RNA, 1401 nt, Artificial Sequence
  derived and/or modified CDS sequence (opt4) from neuraminidase__InfluenzaB__AGX21363
augcugcccagcaccauccagacccugacccuguuccugaccagcggcggcgugcugcugagccuguacgugagcgccagccugagcuaccugcuguacagcgacauccugcugaaguucagccccaccgagaucaccgcccccaccaugccccuggacugcgccaacgccagcaacgugcaggccgugaacagaagcgccaccaagggcgugacccugcugcugcccgagcccgaguggaccuaccccagacugagcugccccggcagcaccuuccagaaggcccugcugaucagcagccacagauucggcgagaccaagggcaacagcgccccccugaucaucagagagcccuucguggccugcggccccaacgagugcaagcacuucgcccugacccacuacgccgcccagcccggcggcuacuacaacggcaccagaggcgacagaaacaagcugagacaccugaucagcgugaagcugggcaagauccccaccguggagaacagcaucuuccacauggccgccuggagcggcagcgccugccacgacggcaaggaguggaccuacaucggcguggacggccccgacaacaacgcccugcugaaggugaaguacggcgaggccuacaccgacaccuaccacagcuacgccaacaagauccugagaacccaggagagcgccugcaacugcaucggcggcaacugcuaccugaugaucaccgacggcagcgccagcggcgugagcgagugcagauuccugaagaucagagagggcagaaucaucaaggagaucuuccccaccggcagagugaagcacaccgaggagugcaccugcggcuucgccagcaacaagaccaucgagugcgccugcagagacaacagcuacaccgccaagagacccuucgugaagcugaacguggagaccgacaccgccgagaucagacugaugugcaccgacaccuaccuggacacccccagacccaacgacggcagcaucaccggccccugcgagagcgacggcgacaagggcagcggcggcaucaagggcggcuucgugcaccagagaauggagagcaagaucggcagaugguacagcagaaccaugagcaagaccgagagaaugggcaugggccuguacgugaaguacgacggcgaccccugggccgacagcgacgcccuggccuucagcggcgugauggugagcaugaaggagcccggcugguacagcuucggcuucgagaucaaggacaagaagugcgacgugcccugcaucggcaucgagauggugcacgacggcggcaaggagaccuggcacagcgccgccaccgccaucuacugccugaugggcagcggccagcugcugugggacaccgugaccggcguggacauggcccuguga

SEQ ID NO: 189644 - RNA, 1401 nt, Artificial Sequence; identical to SEQ ID NO: 188955
  derived and/or modified CDS sequence (opt4) from neuraminidase__InfluenzaB__AGX21374

SEQ ID NO: 189645 - RNA, 1401 nt, Artificial Sequence; identical to SEQ ID NO: 189016
  derived and/or modified CDS sequence (opt4) from neuraminidase__InfluenzaB__AGX21385

SEQ ID NO: 189646 - RNA, 1401 nt, Artificial Sequence; identical to SEQ ID NO: 189016
  derived and/or modified CDS sequence (opt4) from neuraminidase__InfluenzaB__AGX21396

SEQ ID NO: 189647 - RNA, 1401 nt, Artificial Sequence; identical to SEQ ID NO: 188955
  derived and/or modified CDS sequence (opt4) from neuraminidase__InfluenzaB__AGX21407

SEQ ID NO: 189648 - RNA, 1401 nt, Artificial Sequence; identical to SEQ ID NO: 188955
  derived and/or modified CDS sequence (opt4) from neuraminidase__InfluenzaB__AGX21418

SEQ ID NO: 189649 - RNA, 1401 nt, Artificial Sequence
  derived and/or modified CDS sequence (opt4) from neuraminidase__InfluenzaB__AGX21429
augcugcccagcaccauccagacccugacccuguuccugaccagcggcggcgugcugcugagccuguacgugagcgcccugcugagcuaccugcugcacagcgacauccugcugaaguucagccccaccgagaucaccgcccccaccaugagccuggacugcgccaacgccagcaacgugcaggccgugaacagaagcgugaccaagggcgugaccuuccugcugcccgagcccgaguggaccuaccccagacugagcugccccggcagcaccuuccagaaggcccugcugaucagcccccacagauucggcgagaccaagggcaacagcgccccccugaucaucagagagcccuucaucgccugcggccccaacgagugcaagcacuucgcccugacccacuacgccgcccagcccggcggcuacuacaacggcaccagaggcgacagaaacaagcugagacaccugaucagcgugaagcugggcaagauccccaccguggagaacagcaucuuccacauggccgccuggagcggcagcgccugccacgacggcaaggaguggaccuacaucggcguggacggccccgacaacgacgcccugcugaaggugaaguacggcgaggccuacaccgacaccuaccacagcuacgccaacaagauccugagaacccaggagagcgccugcaacugcaucggcggcaacugcuaccugaugaucaccgacggcagcgccagcggcgugagcgagugcagauuccugaagaucagagagggcagaaucaucaaggagaucuuccccaccggcagagugaagcacaccgaggagugcaccugcggcuucgccagcaacaagaccaucgagugcgccugcagagacaacagcuacaccgccaagagacccuucgugaagcugaacguggagaccgacaccgccgagaucagacugaugugcaccgacaccuaccuggacacccccagacccgacgacggcagcaucaccggccccugcgagagcaacggcgacaagggcagcggcggcaucaagggcggcuucgugcaccagagaauggagagcaagaucggcagaugguacagcagaaccaugagcaagaccgagagaaugggcaugggccuguacgugaaguacgacggcgaccccugggccgacagcgacgcccuggccuucagcggcgugauggugagcaugaaggagcccggcugguacagcuucggcuucgagaucaaggacaagaagugcgacgugcccugcaucggcaucgagauggugcacgacggcggcaaggagaccuggcacagcgccgccaccgccaucuacugccugaugggcagcggccagcugcugugggacaccgugaccggcguggacauggcccuguga

SEQ ID NO: 189650 - RNA, 1401 nt, Artificial Sequence; identical to SEQ ID NO: 189016
  derived and/or modified CDS sequence (opt4) from neuraminidase__InfluenzaB__AGX21440

SEQ ID NO: 189651 - RNA, 1401 nt, Artificial Sequence; identical to SEQ ID NO: 189016
  derived and/or modified CDS sequence (opt4) from neuraminidase__InfluenzaB__AGX21451

SEQ ID NO: 189652 - RNA, 1401 nt, Artificial Sequence; identical to SEQ ID NO: 189600
  derived and/or modified CDS sequence (opt4) from neuraminidase__InfluenzaB__AGX21462

SEQ ID NO: 189653 - RNA, 1401 nt, Artificial Sequence
  derived and/or modified CDS sequence (opt4) from neuraminidase__InfluenzaB__AGX21473
augcugcccagcaccauccagacccugacccuguuccugaccagcggcggcgugcugcugagccuguacgugagcgcccugcugagcuaccugcuguacagcgacauccugcugaaguucagccccaccgagaucaccgcccccaccaugagccuggacugcgccaacgccagcaacgugcaggccgugaacagaagcgccaccaagggcgugaccuuccugcugcccgagcccgaguggaccuaccccagacugagcugccccggcagcaccuuccagagagcccugcugaucagcccccacagauucggcgaggccaagggcaacagcgccccccugaucaucagagagcccuucaucgccugcggccccaacgagugcaagcacuucgcccugacccacuacgccgcccagcccggcggcuacuacaacggcaccagaggcgacagaaacaagcugagacaccugaucagcgugaagcugggcaagauccccaccguggagaacagcaucuuccacauggccgccuggagcggcagcgccugccacgacggcaaggaguggaccuacaucggcguggacggccccgacaacgacgcccugcugaaggugaaguacggcgaggccuacaccgacaccuaccacagcuacgccaacaagauccugagaacccaggagagcgccugcaacugcaucggcggcaacugcuaccugaugaucaccgacggcagcgccagcggcgugagcgagugcagauuccugaagaucagagagggcagaaucaucaaggagauccugcccaccggcagagugaagcacaccgaggagugcaccugcggcuucgccagcaacaagaccaucgagugcgccugcagagacaacagcuacaccgccaagagacccuucgugaagcugaacguggagaccgacaccgccgagaucagacugaugugcaccgacaccuaccuggacacccccagacccgacgacggcagcaucaccggccccugcgagagcaacggcgacaagggcagcggcggcaucaagggcggcuucgugcaccagagaauggagagcaagaucggcagaugguacagcagaaccaugagcaagaccgagagaaugggcaugggccuguacgugaaguacgacggcgaccccugggccgacagcgacgcccugguguucagcggcgugauggugagcaugaaggagcccggcugguacagcuucggcuucgagaucaaggacaagaagugcgacgugcccugcaucggcaucgagauggugcacgacggcggcaaggagaccuggcacagcgccgccaccgccaucuacugccugaugggcagcggccagcugcugugggacaccgugaccggcguggacauggcccuguga

SEQ ID NO: 189654 - RNA, 1401 nt, Artificial Sequence; identical to SEQ ID NO: 188960
  derived and/or modified CDS sequence (opt4) from neuraminidase__InfluenzaB__AGX21484

SEQ ID NO: 189655 - RNA, 1401 nt, Artificial Sequence; identical to SEQ ID NO: 189016
  derived and/or modified CDS sequence (opt4) from neuraminidase__InfluenzaB__AGX21495

SEQ ID NO: 189656 - RNA, 1401 nt, Artificial Sequence; identical to SEQ ID NO: 189016
  derived and/or modified CDS sequence (opt4) from neuraminidase__InfluenzaB__AGX21506

SEQ ID NO: 189657 - RNA, 1401 nt, Artificial Sequence
  derived and/or modified CDS sequence (opt4) from neuraminidase__InfluenzaB__AGX21517
augcugcccagcaccauccagacccugacccuguuccugaccagcggcggcgugcugcugagccuguacgugagcgcccugcugagcuaccugcuguacagcaacauccugcugaaguucagccccaccgagaucaccgcccccaccaugagccuggacugcgccaacgccagcaacgugcaggccgugaacagaagcgccaccaagggcgugaccuuccugcugcccgagcccgaguggaccuaccccagacugagcugccccggcagcaccuuccagaaggcccugcugaucagcccccacagauucggcgagaccaagggcaacagcgccccccugaucaucagagagcccuucaucgccugcggccccaacgagugcaagcacuucgcccugacccacuacgccgcccagcccggcggcuacuacaacggcaccagaggcgacagaaacaagcugagacaccugaucagcgugaagcugggcaagauccccaccguggagaacagcaucuuccacauggccgccuggagcggcagcgccugccacgacggcaaggaguggaccuacaucggcguggacggccccgacaacgacgcccugcugaaggugaaguacggcgaggccuacaccgacaccuaccacagcuacgccaacaagauccugagaacccaggagagcgccugcaacugcaucggcggcaacugcuaccugaugaucaccgacggcagcgccagcggcgugagcgagugcagauuccugaagaucagagagggcagaaucaucaaggagaucuuccccaccggcagagugaagcacaccgaggagugcaccugcggcuucgccagcaacaagaccaucgagugcgccugcagagacaacagcuacaccgccaagagacccuucgugaagcugaacguggagaccgacaccgccgagaucagacugaugugcaccgacaccuaccuggacacccccagacccgacgacggcagcaucaccggccccugcgagagcaacggcgacaagggcagcggcggcaucaagggcggcuucgugcaccagagaauggagagcaagaucggcagaugguacagcagaaccaugagcaagaccgagagaaugggcaugggccuguacgugaaguacgacggcgaccccugggccgacagcgacgcccuggccuucagcggcgugauggugagcaugaaggagcccggcugguacagcuucggcuucgagaucaaggacaagaagugcgacgugcccugcaucggcaucgagauggugcacgacggcggcaaggagaccuggcacagcgccgccaccgccaucuacugccugaugggcagcggccagcugcugugggacaccgugaccggcguggacauggcccuguga

SEQ ID NO: 189658 - RNA, 1401 nt, Artificial Sequence
  derived and/or modified CDS sequence (opt4) from neuraminidase__InfluenzaB__AGX21528
augcugcccagcaccauccagacccugacccuguuccugaccagcggcggcgugcugcugagccuguacgugagcgccagccugagcuaccugcuguacagcgacauccugcugaaguucagccccaccgagaucaccgcccccaccaugccccuggacugcgccaacgccagcaacgugcaggccgugaacagaagcgccaccaagggcgugacccugcugcugcccgagcccgaguggaccuaccccagacugagcugccccggcagcaccuuccagaaggcccugcugaucagcccccacagauucggcgagaccaagggcaacagcgccccccugaucaucagagagcccuucaucgccugcggccccaacgagugcaagcacuucgcccugacccacuacgccgcccagcccggcggcuacuacaacggcaccagaggcgacagaaacaagcugagacaccugaucagcgugaagcugggcaagauccccaccguggagaacagcaucuuccacauggccgccuggagcggcagcgccugccacgacggcaaggaguggaccuacaucggcguggacggccccgacaacaacgcccugcugaaggugaaguacggcgaggccuacaccgacaccuaccacagcuacgccaacaagauccugagaacccaggagagcgccugcaacugcaucggcggcaacugcuaccugaugaucaccgacggcagcgccagcggcgugagcgagugcagauuccugaagaucagagagggcagaaucaucaaggagaucuuccccaccggcagagugaagcacaccgaggagugcaccugcggcuucgccagcaacaagaccaucgagugcgccugcagagacaacagcuacaccgccaagagacccuucgugaagcugaacguggagaccgacaccgccgaggugagacugaugugcaccgacaccuaccuggacacccccagacccaacgacggcagcaucaccggccccugcgagagcgacggcgacaagggcagcggcggcaucaagggcggcuucgugcaccagagaauggagagcaagaucggcagaugguacagcagaaccaugagcaagaccgagagaaugggcaugggccuguacgugaaguacgacggcgaccccugggccgacagcgacgcccugaccuucagcggcgugauggugagcaugaaggagcccggcugguacagcuucggcuucgagaucaaggacaagaagugcgacgugcccugcaucggcaucgagauggugcacgacagcggcaaggagaccuggcacagcgccgccaccgccaucuacugccugaugggcagcggccagcugcugugggacaccgugaccggcguggacauggcccuguga

SEQ ID NO: 189659 - RNA, 1401 nt, Artificial Sequence; identical to SEQ ID NO: 189016
  derived and/or modified CDS sequence (opt4) from neuraminidase__InfluenzaB__AGX21539

SEQ ID NO: 189660 - RNA, 1401 nt, Artificial Sequence
  derived and/or modified CDS sequence (opt4) from neuraminidase__InfluenzaB__AGX21550
augcugcccagcaccauccagacccugacccuguuccugaccagcggcggcgugcugcugagccuguacgugagcgccagccugagcuaccugcuguacagcgacauccugcugaaguucagccccaccgagaucaccgcccccaccaugccccuggacugcgccaacgccagcaacgugcaggccgugaacagaagcgccaccaagggcgugacccugcugcugcccgagcccgaguggaccuaccccagacugagcugccccggcagcaccuuccagaaggcccugcugaucagcccccacagauucggcgagaccaagggcaacagcgccccccugaucaucagagagcccuucaucgccugcggccccaacgagugcaagcacuucgcccugacccacuacgccgcccagcccggcggcuacuacaacggcaccagaggcgacagaaacaagcugagacaccugaucagcgugaagcugggcaagauccccaccguggagaacagcaucuuccacauggccgccuggagcggcagcgccugccacgacggcaaggaguggaccuacaucggcguggacggccccgacaacaacgcccugcugaaggugaaguacggcgaggccuacaccgacaccuaccacagcuacgccaacaagauccugagaacccaggagagcgccugcaacugcaucggcggcaacugcuaccugaugaucaccgacggcagcgccagcggcgugagcgagugcagauuccugaagaucagagagggcagaaucaucaaggagaucuuccccgccggcagagugaagcacaccgaggagugcaccugcggcuucgccagcaacaagaccaucgagugcgccugcagagacaacagcuacaccgccaagagacccuucgugaagcugaacguggagaccgacaccgccgaggugagacugaugugcaccgacaccuaccuggacacccccagacccaacgacggcagcaucaccggccccugcgagagcgacggcgacaagggcagcggcggcaucaagggcggcuucgugcaccagagaauggagagcaagaucggcagaugguacagcagaaccaugagcaagaccgagagaaugggcaugggccuguacgugaaguacgacggcgaccccugggccgacagcgacgcccugaccuucagcggcgugauggugagcaugaaggagcccggcugguacagcuucggcuucgagaucaaggacaagaagugcgacgugcccugcaucggcaucgagauggugcacgacggcggcaaggagaccuggcacagcgccgccaccgccaucuacugccugaugggcagcggccagcugcugugggacaccgugaccggcguggacauggcccuguga

SEQ ID NO: 189661 - RNA, 1401 nt, Artificial Sequence
  derived and/or modified CDS sequence (opt4) from neuraminidase__InfluenzaB__AGX21561
augcugcccagcaccauccagacccugacccuguuccugaccagcggcggcgugcugcugagccuguacgugagcgccagccugagcuaccugcuguacagcgacauccugcugaaguucagccccaccgagaucaccgcccccaccaugccccuggacugcgccaacgccagcaacgugcaggccgugaacagaagcgccaccaagggcgugacccugcugcugcccgagcccgaguggaccuaccccagacugagcugccccggcagcaccuuccagaaggcccugcugaucagcccccacagauucggcgagaccaagggcaacagcgccccccugaucaucagagagcccuucaucgccugcggccccaacgagugcaagcacuucgcccugacccacuacgccgcccagcccggcggcuacuacaacggcaccagaggcgacagaaacaagcugagacaccugaucagcgugaagcugggcaagauccccaccguggagaacagcaucuuccacauggccgccuggagcggcagcgccugccacgacggcaaggaguggaccuacaucggcguggacggccccgacaacaacgcccugcugaaggugaaguacggcgaggccuacaccgacaccuaccacagcuacgccaacaagauccugagaacccaggagagcgccugcaacugcaucggcggcaacugcuaccugaugaucaccgacggcagcgccagcggcgugagcgagugcagauuccugaaggugagagagggcagaaucaucaaggagaucuuccccaccggcagagugaagcacaccgaggagugcaccugcggcuucgccagcaacaagaccaucgagugcgccugcagagacaacagcuacaccgccaagagacccuucgugaagcugaacguggagaccgacaccgccgaggugagacugaugugcaccgacaccuaccuggacacccccagacccaacgacggcagcaucaccggccccugcgagagcgacggcgacaagggcagcggcggcaucaagggcggcuucgugcaccagagaauggagagcaagaucggcagaugguacagcagaaccaugagcaagaccgagagaaugggcaugggccuguacgugaaguacgacggcgaccccugggccgacagcgacgcccugaccuucagcggcgugauggugagcaugaaggagcccggcugguacagcuucggcuucgagaucaaggacaagaagugcgacgugcccugcaucggcaucgagauggugcacgacggcggcaaggagaccuggcacagcgccgccaccgccaucuacugccugaugggcagcggccagcugcugugggacaccgugaccggcguggacauggcccuguga

SEQ ID NO: 189662 - RNA, 1401 nt, Artificial Sequence; identical to SEQ ID NO: 188960
  derived and/or modified CDS sequence (opt4) from neuraminidase__InfluenzaB__AGX21572

SEQ ID NO: 189663 - RNA, 1401 nt, Artificial Sequence
  derived and/or modified CDS sequence (opt4) from neuraminidase__InfluenzaB__AGX21583
augcugcccagcaccauccagacccugacccuguuccugaccagcggcggcgugcugcugagccuguacgugagcgcccugcugagcuaccugcuguacagcgacauccugcugaaguucagccccaccgagaucaccgcccccaccaugagccuggacugcgccaacgccagcaacgugcaggccgugaacagaagcgccaccaagggcgugaccuuccugcugcccgagcccgaguggaccuaccccagacugagcugccccggcagcaccuuccagagagcccugcugaucagcccccacagauucggcgaggccaagggcaacagcgccccccugaucaucagagagcccuucaucgccugcggccccaacgagugcaagcacuucgcccugacccacuacgccgcccagcccggcggcuacuacaacggcaccagaggcgacagaaacaagcugagacaccugaucagcgugaagcugggcaagauccccaccguggagaacagcaucuuccacauggccgccuggagcggcagcgccugccacgacggcaaggaguggaccuacaucggcguggacggccccgacaacgacgcccugcugaaggugaaguacggcgaggccuacaccgacaccuaccacagcuacgccaacaagauccugagaacccaggagagcgccugcaacugcaucggcggcaacugcuaccugaugaucaccgacggcagcgccagcggcgugagcgagugcagauuccugaagaucagagagggcagaaucaucaaggagauccugcccaccggcagagugaagcacaccgaggagugcaccugcggcuucgccagcaacaagaccaucgagugcgccugcagagacaacagcuacaccgccaagagacccuucgugaagcugaacguggagaccgacaccgccgagaucagacugaugugcaccgacaccuaccuggacacccccagacccgacgacggcagcaucaccggccccugcgagagcaacggcgacaagggcagcggcggcaucaagggcggcuucgugcaccagagaauggagagcaagaucggcagaugguacagcagaaccaugagcaagaccgagagaaugggcauggagcuguacgugaaguacgacggcgaccccugggccgacagcgacgcccuggccuucagcggcgugauggugagcaugaaggagcccggcugguacagcuucggcuucgagaucaaggacaagaagugcgacgugcccugcaucggcaucgagauggugcacgacggcggcaaggagaccuggcacagcgccgccaccgccaucuacugccugaugggcagcggccagcugcugugggacaccgugaccggcguggacauggcccuguga

SEQ ID NO: 189664 - RNA, 1401 nt, Artificial Sequence; identical to SEQ ID NO: 188960
  derived and/or modified CDS sequence (opt4) from neuraminidase__InfluenzaB__AGX21594

SEQ ID NO: 189665 - RNA, 1401 nt, Artificial Sequence; identical to SEQ ID NO: 189182
  derived and/or modified CDS sequence (opt4) from neuraminidase__InfluenzaB__AGX21605

SEQ ID NO: 189666 - RNA, 1401 nt, Artificial Sequence
  derived and/or modified CDS sequence (opt4) from neuraminidase__InfluenzaB__AGX21615
augcugcccagcaccauccagacccugacccuguuccugaccagcggcggcgugcugcugagccuguacgugagcgccagccugagcuaccugcuguacagcgacauccugcugaaguucagcaccaccgagaucaccgcccccaccaugccccuggacugcgccaacgccagcaacgugcaggccgugaacagaagcgccaccaagggcgugacccugcugcugcccgagcccgaguggaccuaccccagacugagcugccccggcagcaccuuccagaaggcccugcugaucagcccccacagauucggcgagaacaagggcaacagcgccccccugaucaucagagagcccuucaucgccugcggccccaacgagugcaagcacuucgcccugacccacuacgccgcccagcccggcggcuacuacaacggcaccagaggcgacagaaacaagcugagacaccugaucagcgugaagcugggcaagauccccaccguggagaacagcaucuuccacauggccgccuggagcggcagcgccugccacgacggcaaggaguggaccuacaucggcguggacggccccgacaacaacgcccugcugaaggugaaguacggcgaggccuacaccgacaccuaccacagcuacgccaacaagauccugagaacccaggagagcgccugcaacugcaucggcggcaacugcuaccugaugaucaccgacggcagcgccagcggcgugagcgagugcagauuccugaagaucagagagggcagaaucaucaaggagaucuuccccaccggcagagugaagcacaccgaggagugcaccugcggcuucgccagcaacaagaccaucgagugcgccugcagagacaacagcuacaccgccaagagacccuucgugaagcugaacguggagaccgacaccgccgagaucagacugaugugcaccgacaccuaccuggacacccccagacccaacgacggcagcaucaccggccccugcgagagcgacggcgacaagggcagcggcggcaucaagggcggcuucgugcaccagagaauggagagcaagaucggcagaugguacagcagaaccaugagcaagaccgagagaaugggcaugggccuguacgugaaguacgacggcgaccccugggccgacagcgacgcccuggccuucagcggcgugauggugagcaugaaggagcccggcugguacagcuucggcuucgagaucaaggacaagaagugcgacgugcccugcaucggcaucgagauggugcacgacggcggcaaggagaccuggcacagcgccgccaccgccaucuacugccugaugggcagcggccagcugcugugggacaccgugaccggcguggacauggcccuguga

SEQ ID NO: 189667 - RNA, 1401 nt, Artificial Sequence; identical to SEQ ID NO: 189016
  derived and/or modified CDS sequence (opt4) from neuraminidase__InfluenzaB__AGX21626

SEQ ID NO: 189668 - RNA, 1401 nt, Artificial Sequence; identical to SEQ ID NO: 189016
  derived and/or modified CDS sequence (opt4) from neuraminidase__InfluenzaB__AGX21637

SEQ ID NO: 189669 - RNA, 1401 nt, Artificial Sequence; identical to SEQ ID NO: 189016
  derived and/or modified CDS sequence (opt4) from neuraminidase__InfluenzaB__AGX21648

SEQ ID NO: 189670 - RNA, 1401 nt, Artificial Sequence
  derived and/or modified CDS sequence (opt4) from neuraminidase__InfluenzaB__AGX21659
augcugcccagcaccauccagacccugacccuguuccugaccagcggcggcgugcugcugagccuguacgugagcgcccugcugagcuaccugcuguacagcgacauccugcugaaguucagccccaccgagaucaccgcccccaccaugagccuggacugcgccaacgccagcaacgugcaggccgugaacagaagcgccaccaagggcgugaccuuccugcugcccgagcccgaguggaccuaccccagacugagcugccccggcagcaccuuccagaaggcccugcugaucagcccccacagauucggcgagaccaagggcaacagcgccccccugaucaucagagagcccuucaucgccugcggccccaacgagugcaagcacuucgcccugacccacuacgccgcccagcccggcggcuacuacaacggcaccagaggcgacagaaacaagcugagacaccuggugagcgugaagcugggcaagauccccaccguggagaacagcaucuuccacauggccgccuggagcggcagcgccugccacgacggcaaggaguggaccuacaucggcguggacggccccgacaacgacgcccugcugaaggugaaguacggcgaggccuacaccgacaccuaccacagcuacgccaacaagauccugagaacccaggagagcgccugcaacugcaucggcggcaacugcuaccugaugaucaccgacggcagcgccagcggcgugagcgagugcagauuccugaagaucagagagggcagaaucaucaaggagaucuuccccaccggcagagugaagcacaccgaggagugcaccugcggcuucgccagcaacaagaccaucgagugcgccugcagagacaacagcuacaccgccaagagacccuucgugaagcugaacguggagaccgacaccgccgagaucagacugaugugcaccgacaccuaccuggacacccccagacccgacgacggcagcaucaccggccccugcgagagcaacggcgacaagggcagcggcggcaucaagggcggcuucgugcaccagagaauggagagcaagaucggcagaugguacagcagaaccaugagcaagaccgagagaaugggcaugggccuguacgugaaguacggcggcgaccccugggccgacagcgacgcccuggccuucagcggcgugauggugagcaugaaggagcccggcugguacagcuucggcuucgagaucaaggacaagaagugcgacgugcccugcaucggcaucgagauggugcacgacggcggcaaggagaccuggcacagcgccgccaccgccaucuacugccugaugggcagcggccagcugcugugggacaccgugaccggcguggacauggcccuguga

SEQ ID NO: 189671 - RNA, 1401 nt, Artificial Sequence
  derived and/or modified CDS sequence (opt4) from neuraminidase__InfluenzaB__AGX21670
augcugcccagcaccauccagacccugacccuguuccugaccagcggcggcgugcugcugagccuguacgugagcgcccugcugagcuaccugcuguacagcgacauccugcugaaguucagccccaccgagaucaccgcccccaccaugagccuggacugcgccaacgccagcaacgugcaggccgugaacagaagcgccaccaagggcgugaccuuccugcugcccgagcccgaguggaccuaccccagacugagcugccccggcagcaccuuccagaaggcccugcugaucagcccccacagauucggcgagaccaagggcaacagcgccccccugaucaucagagagcccuucaucgccugcggccccaacgagugcaagcacuucgcccugacccacuacgccgcccagcccggcggcuacuacaacggcaccagaggcgacagaaacaagcugagacaccugaucagcgugaagcugggcaagauccccaccguggagaacagcaucuuccacauggccgccuggagcggcagcgccugccacgacggcaaggaguggaccuacaucggcguggacggccccgacaacgacgcccugcugaaggugaaguacggcgaggccuacaccgacaccuaccacagcuacgccaacaagauccugagaacccaggagagcgccugcaacugcaucggcggcaacugcuaccugaugaucaccgacggcagcgccagcggcgugagcgagugcagauuccugaagaucagagagggcagaaucaucaaggagaucuuccccaccggcagagugaagcacaccgaggagugcaccugcggcuucgccagcaacaagaccaucgagugcgccugcagagacaacagcuacaccgccaagagacccuucgugaagcugaacguggagaccgacaccgccgagaucagacugaugugcaccgacaccuaccuggacacccccagacccgacgacggcagcaucaccggccccugcgagagcaacggcgacaagggcagcggcggcaucaagggcggcuucgugcaccagagaauggagagcaagaucggcagaugguacagcagaaccaugagcaagaccgagagaaugggcaugggccuguacgugaaguacgacggcgaccccugggccgacagcgacgcccuggccuucagcggcgugauggugagcaugaaggagcccggcugguacagcuucggcuucgagaucaaggacaagaagugcgacgugcccugcaucggcaccgagauggugcacgacggcggcaaggagaccuggcacagcgccgccaccgccaucuacugccugaugggcagcggccagcugcugugggacaccgugaccggcguggacauggcccuguga

SEQ ID NO: 189672 - RNA, 1401 nt, Artificial Sequence
  derived and/or modified CDS sequence (opt4) from neuraminidase__InfluenzaB__AGX21681
augcugcccagcaccauccagaugcugacccuguuccugaccagcggcggcgugcugcugagccuguacgugagcgccagccugagcuaccugcuguacagcgacauccugcugaaguucagccccaccgagaucaccgcccccaccaugccccuggacugcgccaacgccagcaacgugcacgccgugaacagaagcgccaccaagggcgugaccuuccugcugcccgagcccgaguggaccuaccccagacugagcugccccggcagcaccuuccagaaggcccugcugaucagcccccacagauucggcgagaccaagggcaacagcgccccccugaucaucagagagcccuucaucgccugcggccccaacgagugcaagcacuucgcccugacccacuacgccgcccagcccggcggcuacuacaacggcaccagaggcgacagaaacaagcugagacaccugaucagcgugaagcugggcaagauccccaccguggagaacagcaucuuccacauggccgccuggagcggcagcgccugccacgacggcaaggaguggaccuacaucggcguggacggccccgacaacaacgcccugcugaagaucaaguacggcgaggccuacaccgacaccuaccacagcuacgccaacaacauccugagaacccaggagagcgccugcaacugcaucggcggcaacugcuaccugaugaucaccgacggcagcgccagcggcgugagcgagugcagauuccugaagaucagagagggcagaaucaucaaggagaucuuccccaccggcagagugaagcacaccgaggagugcaccugcggcuucgccagcaacaagaccaucgagugcgccugcagagacaacagcuacaccgccaagagacccuucgugaagcugaacguggagaccgacaccgccgagaucagacugaugugcaccgacaccuaccuggacacccccagacccgacgacggcagcaucaccggccccugcgagagcaacggcgacaagggcaacggcggcaucaagggcggcuucgugcaccagagaauggccagcaagaucggcagaugguacagcagaaccaugagcaagaccgagagaaagggcaugggccuguacgugaaguacgacggcgaccccuggaccgacagcgacgcccuggccuucagaggcgugauggugagcaugaaggagcccggcugguacagcuucggcuucgagaucaaggacaagaagugcgacgugcccugcaucggcaucgagauggugcacgacggcggcaaggagaccuggcacagcgccgccaccgccaucuacugccugaugggcagcggccagcugcugugggacaccgugaccggcguggacauggcccuguga

SEQ ID NO: 189673 - RNA, 1401 nt, Artificial Sequence; identical to SEQ ID NO: 188955
  derived and/or modified CDS sequence (opt4) from neuraminidase__InfluenzaB__AGX21692

SEQ ID NO: 189674 - RNA, 1401 nt, Artificial Sequence; identical to SEQ ID NO: 189182
  derived and/or modified CDS sequence (opt4) from neuraminidase__InfluenzaB__AGX21703

SEQ ID NO: 189675 - RNA, 1401 nt, Artificial Sequence
  derived and/or modified CDS sequence (opt4) from neuraminidase__InfluenzaB__AGX21714
augcugcccagcaccauccagacccugacccuguuccugaccagcggcggcgugcugcugagccuguacgugagcgccagccugagcuaccugcuguacagcgacauccugcugaaguucagccccaccgagaucaccgcccccgccaugccccuggacugcgccaacgccagcaacgugcaggccgugaacagaagcgccaccaagggccugacccugcugcugcccgagcccgaguggaccuaccccagacugagcugccccggcagcaccuuccagaaggcccugcugaucagcccccacagauucggcgagaccaagggcaacagcgccccccugaucaucagagagcccuucaucgccugcggccccaacgagugcaagcacuucgcccugacccacuacgccgcccagcccggcggcuacuacaacggcaccagaggcgacagaaacaagcugagacaccugaucagcgugaagcugggcaagauccccaccguggagaacagcaucuuccacauggccgccuggagcggcagcgccugccacgacggcaaggaguggaccuacaucggcguggacggccccgacaacaacgcccugcugaaggugaaguacggcgaggccuacaccgacaccuaccacagcuacgccaacaagauccugagaacccaggagagcgccugcaacugcaucggcggcaacugcuaccugaugaucaccgacggcagcgccagcggcgugagcgagugcagauuccugaagaucagagagggcagaaucaucaaggagaucuuccccaccggcagagugaagcacaccgaggagugcaccugcggcuucgccagcaacaagaccaucgagugcgccugcagagacaacagcuacaccgccaagagacccuucgugaagcugaacguggagaccgacaccgccgagaucagacugaugugcaccgacaccuaccuggacacccccagacccaacgacggcagcaucaccggccccugcgagagcgacggcgacaagggcagcggcggcaucaagggcggcuucgugcaccagagaauggagagcaagaucggcagaugguacagcagaaccaugagcaagaccgagagaaugggcaugggccuguacgugaaguacgacggcgaccccugggccgacagcgacgcccuggccuucagcggcgugauggugagcaugaaggagcccggcugguacagcuucggcuucgagaucaaggacaagaagugcgacgugcccugcaucggcaucgagauggugcacgacggcggcaaggagaccuggcacagcgccgccaccgccaucuacugccugaugggcagcggccagcugcugugggacaccgugaccggcguggacauggcccuguga

SEQ ID NO: 189676 - RNA, 1401 nt, Artificial Sequence
  derived and/or modified CDS sequence (opt4) from neuraminidase__InfluenzaB__AGX21725
augcugcccagcaccauccagaugcugacccuguuccugaccagcggcggcgugcugcugagccuguacgugagcgccagccugagcuaccugcuguacagcgacauccugcugaaguucagccccaccgagaucaccgcccccaccaugccccuggacugcgccaacgccagcaacgugcacgccgugaacagaagcgccaccaagggcgugaccuuccugcugcccgagcccgaguggaccuaccccagacugagcugccccggcagcaccuuccagagagcccugcugaucagcccccacagauucggcgagaccaagggcaacagcgccccccugaucaucagagagcccuucaucgccugcggccccaacgagugcaagcacuucgcccugacccacuacgccgcccagcccggcggcuacuacaacggcaccagaggcgacagaaacaagcugagacaccugaucagcgugaagcugggcaagauccccaccguggagaacagcaucuuccacauggccgccuggagcggcagcgccugccacgacggcaaggaguggaccuacaucggcguggacggccccgacaacaacgcccugcugaagaucaaguacggcgaggccuacaccgacaccuaccacagcuacgccaacaacauccugagaacccaggagagcgccugcaacugcaucggcggcaacugcuaccugaugaucaccgacggcagcgccagcggcgugagcgagugcagauuccugaagaucagagagggcagaaucaucaaggagaucuuccccaccggcagagugaagcacaccgaggagugcaccugcggcuucgccagcaacaagaccaucgagugcgccugcagagacaacagcuacaccgccaagagacccuucgugaagcugaacguggagaccgacaccgccgagaucagacugaugugcaccgacaccuaccuggacacccccagacccgacgacggcagcaucaccggccccugcgagagcaacggcgacaagggcagcggcggcaucaagggcggcuucgugcaccagagaauggccagcaagaucggcagaugguacagcagaaccaugagcaagaccgagagaaagggcaugggccuguacgugaaguacgacggcgaccccuggaccgacagcgacgcccuggccuucagaggcgugauggugagcaugaaggagcccggcugguacagcuucggcuucgagaucaaggacaagaagugcgacgugcccugcaucggcaucgagauggugcacgacggcggcaaggagaccuggcacagcgccgccaccgccaucuacugccugaugggcagcggccagcugcugugggacaccgugaccggcguggacauggcccuguga

SEQ ID NO: 189677 - RNA, 1401 nt, Artificial Sequence
  derived and/or modified CDS sequence (opt4) from neuraminidase__InfluenzaB__AGX21747
augcugcccagcaccauccagacccugacccuguuccugaccagcggcggcgugcugcugagccuguacgugagcgccagccugagcuaccugcuguacagcgacauccugcugaaggugagccagaccgagaucaccgcccccaccaugccccuggacugcgccaacgccagcaacgugcaggccgugaacagaagcgccaccaagggcgugacccugcugcugcccgagcccgaguggaccuaccccagacugagcugccccggcagcaccuuccagaaggcccugcugaucagcccccacagauucggcgagaccaagggcaacagcgccccccugaucaucagagagcccuucaucgccugcggccccaaggagugcaagcacuucgcccugacccacuacgccgcccagcccggcggcuacuacaacggcaccagagaggacagaaacaagcugagacaccugaucagcgugaagcugggcaagauccccaccguggagaacagcaucuuccacauggccgccuggagcggcagcgccugccacgacggcagagaguggaccuacaucggcguggacggccccgacagcaacgcccugcugaagaucaaguacggcgaggccuacaccgacaccuaccacagcuacgccaagaacauccugagaacccaggagagcgccugcaacugcaucggcggcgacugcuaccugaugaucaccgacggcagcgccagcggcaucagcgagugcagauuccugaagaucagagagggcagaaucaucaaggagaucuuccccaccggcagagugaagcacaccgaggagugcaccugcggcuucgccagcaacaagaccaucgagugcgccugcagagacaacagcuacaccgccaagagacccuucgugaagcugaacguggagaccgacaccgccgagaucagacugaugugcaccgagaccuaccuggacacccccagacccgacgacggcagcaucaccggccccugcgagagcaacggcgacaagggcagcggcggcaucaagggcggcuucgugcaccagagaauggccagcaagaucggcagaugguacagcagaaccaugagcaagaccaagagaaugggcaugggccuguacgugaaguacgacggcgaccccuggaccgacagcgaggcccuggcccugagcggcgugauggugagcauggaggagcccggcugguacagcuucggcuucgagaucaaggacaagaagugcgacgugcccugcaucggcaucgagauggugcacgacggcggcaagaccaccuggcacagcgccgccaccgccaucuacugccugaugggcagcggccagcugcugugggacaccgugaccggcguggacauggcccuguga

SEQ ID NO: 189678 - RNA, 1401 nt, Artificial Sequence
  derived and/or modified CDS sequence (opt4) from neuraminidase__InfluenzaB__AGX21758
augcugcccagcaccauccagacccugacccuguuccugaccagcggcggcgugcugcugagccuguacgugagcgccagccugagcuaccugcuguacagcgacauccugcugaaguucacccccaccgagaucaccgugcccaccaugccccuggacugcgccaacgccagcaacgugcaggccgugaacagaagcgccaccaagggcgugacccugcugcugcccgagcccgaguggaccuaccccagacugagcugccccggcagcaccuuccagaaggcccugcugaucagcccccacagauucggcgagaccaagggcaacagcgccccccugaucaucagagagcccuucaucgccugcggccccaaggagugcaagcacuucgcccugacccacuacgccgcccagcccggcggcuacuacaacggcaccagagaggacagaaacaagcugagacaccugaucagcgugaagcugggcaagauccccaccguggagaacagcaucuuccacauggccgccuggagcggcagcgccugccacgacggcaaggaguggaccuacaucggcguggacggccccgacagcaacgcccugcugaagaucaaguacggcgaggccuacaccgacaccuaccacagcuacgccaacaacauccugagaacccaggagagcgccugcaacugcaucggcggcaacugcuaccugaugaucaccgacggcagcgccagcggcaucagcgagugcagauuccugaagaucagagagggcagaaucaucaaggagaucuuccccaccggcagagugaagcacaccgaggagugcaccugcggcuucgccagcaacaagaccaucgagugcgccugcagagacaacagcuacaccgccaagagacccuucgugaagcugaacguggagaccgacaccgccgagaucagacugaugugcaccgagaccuaccuggacacccccagacccgacgacggcagcaucaccggccccugcgagagcaacggcaacaagggcagcggcggcaucaagggcggcuucgugcaccagagaauggccagcaagaucggcagaugguacagcagaaccaugagcaagaccaagagaaugggcaugggccuguacgugaaguacgacggcgaccccuggaccgacagcgacgcccuggcccugagcggcgugauggugagcauggaggagcccggcugguacagcuucggcuucgagaucaaggacaagaagugcgacgugcccugcaucggcaucgagauggugcacgacggcggcaaggagaccuggcacagcgccgccaccgccaucuacugccugaugggcagcggccagcugcugugggacaccgugaccggcguggacauggcccuguga

SEQ ID NO: 189679 - RNA, 1401 nt, Artificial Sequence
  derived and/or modified CDS sequence (opt4) from neuraminidase__InfluenzaB__AGX21769
augcugcccagcaccauccagacccugacccuguuccugaccagcggcggcgugcugcugagccuguacgugagcgccagccugagcuaccugcuguacagcgacauccugcugaaguucagccagaccgagaucaccgcccccaccaugccccuggacugcgccaacgccagcaacgugcaggccgccaacagaagcgccaccaagggcgugacccugcugcugcccgagcccgaguggaccuaccccagacugagcugccccggcagcaccuuccagaaggcccugcugaucagcccccacagauucggcgagaccaagggcaacagcgccccccugaucaucagagagcccuucaucgccugcggccccaaggagugcaagcacuucgcccugacccacuacgccgcccagcccggcggcuacuacaacggcaccagagaggacagaaacaagcugagacaccugaucagcgugaagcugggcaagauccccaccguggagaacagcaucuuccacauggccgccuggagcggcagcgccugccacgacggcagagaguggaccuacaucggcguggacggccccgacagcaacgcccugcugaagaucaaguacggcgaggccuacaccgacaccuaccacagcuacgccaagaacauccugagaacccaggagagcgccugcaacugcaucggcggcgacugcuaccugaugaucaccgacggcagcgccagcggcaucagcgagugcagauuccugaagaucagagagggcagaaucaucaaggagaucuuccccaccggcagagugaagcacaccgaggagugcaccugcggcuucgccagcaacaagaccaucgagugcgccugcagagacaacagcuacaccgccaagagacccuucgugaagcugaacguggagaccgacaccgccgagaucagacugaugugcaccaagaccuaccuggacacccccagacccaacgacggcagcaucaccggccccugcgagagcgacggcgacaagggcagcggcggcaucaagggcggcuucgugcaccagagaauggccagcaagaucggcagaugguacagcagaaccaugagcaagaccaagagaaugggcaugggccuguacgugaaguacgacggcgaccccuggaccgacagcgaggcccuggcccugagcggcgugauggugagcauggaggagcccggcugguacagcuucggcuucgagaucaaggacaagaagugcgacgugcccugcaucggcaucgagauggugcacgacggcggcaagaccaccuggcacagcgccgccaccgccaucuacugccugaugggcagcggccagcugcugugggacaccgugaccggcguggacauggcccuguga

SEQ ID NO: 189680 - RNA, 1401 nt, Artificial Sequence
  derived and/or modified CDS sequence (opt4) from neuraminidase__InfluenzaB__AGX21780
augcugcccagcaccauccagacccugacccuguuccugaccagcggcggcgugcugcugagccuguacgugagcgccagccugagcuaccugcuguacagcgacauccugcugaaguucagccagaccgagaucaccgcccccaccaugccccuggacugcgccaacgccagcaacgugcaggccgugaacagaagcgccaccaagggcgugacccugcugcugcccgagcccgaguggaccuaccccagacugagcugccccggcagcaccuuccagaaggcccugcugaucagcccccacagauucggcgagaccaagggcaacagcgccccccugaucaucagagagcccuucaucgccugcggccccaaggagugcaagcacuucgcccugacccacuacgccgcccagcccggcggcuacuacaacggcaccagagaggacagaaacaagcugagacaccugaucagcgugaagcugggcaagauccccaccguggagaacagcaucuuccacauggccgccuggagcggcagcgccugccacgacggcagagaguggaccuacaucggcguggacggccccgacagcaacgcccugcugaagaucaaguacggcgaggccuacaccgacaccuaccacagcuacgccaagaacauccugagaacccaggagagcgccugcaacugcaucggcggcgacugcuaccugaugaucaccgacggcagcgccagcggcaucagcgagugcagauuccugaagaucagagagggcagaaucaucaaggagaucuuccccaccggcagagugaagcacaccgaggagugcaccugcggcuucgccagcaacaagaccaucgagugcgccugcagagacaacagcuacaccgccaagagacccuucgugaagcugaacguggagaccgacaccgccgagaucagacugaugugcaccgagaccuaccuggacacccccagacccaacgacggcagcaucaccggccccugcgagagcaacggcgacaagggcagcggcggcaucaagggcggcuucgugcaccagagaauggagagcaagaucggcagaugguacagcagaaccaugagcaagaccaagagaaugggcaugggccuguacgugaaguacgacggcgaccccuggaccgacagcgaggcccuggcccugagcggcgugauggugagcauggaggagcccggcugguacagcuucggcuucgagaucaaggacaagaagugcgacgugcccugcaucggcaucgagauggugcacgacggcggcaagaccaccuggcacagcgccgccaccgccaucuacugccugaugggcagcggccagcugcugugggacaccgugaccggcguggacaugacccuguga

SEQ ID NO: 189681 - RNA, 1401 nt, Artificial Sequence
  derived and/or modified CDS sequence (opt4) from neuraminidase__InfluenzaB__AGX21791
augcugcccagcaccauccagacccugacccuguuccugaccagcggcggcgugcugcugagccuguacgugagcgccagccugagcuaccugcuguacagcgacauccugcugaaguucagccccaccgagaucaccgcccccaccaugccccuggacugcgccaacgccagcaacgugcaggccgugaacagaagcgccaccaagggcgugacccugcugcugcccgagcccgaguggaccuaccccagacugagcugccccggcagcaccuuccagaaggcccugcugaucagcccccacagauucggcgagaccaagggcaacagcgccccccugaucaucagagagcccuucaucgccugcggccccaaggagugcaagcacuucgcccugacccacuacgccgcccagcccggcggcuacuacagcggcaccagaggcgacagaaacaagcugagacaccugaucagcgugaagcugggcaagauccccaccguggagaacagcaucuuccacauggccgccuggagcggcagcgccugccacgacggcaaggaguggaccuacaucggcguggacggccccgacaacaacgcccugcugaagaucaaguacggcgaggccuacaccgacaccuaccacagcuacgccaacaacauccugagaacccaggagagcgccugcaacugcaucggcggcaacugcuaccugaugaucaccgacggcagcgccagcggcaucagcgagugcagauuccugaagaucagagagggcagaaucaucaaggagaucuuccccaccggcagagugaagcacaccgaggagugcaccugcggcuucgccagcaacaagaccaucgagugcgccugcagagacaacaacuacaccgccaagagacccuucgugaagcugaacguggagaccgacaccgccgagaucagacugaugugcaccgagaccuaccuggacacccccagacccgacgacggcagcaucaccggccccugcgagagcaacggcgacaagggcagcggcggcaucaagggcggcuucgugcaccagagaauggccagcaagaucggcagaugguacagcagaaccaugagcaagaacaagagaaugggcaugggccuguacgugaaguacgacggcgaccccugggccgacagcgacgcccuggcccugagcggcgugauggugagcauggaggagcccggcugguacagcuucggcuucgagaucaaggacaagaagugcgacgugcccugcaucggcaucgagauggugcacgacggcggcaaggagaccuggcacagcgccgccaccgccaucuacugccugaugggcagcggccagcugcugugggacaccgugaccggcguggacauggcccuguga

SEQ ID NO: 189682 - RNA, 1401 nt, Artificial Sequence
  derived and/or modified CDS sequence (opt4) from neuraminidase__InfluenzaB__AGX21802
augcugcccagcaccauccagacccugacccuguuccugaccagcggcggcgugcugcugagccuguacgugagcgccagccugagcuaccugcuguacagcgacauccugcugaaguucagccagaccgagaucaccgcccccaccaugccccuggacugcgccaacgccagcaacgugcaggccgccaacagaagcgccaccaagggcgugacccugcugcugcccgagcccgaguggaccuaccccagacugagcugccccggcagcaccuuccagaaggcccugcugaucagcccccacagauucggcgagaccaagggcaacagcgccccccugaucaucagagagcccuucaucgccugcggccccaaggagugcaagcacuucgcccugacccacuacgccgcccagcccggcggcuacuacaacggcaccagagaggacagaaacaagcugagacaccugaucagcgugaagcugggcaagauccccaccguggagaacagcaucuuccacauggccgccuggagcggcagcgccugccacgacggcagagaguggaccuacaucggcguggacggccccgacagcaacgcccugcugaagaucaaguacggcgaggccuacaccgacaccuaccacagcuacgccaagaacauccugagaacccaggagagcgccugcaacugcaucggcggcgacugcuaccugaugaucaccgacggcagcgccagcggcaucagcgagugcagauuccugaagaucagagagggcagaaucaucaaggagaucuuccccaccggcagagugaagcacaccgaggagugcaccugcggcuucgccagcaacaagaccaucgagugcgccugcagagacaacagcuacaccgccaagagacccuucgugaagcugaacguggagaccgacaccgccgagaucagacugaugugcaccgagaccuaccuggacacccccagacccaacgacggcagcaucaccggccccugcgagagcgacggcgacaagggcagcggcggcaucaagggcggcuucgugcaccagagaauggccagcaagaucggcagaugguacagcagaaccaugagcaagaccaagagaaugggcaugggccuguacgugaaguacgacggcgaccccuggaccgacagcgaggcccuggcccugagcggcgugauggugagcauggaggagcccggcugguacagcuucggcuucgagaucaaggacaagaagugcgacgugcccugcaucggcaucgagauggugcacgacggcggcaagaccaccuggcacagcgccgccaccgccaucuacugccugaugggcagcggccagcugcugugggacaccgugaccggcguggacauggcccuguga

SEQ ID NO: 189683 - RNA, 1401 nt, Artificial Sequence
  derived and/or modified CDS sequence (opt4) from neuraminidase__InfluenzaB__AGX21813
augcugcccagcaccauccagacccugacccuguuccugaccagcggcggcgugcugcugagccuguacgugagcgccagccugagcuaccugcuguacagcgacauccugcugaaguucagccagaccgagaucaccgcccccaagaugccccuggacugcgccaacgccagcaacgugcaggccgccaacagaagcgccaccaagggcgugacccugcugcugcccgagcccgaguggaccuaccccagacugagcugccccggcagcaccuuccagaaggcccugcugaucagcccccacagauucggcgagaccaagggcaacagcgccccccugaucaucagagagcccuucaucgccugcggccccaaggagugcaagcacuucgcccugacccacuacgccgcccagcccggcggcuacuacaacggcaccagagaggacagaaacaagcugagacaccugaucagcgugaagcugggcaagauccccaccguggagaacagcaucuuccacauggccgccuggagcggcagcgccugccacgacggcagagaguggaccuacaucggcguggacggccccgacagcaacgcccugcugaagaucaaguacggcgaggccuacaccgacaccuaccacagcuacgccaagaacauccugagaacccaggagagcgccugcaacugcaucggcggcgacugcuaccugaugaucaccgacggcagcgccagcggcaucagcgagugcagauuccugaagaucagagagggcagaaucaucaaggagaucuuccccaccggcagagugaagcacaccgaggagugcaccugcggcuucgccagcaacaagaccaucgagugcgccugcagagacaacagcuacaccgccaagagacccuucgugaagcugaacguggagaccgacaccgccgagaucagacugaugugcaccgagaccuaccuggacacccccagacccaacgacggcagcaucaccggccccugcgagagcgacggcgacaagggcagcggcggcaucaagggcggcuucgugcaccagagaauggccagcaagaucggcagaugguacagcagaaccaugagcaagaccaagagaaugggcaugggccuguacgugaaguacgacggcgaccccuggaccgacagcgaggcccuggcccugagcggcgugauggugagcauggaggagcccggcugguacagcuucggcuucgagaucaaggacaagaagugcgacgugcccugcaucggcaucgagauggugcacgacggcggcaagaccaccuggcacagcgccgccaccgccaucuacugccugaugggcagcggccagcugcugugggacaccgugaccggcguggacauggcccuguga

SEQ ID NO: 189684 - RNA, 1401 nt, Artificial Sequence
  derived and/or modified CDS sequence (opt4) from neuraminidase__InfluenzaB__AGX21824
augcugcccagcaccauccagacccugacccuguuccugaccagcggcggcgugcugcugagccuguacgugagcgccagccugagcuaccugcuguacagcgacauccugcugaaguucagccagaccgagaucaccgcccccaucaugccccuggacugcgccaacgccagcaacgugcaggccgugaacagaagcgccaccaagggcgugacccugcugcugcccgagcccgaguggaccuaccccagacugagcugccccggcagcaccuuccagaaggcccugcugaucagcccccacagauucggcgagaccaagggcaacagcgccccccugaucaucagagagcccuucaucgccugcggccccaaggagugcaagcacuucgcccugacccacuacgccgcccagcccggcggcuacuacaacggcaccagagaggacagaaacaagcugagacaccugaucagcgugaagcugggcaagauccccaccguggagaacagcaucuuccacauggccgccuggagcggcagcgccugccacgacggcagagaguggaccuacaucggcguggacggccccgacagcaacgcccugcugaagaucaaguacggcgaggccuacaccgacaccuaccacagcuacgccaagaacauccugagaacccaggagagcgccugcaacugcaucggcggcgacugcuaccugaugaucaccgacggccccgccagcggcaucagcgagugcagauuccugaagaucagagagggcagaaucaucaaggagaucuuccccaccggcagagugaagaacaccgaggagugcaccugcggcuucgccagcaacaagaccaucgagugcgccugcagagacaacagcuacaccgccaagagacccuucgugaagcugaacguggagaccgacaccgccgagaucagacugaugugcaccgagaccuaccuggacacccccagacccaacgacggcagcaucaccggccccugcgagagcaacggcgacaagggcagcggcggcaucaagggcggcuucgugcaccagagaauggccagcaagaucggcagaugguacagcagaaccaugagcaagaccaagagaaugggcaugggccuguacgugaaguacgacggcgaccccuggaccgacagcgaggcccuggcccugagcggcgugauggugagcauggaggagcccggcugguacagcuucggcuucgagaucaaggacaagaagugcgacgugcccugcaucggcaucgagauggugcacgacggcggcaagaccaccuggcacagcgccgccaccgccaucuacugccugaugggcagcggccagcugcugugggacaccgugaccggcguggacauggcccuguga

SEQ ID NO: 189685 - RNA, 1401 nt, Artificial Sequence; identical to SEQ ID NO: 188803
  derived and/or modified CDS sequence (opt4) from neuraminidase__InfluenzaB__AGX21835

SEQ ID NO: 189686 - RNA, 1401 nt, Artificial Sequence; identical to SEQ ID NO: 189191
  derived and/or modified CDS sequence (opt4) from neuraminidase__InfluenzaB__AGX21846

SEQ ID NO: 189687 - RNA, 1401 nt, Artificial Sequence; identical to SEQ ID NO: 189191
  derived and/or modified CDS sequence (opt4) from neuraminidase__InfluenzaB__AGX21857

SEQ ID NO: 189688 - RNA, 1401 nt, Artificial Sequence; identical to SEQ ID NO: 188803
  derived and/or modified CDS sequence (opt4) from neuraminidase__InfluenzaB__AGX21868

SEQ ID NO: 189689 - RNA, 1401 nt, Artificial Sequence; identical to SEQ ID NO: 189189
  derived and/or modified CDS sequence (opt4) from neuraminidase__InfluenzaB__AGX21879

SEQ ID NO: 189690 - RNA, 1401 nt, Artificial Sequence
  derived and/or modified CDS sequence (opt4) from neuraminidase__InfluenzaB__AGX21890
augcugcccagcaccauccagacccugacccuguuccugaccagcggcggcgugcugcugagccuguacgugagcgccagccugagcuaccugcuguacagcgacauccugcugaaguucagccagaccgagaucaucgcccccaucaugccccuggacugcgccaacgccagcaacgugcaggccgugaaccacagcgccaccaagggcgugacccugcugcugcccgagcccgaguggaccuaccccagacugagcugccccggcagcaccuuccagaaggcccugcugaucagcccccacagauucggcgagaccaagggcaacagcgccccccugaucaucagagagcccuucaucgccugcggccccaaggagugcaagcacuucgcccugacccacuacgccgcccagcccggcggcuacuacaacggcaccagagaggacagaaacaagcugagacaccugaucagcgugaagcugggcaagauccccaccguggagaacagcaucuuccacauggccgccuggagcggcagcgccugccacgacggcagagaguggaccuacaucggcguggacggccccgacagcaacgcccugcugaagaucaaguacggcgaggccuacaccgacaccuaccacagcuacgccaagaacauccugagaacccaggagagcgccugcaacugcaucggcggcgacugcuaccugaugaucaccgacggccccgccagcggcaucagcgagugcagauuccugaagaucagagagggcagaaucaucaaggagaucuuccccaccggcagagugaagcacaccgaggagugcaccugcggcuucgccagcaacaagaccaucgagugcgccugcagagacaacagcuacaccgccaagagacccuucgugaagcugaacguggagaccgacaccgccgagaucagacugaugugcaccgagaccuaccuggacacccccagacccaacgacggcagcaucaccggccccugcgagagcaacggcgacaagggcagcggcggcaucaagggcggcuucgugcaccagagaauggccagcaagaucggcagaugguacagcagaaccaugagcaagaccaagagaaugggcaugggccuguacgugaaguacgacggcgaccccuggaccgacagcgaggcccuggcccugagcggcgugauggugagcauggaggagcccggcugguacagcuucggcuucgagaucaaggacaagaagugcgacgugcccugcaucggcaucgagauggugcacgacggcggcaagaccaccuggcacagcgccgccaccgccaucuacugccugaugggcagcggccagcugcugugggacaccgugaccggcguggacauggcccuguga

SEQ ID NO: 189691 - RNA, 1401 nt, Artificial Sequence; identical to SEQ ID NO: 188803
  derived and/or modified CDS sequence (opt4) from neuraminidase__InfluenzaB__AGX21901

SEQ ID NO: 189692 - RNA, 1401 nt, Artificial Sequence; identical to SEQ ID NO: 188803
  derived and/or modified CDS sequence (opt4) from neuraminidase__InfluenzaB__AGX21912

SEQ ID NO: 189693 - RNA, 1401 nt, Artificial Sequence
  derived and/or modified CDS sequence (opt4) from neuraminidase__InfluenzaB__AGX21923
augcugcccagcaccauccagacccugacccuguuccugaccagcggcggcgugcugcugagccuguacgugagcgccagccugagcuaccugcuguacagcgacauccugcugaaguucagccagaccgagaucaccgcccccaucaugccccuggacugcaccaacgccagcaacgugcaggccgugaacagaagcgccaccaagggcgugacccugcugcugcccgagcccgaguggaccuaccccagacugagcugccccggcagcaccuuccagaaggcccugcugaucagcccccacagauucggcgagaccaagggcaacagcgccccccugaucaucagagagcccuucaucgccugcggccccaaggagugcaagcacuucgcccugacccacuacgccgcccagcccggcggcuacuacaacggcaccagagaggacagaaacaagcugagacaccugaucagcgugaagcugggcaagauccccaccguggagaacagcaucuuccacauggccgccuggagcggcagcgccugccacgacggcagagaguggaccuacaucggcguggacggccccgacagcaacgcccugcugaagaucaaguacggcgaggccuacaccgacaccuaccacagcuacgccaagaacauccugagaacccaggagagcgccugcaacugcaucggcggcgacugcuaccugaugaucaccgacggccccgccagcggcaucagcgagugcagauuccugaagaucagagagggcagaaucaucaaggagaucuuccccaccggcagagugaagcacaccgaggagugcaccugcggcuucgccagcaacaagaccaucgagugcgccugcagagacaacagcuacaccgccaagagacccuucgugaagcugaacguggagaccgacaccgccgagaucagacugaugugcaccgagaccuaccuggacacccccagacccaacgacggcagcaucaccggccccugcgagagcaacggcgacaagggcagcggcggcaucaagggcggcuucgugcaccagagaauggccagcaagaucggcagaugguacagcagaaccaugagcaagaccaagagaaugggcaugggccuguacgugaaguacgacggcgaccccuggaccgacagcgaggcccuggcccugagcggcgugauggugagcauggaggagcccggcugguacagcuucggcuucgagaucaaggacaagaagugcgacgugcccugcaucggcaucgagauggugcacgacggcggcaagaccaccuggcacagcgccgccaccgccaucuacugccugaugggcagcggccagcugcugugggacaccgugaccggcguggacauggcccuguga

SEQ ID NO: 189694 - RNA, 1401 nt, Artificial Sequence; identical to SEQ ID NO: 189690
  derived and/or modified CDS sequence (opt4) from neuraminidase__InfluenzaB__AGX21934

SEQ ID NO: 189695 - RNA, 1401 nt, Artificial Sequence; identical to SEQ ID NO: 189191
  derived and/or modified CDS sequence (opt4) from neuraminidase__InfluenzaB__AGX21945

SEQ ID NO: 189696 - RNA, 1401 nt, Artificial Sequence
  derived and/or modified CDS sequence (opt4) from neuraminidase__InfluenzaB__AGX21956
augcugcccagcaccauccagacccugacccuguuccugaccagcggcggcgugcugcugagccuguacgugagcgccagccugagcuaccugcuguacagcgacauccugcugaaguucagccagaccgagaucaccgcccccaucaugccccuggacugcgccaacaccagcaacauccaggccgugaacagaagcgccaccaagggcgugacccugcugcugcccgagcccgaguggaccuaccccagacugagcugccccggcagcaccuuccagaaggcccugcugaucagcccccacagauucggcgagaccaagggcaacagcgccccccugaucaucagagagcccuucaucgccugcggccccaaggagugcaagcacuucgcccugacccacuacgccgcccagcccggcggcuacuacaacggcaccagagaggacagaaacaagcugagacaccugaucagcgugaagcugggcaagauccccaccguggagaacagcaucuuccacauggccgccuggagcggcagcgccugccacgacggcagagaguggaccuacaucggcguggacggccccgacagcaacgcccugcugaagaucaaguacggcgaggccuacaccgacaccuaccacagcuacgccaagaacauccugagaacccaggagagcgccugcaacugcaucggcggcgacugcuaccugaugaucaccgacggccccgccagcggcaucagcgagugcagauuccugaagaucagagagggcagaaucaucaaggagaucuuccccaccggcagagugaagcacaccgaggagugcaccugcggcuucgccagcaacaagaccaucgagugcgccugcagagacaacagcuacaccgccaagagacccuucgugaagcugaacguggagaccgacaccgccgagaucagacugaugugcaccgagaccuaccuggacacccccagacccaacgacggcagcaucaccggccccugcgagagcaacggcgacaagggcagcggcggcaucaagggcggcuucgugcaccagagaauggccagcaagaucggcagaugguacagcagaaccaugagcaagaccaagagaaugggcaugggccuguacgugaaguacgacggcgaccccuggaccgacagcgaggcccuggcccugagcggcgugauggugagcauggaggagcccggcugguacagcuucggcuucgagaucaaggacaagaagugcgacgugcccugcaucggcaucgagauggugcacgacggcggcaagaccaccuggcacagcgccgccaccgccaucuacugccugaugggcagcggccagcugcugugggacaccgugaccggcguggacauggcccuguga

SEQ ID NO: 189697 - RNA, 1401 nt, Artificial Sequence; identical to SEQ ID NO: 189191
  derived and/or modified CDS sequence (opt4) from neuraminidase__InfluenzaB__AGX21967

SEQ ID NO: 189698 - RNA, 1401 nt, Artificial Sequence; identical to SEQ ID NO: 188803
  derived and/or modified CDS sequence (opt4) from neuraminidase__InfluenzaB__AGX21978

SEQ ID NO: 189699 - RNA, 1401 nt, Artificial Sequence; identical to SEQ ID NO: 189191
  derived and/or modified CDS sequence (opt4) from neuraminidase__InfluenzaB__AGX21989

SEQ ID NO: 189700 - RNA, 1401 nt, Artificial Sequence; identical to SEQ ID NO: 189189
  derived and/or modified CDS sequence (opt4) from neuraminidase__InfluenzaB__AGX22000

SEQ ID NO: 189701 - RNA, 1401 nt, Artificial Sequence
  derived and/or modified CDS sequence (opt4) from neuraminidase__InfluenzaB__AGX22011
augcugcccagcaccauccagacccugacccuguuccugaccagcggcggcgugcugcugagccuguacgugagcgccagccugagcuaccugcuguacagcgacauccugcugaaguucagccagaccgagaucaccgcccccaucaugccccuggacugcgccaacgccagcaacgugcaggccgugaacagaagcgccaccaagggcgugacccugcugcugcccgagcccgaguggaccuaccccagacugagcugccccggcagcaccuuccagaaggcccugcugaucagcccccacagauucggcgagaccaagggcaacagcgccccccugaucaucagagagcccuucaucgccugcggccccaaggagugcaagcacuucgcccugacccacuacgccgccaagcccggcggcuacuacaacggcaccagagaggacagaaacaagcugagacaccugaucagcgugaagcugggcaagauccccaccguggagaacagcaucuuccacauggccgccuggagcggcagcgccugccacgacggcagagaguggaccuacaucggcguggacggccccgacagcaacgcccugcugaagaucaaguacggcgaggccuacaccgacaccuaccacagcuacgccaagaacauccugagaacccaggagagcgccugcaacugcaucggcggcgacugcuaccugaugaucaccgacggccccgccagcggcaucagcgagugcagauuccugaagaucagagagggcagaaucaucaaggagaucuuccccaccggcagagugaagcacaccgaggagugcaccugcggcuucgccagcaacaagaccaucgagugcgccugcagagacaacaacuacaccgccaagagacccuucgugaagcugaacguggagaccgacaccgccgagaucagacugaugugcaccgagaccuaccuggacacccccagacccaacgacggcagcaucaccggccccugcgagagcaacggcgacaagggcagcggcggcaucaagggcggcuucgugcaccagagaauggccagcaagaucggcagaugguacagcagaaccaugagcaagaccaagagaaugggcaugggccuguacgugaaguacgacggcgaccccuggaccgacagcgaggcccuggcccugagcggcgugauggugagcauggaggagcccggcugguacagcuucggcuucgagaucaaggacaagaagugcgacgugcccugcaucggcaucgagauggugcacgacggcggcaagaccaccuggcacagcgccgccaccgccaucuacugccugaugggcagcggccagcugcugugggacaccgugaccggcguggacauggcccuguga

SEQ ID NO: 189702 - RNA, 1401 nt, Artificial Sequence; identical to SEQ ID NO: 188803
  derived and/or modified CDS sequence (opt4) from neuraminidase__InfluenzaB__AGX22033

SEQ ID NO: 189703 - RNA, 1401 nt, Artificial Sequence; identical to SEQ ID NO: 188803
  derived and/or modified CDS sequence (opt4) from neuraminidase__InfluenzaB__AGX22044

SEQ ID NO: 189704 - RNA, 1401 nt, Artificial Sequence; identical to SEQ ID NO: 189189
  derived and/or modified CDS sequence (opt4) from neuraminidase__InfluenzaB__AGX22055

SEQ ID NO: 189705 - RNA, 1401 nt, Artificial Sequence; identical to SEQ ID NO: 188803
  derived and/or modified CDS sequence (opt4) from neuraminidase__InfluenzaB__AGX22066

SEQ ID NO: 189706 - RNA, 1401 nt, Artificial Sequence; identical to SEQ ID NO: 189690
  derived and/or modified CDS sequence (opt4) from neuraminidase__InfluenzaB__AGX22077

SEQ ID NO: 189707 - RNA, 1401 nt, Artificial Sequence; identical to SEQ ID NO: 188805
  derived and/or modified CDS sequence (opt4) from neuraminidase__InfluenzaB__AGX22088

SEQ ID NO: 189708 - RNA, 1401 nt, Artificial Sequence; identical to SEQ ID NO: 189191
  derived and/or modified CDS sequence (opt4) from neuraminidase__InfluenzaB__AGX22099

SEQ ID NO: 189709 - RNA, 1401 nt, Artificial Sequence; identical to SEQ ID NO: 189189
  derived and/or modified CDS sequence (opt4) from neuraminidase__InfluenzaB__AGX22110

SEQ ID NO: 189710 - RNA, 1401 nt, Artificial Sequence; identical to SEQ ID NO: 189191
  derived and/or modified CDS sequence (opt4) from neuraminidase__InfluenzaB__AGX22132

SEQ ID NO: 189711 - RNA, 1401 nt, Artificial Sequence
  derived and/or modified CDS sequence (opt4) from neuraminidase__InfluenzaB__AGX22143
augcugcccagcaccauccagacccugacccuguuccugaccagcggcggcgugcugcugagccuguacgugagcgccagccugagcuaccugcuguacagcgacauccugcugaaguucagccagaccgagaucaccgcccccaucaugccccuggacugcgccaacgccagcaacgugcaggccgugaacagaagcgccaccaagggcgugacccugcugcugcccgagcccgaguggaccuaccccagacugagcugccccggcagcaccuuccagaaggcccugcugaucagcccccacagauucggcgagaccaagggcaacagcgccccccugaucaucagagagcccuucaucgccugcggccccaaggagugcaagcacuucgcccugacccacuacgccgcccagcccggcggcuacuacaacggcaccagagaggacagaaacaagcugagacaccugaucagcgugaagcugggcaagauccccaccguggagaacagcaucuuccacauggccgccuggagcggcagcgccugccacgacggcagagaguggaccuacaucggcguggacggccccgacagcaacgcccugcugaagaucaaguacggcgaggccuacaccgacaccuaccacagcuacgccaagaacauccugagaacccaggagagcgccugcaacugcaucggcggcgacugcuaccugaugaucaccgacggccccgccagcggcaucagcgagugcagauuccugaagaucagagagggcagaaucaucaaggagaucuuccccaccggcagagugaagcacaccgaggagugcaccugcggcuucgccagcaacaagaccaucgagugcgccugcagagacaacagcuacaccgccaagagacccuucgugaagcugaacguggagaccgacaccgccgagaucagacugaugugcaccgagaccuaccuggacacccccagacccaacgacggcagcaucaccggccccugcgagagcaacggcgacaagggcagcggcggcaucaagggcggcuucgugcaccagagaauggccagcaagaucggcagaugguacagcagaaccaucagcaagaccaagagaaugggcaugggccuguacgugaaguacgacggcgaccccuggaccgacagcgaggcccuggcccugagcggcgugauggugagcauggaggagcccggcugguacagcuucggcuucgagaucaaggacaagaagugcgacgugcccugcaucggcaucgagauggugcacgacggcggcaagaccaccuggcacagcgccgccaccgccaucuacugccugaugggcagcggccagcugcugugggacaccgugaccggcguggacauggcccuguga

SEQ ID NO: 189712 - RNA, 1401 nt, Artificial Sequence; identical to SEQ ID NO: 189711
  derived and/or modified CDS sequence (opt4) from neuraminidase__InfluenzaB__AGX22154

SEQ ID NO: 189713 - RNA, 1401 nt, Artificial Sequence; identical to SEQ ID NO: 189711
  derived and/or modified CDS sequence (opt4) from neuraminidase__InfluenzaB__AGX22165

SEQ ID NO: 189714 - RNA, 1401 nt, Artificial Sequence; identical to SEQ ID NO: 189690
  derived and/or modified CDS sequence (opt4) from neuraminidase__InfluenzaB__AGX22176

SEQ ID NO: 189715 - RNA, 1401 nt, Artificial Sequence; identical to SEQ ID NO: 189711
  derived and/or modified CDS sequence (opt4) from neuraminidase__InfluenzaB__AGX22187

SEQ ID NO: 189716 - RNA, 1401 nt, Artificial Sequence; identical to SEQ ID NO: 189711
  derived and/or modified CDS sequence (opt4) from neuraminidase__InfluenzaB__AGX22198

SEQ ID NO: 189717 - RNA, 1401 nt, Artificial Sequence; identical to SEQ ID NO: 189711
  derived and/or modified CDS sequence (opt4) from neuraminidase__InfluenzaB__AGX22209

SEQ ID NO: 189718 - RNA, 1401 nt, Artificial Sequence; identical to SEQ ID NO: 189189
  derived and/or modified CDS sequence (opt4) from neuraminidase__InfluenzaB__AGX22220

SEQ ID NO: 189719 - RNA, 1401 nt, Artificial Sequence; identical to SEQ ID NO: 189191
  derived and/or modified CDS sequence (opt4) from neuraminidase__InfluenzaB__AGX22231

SEQ ID NO: 189720 - RNA, 1401 nt, Artificial Sequence; identical to SEQ ID NO: 189690
  derived and/or modified CDS sequence (opt4) from neuraminidase__InfluenzaB__AGX22242

SEQ ID NO: 189721 - RNA, 1401 nt, Artificial Sequence; identical to SEQ ID NO: 189189
  derived and/or modified CDS sequence (opt4) from neuraminidase__InfluenzaB__AGX22253

SEQ ID NO: 189722 - RNA, 1401 nt, Artificial Sequence; identical to SEQ ID NO: 188803
  derived and/or modified CDS sequence (opt4) from neuraminidase__InfluenzaB__AGX22264

SEQ ID NO: 189723 - RNA, 1401 nt, Artificial Sequence; identical to SEQ ID NO: 189189
  derived and/or modified CDS sequence (opt4) from neuraminidase__InfluenzaB__AGX22275

SEQ ID NO: 189724 - RNA, 1401 nt, Artificial Sequence; identical to SEQ ID NO: 188803
  derived and/or modified CDS sequence (opt4) from neuraminidase__InfluenzaB__AGX22286

SEQ ID NO: 189725 - RNA, 1401 nt, Artificial Sequence
  derived and/or modified CDS sequence (opt4) from neuraminidase__InfluenzaB__AGX22297
augcugcccagcaccauccagacccugacccuguuccugacccugggcggcgugcugcugagccuguacgugagcgccagccugagcuaccugcuguacagcgacauccugcugaaguucagccagaccgagaucaccgcccccaucaugccccuggacugcgccaacgccagcaacgugcaggccgugaacagaagcgccaccaagggcgugacccugcugcugcccgagcccgaguggaccuaccccagacugagcugccccggcagcaccuuccagaaggcccugcugaucagcccccacagauucggcgagaccaagggcaacagcgccccccugaucaucagagagcccuucaucgccugcggccccaaggagugcaagcacuucgcccugacccacuacgccgcccagcccggcggcuacuacaacggcaccagagaggacagaaacaagcugagacaccugaucagcgugaagcugggcaagauccccaccguggagaacagcaucuuccacauggccgccuggagcggcagcgccugccacgacggcagagaguggaccuacaucggcguggacggccccgacagcaacgcccugcugaagaucaaguacggcgaggccuacaccgacaccuaccacagcuacgccaagaacauccugagaacccaggagagcgccugcaacugcaucggcggcgacugcuaccugaugaucaccgacggccccgccagcggcaucagcgagugcagauuccugaagaucagagagggcagaaucaucaaggagaucuuccccaccggcagagugaagcacaccgaggagugcaccugcggcuucgccagcaacaagaccaucgagugcgccugcagagacaacagcuacaccgccaagagacccuucgugaagcugaacguggagaccgacaccgccgagaucagacugaugugcaccgagaccuaccuggacacccccagacccaacgacggcagcaucaccggccccugcgagagcaacggcgacaagggcagcggcggcaucaagggcggcuucgugcaccagagaauggccagcaagaucggcagaugguacagcagaaccaugagcaagaccaagagaaugggcaugggccuguacgugaaguacgacggcgaccccuggaccgacagcgaggcccuggcccugagcggcgugauggugagcauggaggagcccggcugguacagcuucggcuucgagaucaaggacaagaagugcgacgugcccugcaucggcaucgagauggugcacgacggcggcaagaccaccuggcacagcgccgccaccgccaucuacugccugaugggcagcggccagcugcugugggacaccgugaccggcguggacauggcccuguga

SEQ ID NO: 189726 - RNA, 1401 nt, Artificial Sequence; identical to SEQ ID NO: 188803
  derived and/or modified CDS sequence (opt4) from neuraminidase__InfluenzaB__AGX22308

SEQ ID NO: 189727 - RNA, 1401 nt, Artificial Sequence
  derived and/or modified CDS sequence (opt4) from neuraminidase__InfluenzaB__AGX22330
augcugcccagcaccauccagacccugacccuguuccugaccagcggcggcgugcugcugagccuguacgugagcgccagccugagcuaccugcuguacagcgacauccugcugaaguucagccagaccgagaucaccgcccccaucaugccccuggacugcgccaacgccagcaacgugcaggccgugaacagaagcgccaccaagggcgugacccugcugcugcccgagcccgaguggaccuaccccagacugagcugccccggcagcaccuuccagaaggcccugcugaucagcccccacagauucggcgagaccaagggcaacagcgccccccugaucaucagagagcccuucaucgccugcggccccaaggagugcaagcacuucgcccugacccacuacgccgcccagcccggcggcuacuacaacggcaccagagaggacagaaacaagcugagacaccugaucagcgugaagcugggcaagauccccaccguggagaacagcaucuuccacaugaccgccuggagcggcagcgccugccacgacggcaaggaguggaccuacaucggcguggacggccccgacagcaacgcccugcugaagaucaaguacggcgaggccuacaccgacaccuaccacagcuacgccaagaacauccugagaacccaggagagcgccugcaacugcaucggcggcgacugcuaccugaugaucaccgacggccccgccagcggcaucagcgagugcagauuccugaagaucagagagggcagaaucaucaaggagaucuuccccaccggcagagugaagcacaccgaggagugcaccugcggcuucgccagcaacaagaccaucgagugcgccugcagagacaacagcuacaccgccaagagacccuucgugaagcugaacguggagaccgacaccgccgagaucagacugaugugcaccgagaccuaccuggacacccccagacccaacgacggcagcaucaccggccccugcgagagcgacggcgacaagggcagcggcggcaucaagggcggcuucgugcaccagagaauggccaccaagaucggcagaugguacagcagaaccaugagcaagaccaagagaaugggcaugggccuguacgugaaguacgacggcgaccccuggaccgacagcgaggcccuggcccugagcggcgugauggugagcauggaggagcccggcugguacagcuucggcuucgagaucaaggacaagaagugcgacgugcccugcaucggcaucgagauggugcacgacggcggcaagaccaccuggcacagcgccgccaccgccaucuacugccugaugggcagcggccagcugcugugggacaccgugaccggcguggacauggcccuguga

SEQ ID NO: 189728 - RNA, 1401 nt, Artificial Sequence; identical to SEQ ID NO: 189191
  derived and/or modified CDS sequence (opt4) from neuraminidase__InfluenzaB__AGX22341

SEQ ID NO: 189729 - RNA, 1401 nt, Artificial Sequence; identical to SEQ ID NO: 189191
  derived and/or modified CDS sequence (opt4) from neuraminidase__InfluenzaB__AGX22352

SEQ ID NO: 189730 - RNA, 1401 nt, Artificial Sequence; identical to SEQ ID NO: 189191
  derived and/or modified CDS sequence (opt4) from neuraminidase__InfluenzaB__AGX22363

SEQ ID NO: 189731 - RNA, 1401 nt, Artificial Sequence; identical to SEQ ID NO: 189189
  derived and/or modified CDS sequence (opt4) from neuraminidase__InfluenzaB__AGX22374

SEQ ID NO: 189732 - RNA, 1401 nt, Artificial Sequence; identical to SEQ ID NO: 188803
  derived and/or modified CDS sequence (opt4) from neuraminidase__InfluenzaB__AGX22385

SEQ ID NO: 189733 - RNA, 1401 nt, Artificial Sequence; identical to SEQ ID NO: 188803
  derived and/or modified CDS sequence (opt4) from neuraminidase__InfluenzaB__AGX22396

SEQ ID NO: 189734 - RNA, 1401 nt, Artificial Sequence; identical to SEQ ID NO: 189690
  derived and/or modified CDS sequence (opt4) from neuraminidase__InfluenzaB__AGX22407

SEQ ID NO: 189735 - RNA, 1401 nt, Artificial Sequence
  derived and/or modified CDS sequence (opt4) from neuraminidase__InfluenzaB__AGX22418
augcugcccagcaccauccagacccugacccuguuccugaccagcggcggcgugcugcugagccuguacgugagcgccagccugagcuaccugcuguacagcgacauccugcugaaguucagccagaccgagaucaucgcccccaucaugccccuggacugcgccaacgccagcaacgugcaggccgugaaccacagcgccaccaagggcgugacccugcugcugcccgagcccgaguggaccuaccccagacugagcugccccggcagcaccuuccagaaggcccugcugaucagcccccacagauucggcgagaccaagggcaacagcgccccccugaucaucagagagcccuucaucgccugcggccccaaggagugcaagcacuucgcccugacccacuacgccgcccagcccggcagauacuacaacggcaccagagaggacagaaacaagcugagacaccugaucagcgugaagcugggcaagauccccaccguggagaacagcaucuuccacauggccgccuggagcggcagcgccugccacgacggcagagaguggaccuacaucggcguggacggccccgacagcaacgcccugcugaagaucaaguacggcgaggccuacaccgacaccuaccacagcuacgccaagaacauccugagaacccaggagagcgccugcaacugcaucggcggcgacugcuaccugaugaucaccgacggccccgccagcggcaucagcgagugcagauuccugaagaucagagagggcagaaucaucaaggagaucuuccccaccggcagagugaagcacaccgaggagugcaccugcggcuucgccagcaacaagaccaucgagugcgccugcagagacaacagcuacaccgccaagagacccuucgugaagcugaacguggagaccgacaccgccgagaucagacugaugugcaccgagaccuaccuggacacccccagacccaacgacggcagcaucaccggccccugcgagagcaacggcgacaagggcagcggcggcaucaagggcggcuucgugcaccagagaauggccagcaagaucggcagaugguacagcagaaccaugagcaagaccaagagaaugggcaugggccuguacgugaaguacgacggcgaccccuggaccgacagcgaggcccuggcccugagcggcgugauggugagcauggaggagcccggcugguacagcuucggcuucgagaucaaggacaagaagugcgacgugcccugcaucggcaucgagauggugcacgacggcggcaagaccaccuggcacagcgccgccaccgccaucuacugccugaugggcagcggccagcugcugugggacaccgugaccggcguggacauggcccuguga

SEQ ID NO: 189736 - RNA, 1401 nt, Artificial Sequence; identical to SEQ ID NO: 189189
  derived and/or modified CDS sequence (opt4) from neuraminidase__InfluenzaB__AGX22429

SEQ ID NO: 189737 - RNA, 1401 nt, Artificial Sequence; identical to SEQ ID NO: 189189
  derived and/or modified CDS sequence (opt4) from neuraminidase__InfluenzaB__AGX22440

SEQ ID NO: 189738 - RNA, 1401 nt, Artificial Sequence; identical to SEQ ID NO: 189189
  derived and/or modified CDS sequence (opt4) from neuraminidase__InfluenzaB__AGX22449

SEQ ID NO: 189739 - RNA, 1401 nt, Artificial Sequence
  derived and/or modified CDS sequence (opt4) from neuraminidase__InfluenzaB__AGX22460
augcugcccagcaccauccagacccugacccuguuccugaccagcggcggcgugcugcugagccuguacgugagcgccagccugagcuaccugcuguacagcgacauccugcugaaguucagccagaccgagaucaccgcccccaccaugccccuggacugcgccaacgccagcaacgugcaggccgugaacagaagcgccaccaagggcgugacccugcugcugcccgagcuggaguggaccuaccccagacugagcugccccggcagcaccuuccagaaggcccugcugaucagcccccacagauucggcgagaccaagggcaacagcgccccccugaucaucagagagcccuucaucgccugcggccccaaggagugcaagcacuucgcccugacccacuacgccgcccagcccggcggcuacuacaacggcaccagagaggacagaaacaagcugagacaccugaucagcgugaagcugggcaagauccccaccguggagaacagcaucuuccacauggccgccuggagcggcagcgccugccacgacggcagagaguggaccuacgugggcguggacggccccgacagcaacgcccugcugaagaucaaguacggcgaggccuacaccgacaccuaccacagcuacgccaagaacauccugagaacccaggagagcgccugcaacugcaucggcggcgacugcuaccugaugaucaccgacggccccgccagcggcaucagcgagugcagauuccugaagaucagagagggcagaaucaucaaggagaucuuccccaccggcagagugaagcacaccgaggagugcaccugcggcuucgccagcaacaagaccaucgagugcgccugcagagacaacagcuacaccgccaagagacccuucgugaagcuggacguggagaccgacaccgccgagaucagacugaugugcaccgagaccuaccuggacacccccagacccaacgacggcagcaucaccggccccugcgaggccaacggcgacaagggcagcggcggcaucaagggcggcuucgugcaccagagaauggccagcaagaucggcagaugguacagcagaaccaugagcaagaccaagagaaugggcaugggccuguacgugaaguacgacggcgaccccuggaccgacagcgaggcccuggcccugagcggcgugauggugagcauggaggagcccggcugguacagcuucggcuucgagaucaaggacaagaagugcgacgugcccugcaucggcaucgagauggugcacgacggcggcaagaccaccuggcacagcgccgccaccgccaucuacugccugaugggcagcggccagcugcugugggacaccgugaccggcguggacauggcccuguga

SEQ ID NO: 189740 - RNA, 1401 nt, Artificial Sequence; identical to SEQ ID NO: 188803
  derived and/or modified CDS sequence (opt4) from neuraminidase__InfluenzaB__AGX22471

SEQ ID NO: 189741 - RNA, 1401 nt, Artificial Sequence; identical to SEQ ID NO: 188803
  derived and/or modified CDS sequence (opt4) from neuraminidase__InfluenzaB__AGX22482

SEQ ID NO: 189742 - RNA, 1401 nt, Artificial Sequence; identical to SEQ ID NO: 188803
  derived and/or modified CDS sequence (opt4) from neuraminidase__InfluenzaB__AGX22493

SEQ ID NO: 189743 - RNA, 1401 nt, Artificial Sequence
  derived and/or modified CDS sequence (opt4) from neuraminidase__InfluenzaB__AGX22504
augcugcccagcaccauccagacccugacccuguuccugaccagcggcggcgugcugcugagccuguacgugagcgccagccugagcuaccugcuguacagcgacauccugcugaaguucagcaccaccgagaucaccgcccccaccaucccccuggacugcgccaacgccagcaacgugcaggccgugaacagaagcgccaccaagggcgugacccugcugcugcccgagcccgaguggaccuaccccagacugagcugccccggcagcaccuuccagaaggcccugcugaucagcccccacagauucggcgagaccaagggcaacagcgccccccugaucaucagagagcccuucaucgccugcggccccaaggagugcaagcacuucgcccugacccacuacgccgcccagcccggcggcuacuacaacggcaccagagaggacagaaacaagcugagacaccugaucagcgugaagcugggcaagauccccaccguggagaacagcaucuuccacauggccgccuggagcggcagcgccugccacgacggcaaggaguggaccuacaucggcguggacggccccgacagcaacgcccugcugaagaucaaguacggcgaggccuacaccgacaccuaccacagcuacgccaacaacauccugagaacccaggagagcgccugcaacugcaucggcggcaacugcuaccugaugaucaccgacggcagcgccagcggcaucagcgagugcagauuccugaagaucagagagggcagaaucaucaaggagaucuuccccaccggcagagugaagcacaccgaggagugcaccugcggcuucgccagcaacaagaccaucgagugcgccugcagagacaacagcuacaccgccaagagacccuucgugaagcugaacguggagaccgacaccgccgagaucagacugaugugcaccgagaccuaccuggacacccccagacccgacgacggcagcaucaccggccccugcgagagcaacggcaacaagggcagcggcggcaucaagggcggcuucgugcaccagagaauggccagcaagaucggcagaugguacagcagaaccaugagcaagaccaagagaaugggcaugggccuguacgugaaguacgacggcgaccccuggaccgacagcgacgcccuggcccugagcggcgugauggugagcauggaggagcccggcugguacagcuucggcuucgagaucaaggacaagaagugcgacgugcccugcaucggcaucgagauggugcacgacggcggcaaggagaccuggcacagcgccgccaccgccaucuacugccugaugggcagcggccagcugcugugggacaccgugaccggcguggacauggcccuguga

SEQ ID NO: 189744 - RNA, 1401 nt, Artificial Sequence; identical to SEQ ID NO: 189189
  derived and/or modified CDS sequence (opt4) from neuraminidase__InfluenzaB__AGX22515

SEQ ID NO: 189745 - RNA, 1401 nt, Artificial Sequence
  derived and/or modified CDS sequence (opt4) from neuraminidase__InfluenzaB__AGX22526
augcugcccagcaccauccagacccugacccuguuccugaccagcggcggcgugcugcugagccuguacgugagcgccagccugagcuaccugcuguacagcgacauccugcagaaguucagccagaccgagaucaccgcccccaucaugccccuggacugcgccaacgccagcaacgugcaggccgugaacagaagcgccaccaagggcgugacccugcugcugcccgagcccgaguggaccuaccccagacugagcugccccggcagcaccuuccagaaggcccugcugaucagcccccacagauucggcgagaccaagggcaacagcgccccccugaucaucagagagcccuucaucgccugcggccccaccgagugcaagcacuucgcccugacccacuacgccgcccagcccggcggcuacuacaacggcaccagagaggacagaaacaagcugagacaccugaucagcgugaagcugggcaagauccccaccguggagaacagcaucuuccacauggccgccuggagcggcagcgccugccacgacggcaaggaguggaccuacaucggcguggacggccccgacagcaacgcccugcugaagaucaaguacggcgaggccuacaccgacaccuaccacagcuacgccaagaacauccugagaacccaggagagcgccugcaacugcaucggcggcgacugcuaccugaugaucaccgacggccccgccagcggcaucagcgagugcagauuccugaagaucagagagggcagaaucaucaaggagaucuuccccaccggcagagugaagcacaccgaggagugcaccugcggcuucgccagcaacaagaccaucgagugcgccugcagagacaacagcuacaccgccaagagacccuucgugaagcugaacguggagaccgacaccgccgagaucagacugaugugcaccgagaccuaccuggacacccccagacccaacgacggcagcaucaccggccccugcgagagcgacggcgacaagggcagcggcggcaucaagggcggcuucgugcaccagagaauggccagcaagaucggcagaugguacagcagaaccaugagcaagaccaagagaaugggcaugggccuguacgugaaguacgacggcgaccccuggaccgacagcgaggcccuggcccugagcggcgugauggugagcauggaggagcccggcugguacagcuucggcuucgagaucaaggacaagaagugcgacgugcccugcaucggcaucgagauggugcacgacggcggcaagaccaccuggcacagcgccgccaccgccaucuacugccugaugggcagcggccagcugcugugggacaccgugaccggcguggacauggcccuguga

SEQ ID NO: 189746 - RNA, 1401 nt, Artificial Sequence; identical to SEQ ID NO: 188848
  derived and/or modified CDS sequence (opt4) from neuraminidase__InfluenzaB__AGX22548

SEQ ID NO: 189747 - RNA, 1401 nt, Artificial Sequence; identical to SEQ ID NO: 188687
  derived and/or modified CDS sequence (opt4) from neuraminidase__InfluenzaB__AGX22559

SEQ ID NO: 189748 - RNA, 1401 nt, Artificial Sequence; identical to SEQ ID NO: 188848
  derived and/or modified CDS sequence (opt4) from neuraminidase__InfluenzaB__AGX22570

SEQ ID NO: 189749 - RNA, 1401 nt, Artificial Sequence
  derived and/or modified CDS sequence (opt4) from neuraminidase__InfluenzaB__AGX22581
augcugcccagcaccauccagacccugacccuguuccugaccagcggcggcgugcugcugagccuguacgugagcgccagccugagcuaccugcuguacagcgacauccugcugaaguucagccagaccgagaucaccgcccccaucaugccccuggacugcgccaacgccagcaacgugcaggccgugaacagaagcgccaccaagggcgugacccugcugcugcccgagcccgaguggaccuaccccagacugagcugccccggcagcaccuuccagaaggcccugcugaucagcccccacagauucggcgagaccaagggcaacagcgccccccugaucaucagagagcccuucaucgccugcggccccaaggagugcaagcacuucgcccugacccacuacgccgcccagcccggcggcuacuacaacggcaccagagaggacagaaacaagcugagacaccugaucagcgugaagcugggcaagauccccaccguggagaacagcaucuuccacauggccgccuggagcggcagcgccugccacgacggcagagaguggaccuacaucggcguggacggccccgacaacaacgcccugcugaagaucaaguacggcgaggccuacaccgacaccuaccacagcuacgccaagaacauccugagaacccaggagagcgccugcaacugcaucggcggcgacugcuaccugaugaucaccgacggccccgccagcggcaucagcgagugcagauuccugaagaucagagagggcagaaucaucaaggagaucuuccccaccggcagagugaagcacaccgaggagugcaccugcggcuucgccagcaacaagaccaucgagugcgccugcagagacaacaacuacaccgccaagagacccuucgugaagcugaacguggagaccgacaccgccgagaucagacugaugugcaccgagaccuaccuggacacccccagacccaacgacggcagcaucaccggccccugcgagagcaacggcgacaagggcagcggcggcaucaagggcggcuucgugcaccagagaauggccagcaagaucggcagaugguacagcagaaccaugagcaagaccaagagaaugggcaugggccuguacgugaaguacgacggcgaccccuggaccgacagcgaggcccuggcccugagcggcgugauggugagcauggaggagcccggcugguacagcuucggcuucgagaucaaggacaagaagugcgacgugcccugcaucggcaucgagauggugcacgacggcggcaagaccaccuggcacagcgccgccaccgccaucuacugccugaugggcagcggccagcugcugugggacaccgugaccggcguggacauggcccuguga

SEQ ID NO: 189750 - RNA, 1401 nt, Artificial Sequence; identical to SEQ ID NO: 188848
  derived and/or modified CDS sequence (opt4) from neuraminidase__InfluenzaB__AGX22592

SEQ ID NO: 189751 - RNA, 1401 nt, Artificial Sequence; identical to SEQ ID NO: 188848
  derived and/or modified CDS sequence (opt4) from neuraminidase__InfluenzaB__AGX22603

SEQ ID NO: 189752 - RNA, 1401 nt, Artificial Sequence; identical to SEQ ID NO: 189088
  derived and/or modified CDS sequence (opt4) from neuraminidase__InfluenzaB__AGX22614

SEQ ID NO: 189753 - RNA, 1401 nt, Artificial Sequence; identical to SEQ ID NO: 188848
  derived and/or modified CDS sequence (opt4) from neuraminidase__InfluenzaB__AGX22625

SEQ ID NO: 189754 - RNA, 1401 nt, Artificial Sequence
  derived and/or modified CDS sequence (opt4) from neuraminidase__InfluenzaB__AGX22636
augcugcccagcaccauccagacccugacccuguuccugaccagcggcggcgugcugcugagccuguacgugagcgccagccugagcuaccugcuguacagcgacauccugcugaaguucagccagaccgagaucaccgcccccaucaugccccuggacugcgccaacgccagcaacgugcaggccgugaacagaagcgccgccaagggcguggcccugcugcugcccgagcccgaguggaccuaccccagacugagcugccccggcagcaccuuccagaaggcccugcugaucagcccccacagauucggcgagaccaagggcaacagcgccccccugaucaucagagagcccuucaucgccugcggccccaccgagugcaagcacuucgcccugacccacuacgccgcccagcccggcggcuacuacaacggcaccagagaggacagaaacaagcugagacaccugaucagcgugaagcugggcaagauccccaccguggagaacagcaucuuccacauggccgccuggagcggcagcgccugccacgacggcaaggaguggaccuacaucggcguggacggccccgacagcaacgcccugcugaagaucaaguacggcgaggccuacaccgacaccuaccacagcuacgccaagaacauccugagaacccaggagagcgccugcaacugcaucggcggcgacugcuaccugaugaucaccgacggccccgccagcggcaucagcgagugcagauuccugaagaucagagagggcagaaucaucaaggagaucuuccccaccggcagagugaagcacaccgaggagugcaccugcggcuucgccagcaacaagaccaucgagugcgccugcagagacaacagcuacaccgccaagagacccuucgugaagcugaacguggagaccgacaccgccgagaucagacugaugugcaccgagaccuaccuggacacccccagacccaacgacggcagcaucaccggccccugcgagagcgacggcgacaagggcagcggcggcaucaagggcggcuucgugcaccagagaauggccagcaagaucggcagaugguacagcagaaccaugagcaagaccaagagaaugggcaugggccuguacgugaaguacgacggcgaccccuggaccgacagcgaggcccuggcccugagcggcgugauggugagcauggaggagcccggcugguacagcuucggcuucgagaucaaggacaagaagugcgacgugcccugcaucggcaucgagauggugcacgacggcggcaagaccaccuggcacagcgccgccaccgccaucuacugccugaugggcagcggccagcugcugugggacaccgugaccggcguggacauggcccuguga

SEQ ID NO: 189755 - RNA, 1401 nt, Artificial Sequence; identical to SEQ ID NO: 188848
  derived and/or modified CDS sequence (opt4) from neuraminidase__InfluenzaB__AGX22647

SEQ ID NO: 189756 - RNA, 1401 nt, Artificial Sequence; identical to SEQ ID NO: 188687
  derived and/or modified CDS sequence (opt4) from neuraminidase__InfluenzaB__AGX22658

SEQ ID NO: 189757 - RNA, 1401 nt, Artificial Sequence; identical to SEQ ID NO: 188848
  derived and/or modified CDS sequence (opt4) from neuraminidase__InfluenzaB__AGX22669

SEQ ID NO: 189758 - RNA, 1401 nt, Artificial Sequence; identical to SEQ ID NO: 188848
  derived and/or modified CDS sequence (opt4) from neuraminidase__InfluenzaB__AGX22680

SEQ ID NO: 189759 - RNA, 1401 nt, Artificial Sequence; identical to SEQ ID NO: 188848
  derived and/or modified CDS sequence (opt4) from neuraminidase__InfluenzaB__AGX22691

SEQ ID NO: 189760 - RNA, 1401 nt, Artificial Sequence; identical to SEQ ID NO: 188848
  derived and/or modified CDS sequence (opt4) from neuraminidase__InfluenzaB__AGX22702

SEQ ID NO: 189761 - RNA, 1401 nt, Artificial Sequence; identical to SEQ ID NO: 188848
  derived and/or modified CDS sequence (opt4) from neuraminidase__InfluenzaB__AGX22713

SEQ ID NO: 189762 - RNA, 1401 nt, Artificial Sequence
  derived and/or modified CDS sequence (opt4) from neuraminidase__InfluenzaB__AGX22724
augcugcccagcaccauccagacccugacccuguuccugaccagcggcggcgugcugcugagccuguacgugagcgcccugcugagcuaccugcuguacagcgacauccugcugaaguucagccagaccgagaucaccgcccccaucaugccccuggacugcgccaacgccagcaacgugcaggccgugaacagaagcgccaccaagggcgugacccugcugcugcccgagcccgaguggaccuaccccagacugagcugccccggcagcaccuuccagaaggcccugcugaucagcccccacagauucggcgagaccaagggcaacagcgccccccugaucaucagagagcccuucaucgccugcggccccaaggagugcaagcacuucgcccugacccacuacgccgcccagcccggcggcuacuacaacggcaccagagaggacagaaacaagcugagacaccugaucagcgugaagcugggcaagauccccaccguggagaacagcaucuuccacauggccgccuggagcggcagcgccugccacgacggcagagaguggaccuacaucggcguggacggccccgacagcaacgcccugcugaagaucaaguacggcgaggccuacaccgacaccuaccacagcuacgccaagaacauccugagaacccaggagagcgccugcaacugcaucggcggcgacugcuaccugaugaucaccgacggccccgccagcggcaucagcgagugcagauuccugaagaucagagagggcagaaucaucaaggagaucuuccccaccggcagagugaagcacaccgaggagugcaccugcggcuucgccagcaacaagaccaucgagugcgccugcagagacaacagcuacaccgccaagagacccuucgugaagcugaacguggagaccgacaccgccgagaucagacugaugugcaccgagaccuaccuggacacccccagacccaacgacggcagcaucaccggccccugcgagagcaacggcgacaagggcagcggcggcaucaagggcggcuucgugcaccagagaauggccagcaagaucggcagaugguacagcagaaccaugagcaagaccaagagaaugggcaugggccuguacgugaaguacgacggcgaccccuggaccgacagcgaggcccuggcccugagcggcgugauggugagcauggaggagcccggcugguacagcuucggcuucgagaucaaggacaagaagugcgacgugcccugcaucggcaucgagauggugcacgacggcggcaagaccaccuggcacagcgccgccaccgccaucuacugccugaugggcagcggccagcugcugugggacaccgugaccggcguggacauggcccuguga

SEQ ID NO: 189763 - RNA, 1401 nt, Artificial Sequence; identical to SEQ ID NO: 188848
  derived and/or modified CDS sequence (opt4) from neuraminidase__InfluenzaB__AGX22735

SEQ ID NO: 189764 - RNA, 1401 nt, Artificial Sequence
  derived and/or modified CDS sequence (opt4) from neuraminidase__InfluenzaB__AGX22746
augcugcccagcaccauccagacccugacccuguuccugaccagcggcggcgugcugcugagccuguacgugagcgccagccugagcuaccugcuguacagcgacauccugcugaaguucagccagaccgagaucaccgcccccaucaugccccuggacugcgccaacgccagcaacgugcaggccgugaacagaagcgccaccaagggcgugacccugcugcugcccgagcccgaguggaccuaccccagacugagcugccccggcagcaccuuccagaaggcccugcugaucagcccccacagauucggcgagaccaagggcaacagcgccccccugaucaucagagagcccuucaucgccugcggccccaccgagugcaagcacuucgcccugacccacuacgccgcccagcccggcggcuacuacaacagaaccagagaggacagaaacaagcugagacaccugaucagcgugaagcugggcaagauccccaccguggagaacagcaucuuccacauggccgccuggagcggcagcgccugccacgacggcaaggaguggaccuacaucggcguggacggccccgacagcaacgcccugcugaagaucaaguacggcgaggccuacaccgacaccuaccacagcuacgccaagaacauccugagaacccaggagagcgccugcaacugcaucggcggcgacugcuaccugaugaucaccgacggccccgccagcggcaucagcgagugcagauuccugaagaucagagagggcagaaucaucaaggagaucuuccccaccggcagagugaagcacaccgaggagugcaccugcggcuucgccagcaacaagaccaucgagugcgccugcagagacaacagcuacaccgccaagagacccuucgugaagcugaacguggagaccgacaccgccgagaucagacugaugugcaccgagaccuaccuggacacccccagacccaacgacggcagcaucaccggccccugcgagagcgacggcgacaagggcagcggcggcaucaagggcggcuucgugcaccagagaauggccagcaagaucggcagaugguacagcagaaccaugagcaagaccaagagaaugggcaugggccuguacgugaaguacgacggcgaccccuggaccgacagcgaggcccuggcccugagcggcgugauggugagcauggaggagcccggcugguacagcuucggcuucgagaucaaggacaagaagugcgacgugcccugcaucggcaucgagauggugcacgacggcggcaagaccaccuggcacagcgccgccaccgccaucuacugccugaugggcagcggccagcugcugugggacaccgugaccggcguggacauggcccuguga

SEQ ID NO: 189765 - RNA, 1401 nt, Artificial Sequence; identical to SEQ ID NO: 188848
  derived and/or modified CDS sequence (opt4) from neuraminidase__InfluenzaB__AGX22757

SEQ ID NO: 189766 - RNA, 1401 nt, Artificial Sequence; identical to SEQ ID NO: 188848
  derived and/or modified CDS sequence (opt4) from neuraminidase__InfluenzaB__AGX22768

SEQ ID NO: 189767 - RNA, 1401 nt, Artificial Sequence; identical to SEQ ID NO: 189189
  derived and/or modified CDS sequence (opt4) from neuraminidase__InfluenzaB__AGX22779

SEQ ID NO: 189768 - RNA, 1401 nt, Artificial Sequence; identical to SEQ ID NO: 188848
  derived and/or modified CDS sequence (opt4) from neuraminidase__InfluenzaB__AGX22790

SEQ ID NO: 189769 - RNA, 1401 nt, Artificial Sequence
  derived and/or modified CDS sequence (opt4) from neuraminidase__InfluenzaB__AGX22801
augcugcccagcaccauccagacccugacccuguuccugaccagcggcggcgugcugcugagccuguacgugagcgccagccugagcuaccugcuguacagcgacauccugcugaaguucagccagaccgagaucaccgcccccaucaugccccuggacugcgccaacgccagcaacgugcaggccgugaacagaagcgccgccaagggcgugacccugcugcugcccgagcccgaguggaccuaccccagacugagcugccccggcagcaccuuccagaaggcccugcugaucagcccccacagauucggcgagaccaagggcaacagcgccccccugaucaucagagagcccuucaucgccugcggccccaccgagugcaagcacuucgcccugacccacuacgccgcccagcccggcggcuacuacaacggcaccagaggcgacagaaacaagcugagacaccugaucagcgugaagcugggcaagauccccaccguggagaacagcaucuuccacauggccgccuggagcggcagcgccugccacgacggcaaggaguggaccuacaucggcguggacggccccgacagcaacgcccugcugaagaucaaguacggcgaggccuacaccgacaccuaccacagcuacgccaagaacauccugagaacccaggagagcgccugcaacugcaucggcggcaacugcuaccugaugaucaccgacggcagcgccagcggcgugagcgagugcagauuccugaagaucagagagggcagaaucaucaaggagaucuuccccaccggcagagugaagcacaccgaggagugcaccugcggcuucgccagcaacaagaccaucgagugcgccugcagagacaacagcuacaccgccaagagacccuucgugaagcugaacguggagaccgacaccgccgagaucagacugaugugcaccgagaccuaccuggacacccccagacccaacgacggcagcaucaccggccccugcgagagcgacggcgacaagggcagcggcggcaucaagggcggcuucgugcaccagagaauggccagcaagaucggcagaugguacagcagaaccaugagcaagaccaagagaaugggcaugggccuguacgugaaguacgacggcgaccccuggaccgacagcgaggcccuggcccugagcggcgugauggugagcauggaggagcccggcugguacagcuucggcuucgagaucaaggacaagaagugcgacgugcccugcaucggcaucgagauggugcacgacggcggcaagaccaccuggcacagcgccgccaccgccaucuacugccugaugggcagcggccagcugcugugggacaccgugaccggcguggacauggcccuguga

SEQ ID NO: 189770 - RNA, 1401 nt, Artificial Sequence; identical to SEQ ID NO: 188848
  derived and/or modified CDS sequence (opt4) from neuraminidase__InfluenzaB__AGX22812

SEQ ID NO: 189771 - RNA, 1401 nt, Artificial Sequence; identical to SEQ ID NO: 188848
  derived and/or modified CDS sequence (opt4) from neuraminidase__InfluenzaB__AGX22823

SEQ ID NO: 189772 - RNA, 1401 nt, Artificial Sequence; identical to SEQ ID NO: 188848
  derived and/or modified CDS sequence (opt4) from neuraminidase__InfluenzaB__AGX22834

SEQ ID NO: 189773 - RNA, 1401 nt, Artificial Sequence; identical to SEQ ID NO: 188848
  derived and/or modified CDS sequence (opt4) from neuraminidase__InfluenzaB__AGX22845

SEQ ID NO: 189774 - RNA, 1401 nt, Artificial Sequence; identical to SEQ ID NO: 188848
  derived and/or modified CDS sequence (opt4) from neuraminidase__InfluenzaB__AGX22856

SEQ ID NO: 189775 - RNA, 1401 nt, Artificial Sequence; identical to SEQ ID NO: 188848
  derived and/or modified CDS sequence (opt4) from neuraminidase__InfluenzaB__AGX22867

SEQ ID NO: 189776 - RNA, 1401 nt, Artificial Sequence; identical to SEQ ID NO: 188848
  derived and/or modified CDS sequence (opt4) from neuraminidase__InfluenzaB__AGX22878

SEQ ID NO: 189777 - RNA, 1401 nt, Artificial Sequence
  derived and/or modified CDS sequence (opt4) from neuraminidase__InfluenzaB__AGX22889
augcugcccagcaccauccagacccugacccuguuccugaccagcggcggcgugcugcugagccuguacgugagcgccagccugagcuaccugcuguacagcgacauccugcugaaguucagccagaccgagaucaccgcccccaucaugccccuggacugcgccaacgccagcaacgugcaggccgugaacagaagcgccgccaagggcgugacccugcugcugcccgagcccgaguggaccuaccccagacugagcugccccggcagcaccuuccagaaggcccugcugaucagcccccacagauucggcgagaccaagggcaacagcgccccccugaucaucagagagcccuucaucgccugcggccccaccgagugcaagcacuucgcccugacccacuacgccgcccagcccggcggcuacuacaacggcaccagagaggacagaaacaagcugagacaccugaucagcgugaagcugggcaagauccccaccguggagaacagcaucuuccacauggccgccuggagcggcagcgccugccacgacggcaaggaguggaccuacaucggcguggacggccccgacagcaacgcccugcugaagaucaaguacggcgaggccuacaccgacaccuaccacagcuacgccaagaacauccugagaacccaggagagcgccugcaacugcaucggcggcgacugcuaccugaugaucaccgacggccccgccagcggcaucagcgagugcagauuccugaagaucagagagggcagaaucaucaaggagaucuuccccaccggcagagugaagcacaccgaggagugcaccugcggcuucgccagcaacaagaccaucgagugcgccugcagagacaacagccacaccgccaagagacccuucgugaagcugaacguggagaccgacaccgccgagaucagacugaugugcaccgagaccuaccuggacacccccagacccaacgacggcagcaucaccggccccugcgagagcgacggcgacaagggcagcggcggcaucaagggcggcuucgugcaccagagaauggccagcaagaucggcagaugguacagcagaaccaugagcaagaccaagagaaugggcaugggccuguacgugaaguacgacggcgaccccuggaccgacagcgaggcccuggcccugagcggcgugauggugagcauggaggagcccggcugguacagcuucggcuucgagaucaaggacaagaagugcgacgugcccugcaucggcaucgagauggugcacgacggcggcaagaccaccuggcacagcgccgccaccgccaucuacugccugaugggcagcggccagcugcugugggacaccgugaccggcguggacauggcccuguga

SEQ ID NO: 189778 - RNA, 1401 nt, Artificial Sequence; identical to SEQ ID NO: 188687
  derived and/or modified CDS sequence (opt4) from neuraminidase__InfluenzaB__AGX22900

SEQ ID NO: 189779 - RNA, 1401 nt, Artificial Sequence
  derived and/or modified CDS sequence (opt4) from neuraminidase__InfluenzaB__AGX22911
augcugcccagcaccauccagacccugacccuguuccugaccagcggcggcgugcugcugagccuguacgugagcgccagccugagcuaccugcuguacagcgacauccugcugaaguucagccagaccgagaucaccgcccccaucaugccccuggacugcgccaacgccagcaacgugcaggccgugaacagaagcgccgccaagggcgugacccugcugcugcccgagcccgaguggaccuaccccagacugagcugccccggcagcaccuuccagaaggcccugcugaucagcccccacagauucggcgagaccaagggcaacagcgccccccugaucaucagagagcccuucaucgccugcggccccaccgagugcaagcacuucgcccugacccacuacgccgcccagcccggcggcuacuacaacggcaccagagaggacagaaacaagcugagacaccugaucagcgugaagcugggcaagauccccaccguggagaacagcaucuuccacauggccgccuggagcggcagcgccugccacgacggcaaggaguggaccuacaucggcguggacggccccgacagcaacgcccugcugaagaucaaguacggcgaggccuacaccgacaccuaccacagcuacgccaagaacauccugagaacccaggagagcgccugcaacugcaucggcggcgacugcuaccugaugaucaccgacggccccgccagcggcaccagcgagugcagauuccugaagaucagagagggcagaaucaucaaggagaucuuccccaccggcagagugaagcacaccgaggagugcaccugcggcuucgccagcaacaagaccaucgagugcgccugcagagacaacagcuacaccgccaagagacccuucgugaagcugaacguggagaccgacaccgccgagaucagacugaugugcaccgagaccuaccuggacacccccagacccaacgacggcagcaucaccggccccugcgagagcgacggcgacaagggcagcggcggcaucaagggcggcuucgugcaccagagaauggccagcaagaucggcagaugguacagcagaaccaugagcaagaccaagagaaugggcaugggccuguacgugaaguacgacggcgaccccuggaccgacagcgaggcccuggcccugagcggcgugauggugagcauggaggagcccggcugguacagcuucggcuucgagaucaaggacaagaagugcgacgugcccugcaucggcaucgagauggugcacgacggcggcaagaccaccuggcacagcgccgccaccgccaucuacugccugaugggcagcggccagcugcugugggacaccgugaccggcguggacauggcccuguga

SEQ ID NO: 189780 - RNA, 1401 nt, Artificial Sequence
  derived and/or modified CDS sequence (opt4) from neuraminidase__InfluenzaB__AGX22922
augcugcccagcaccauccagacccugacccuguuccugaccagcggcggcgugcugcugagccuguacgugagcgccagccugagcuaccugcuguacagcgacauccugcugaaguucagccagaccgagaucaccgcccccaucaugccccuggacugcgccaacgccagcaacgugcaggccgugaacagaagcgccaccaagggcgugacccugcugcugcccgagcccgaguggaccuaccccagacugagcugccccggcagcaccuuccagaaggcccugcugaucagcccccacagauucggcgagaccaagggcaacagcgccccccugaucaucagagagcccuucaucgccugcggccccaccgagugcaagcacuucgcccugacccacuacgccgcccagcccggcggcuacuacaacggcaccagagaggacagaaacaagcugagacaccugaucagcgugaagcugggcaagauccccaccguggagaacagcaucuuccacauggccgccuggagcggcagcgccugccacgacggcaaggaguggaccuacaucggcguggacggccccgacagcaacgcccugcugaagaucaaguacggcgaggccuacaccgacaccuaccacagcuacgccaagaacauccugagaacccaggagagcgccugcaacugcaucggcggcgacugcuaccugaugaucaccgacggccccgccagcggcaucagcgagugcagauuccugaagaucagagagggcagaaucaucaaggagaucuuccccaccggcagagugaagcacaccgaggagugcaccugcggcuucgccagcaacaagaccaucgagugcgccugcagagacaacagcuacaccgccaagagacccuucgugaagcugaacguggagaccgacaccgccgagaucagacugaugugcaccgagaccuaccuggacacccccagacccaacgacggcagcaucaccggccccugcgagagcgacggcgacaagggcagcggcggcaucaagggcggcuucgugcaccagagaauggccagcaagaucggcagaugguacagcagaaccaugagcaagaccaagagaaugggcaugggccuguacgugaaguacgacggcgaccccuggaccgacaacgaggcccuggcccugagcggcgugauggugagcauggaggagcccggcugguacagcuucggcuucgagaucaaggacaagaagugcgacgugcccugcaucggcaucgagauggugcacgacggcggcaagaccaccuggcacagcgccgccaccgccaucuacugccugaugggcagcggccagcugcugugggacaccgugaccggcguggacauggcccuguga

SEQ ID NO: 189781 - RNA, 1401 nt, Artificial Sequence; identical to SEQ ID NO: 188848
  derived and/or modified CDS sequence (opt4) from neuraminidase__InfluenzaB__AGX22933

SEQ ID NO: 189782 - RNA, 1401 nt, Artificial Sequence; identical to SEQ ID NO: 188848
  derived and/or modified CDS sequence (opt4) from neuraminidase__InfluenzaB__AGX22944

SEQ ID NO: 189783 - RNA, 1401 nt, Artificial Sequence; identical to SEQ ID NO: 188848
  derived and/or modified CDS sequence (opt4) from neuraminidase__InfluenzaB__AGX22955

SEQ ID NO: 189784 - RNA, 1401 nt, Artificial Sequence; identical to SEQ ID NO: 188848
  derived and/or modified CDS sequence (opt4) from neuraminidase__InfluenzaB__AGX22966

SEQ ID NO: 189785 - RNA, 1401 nt, Artificial Sequence; identical to SEQ ID NO: 188687
  derived and/or modified CDS sequence (opt4) from neuraminidase__InfluenzaB__AGX22977

SEQ ID NO: 189786 - RNA, 1401 nt, Artificial Sequence; identical to SEQ ID NO: 189103
  derived and/or modified CDS sequence (opt4) from neuraminidase__InfluenzaB__AGX22988

SEQ ID NO: 189787 - RNA, 1401 nt, Artificial Sequence
  derived and/or modified CDS sequence (opt4) from neuraminidase__InfluenzaB__AGX22999
augcugcccagcaccauccagacccugacccuguuccugaccagcggcggcgugcugcugagccuguacgugagcgccagccugagcuaccugcuguacagcgacauccugcugaaguucagccagaccgagaucaccgcccccaucaugccccuggacugcgccaacgccagcaacgugcaggccgugaacagaagcgccgccaagggcgugacccugcugcugcccgagcccgagugggccuaccccagacugagcugccccggcagcaccuuccagaaggcccugcugaucagcccccacagauucggcgagaccaagggcaacagcgccccccugaucaucagagagcccuucaucgccugcggccccaccgagugcaagcacuucgcccugacccacuacgccgcccagcccggcggcuacuacaacggcaccagagaggacagaaacaagcugagacaccugaucagcgugaagcugggcaagauccccaccguggagaacagcaucuuccacauggccgccuggagcggcagcgccugccacgacggcaaggaguggaccuacaucggcguggacggccccgacagcaacgcccugcugaagaucaaguacggcgaggccuacaccgacaccuaccacagcuacgccaagaacauccugagaacccaggagagcgccugcaacugcaucggcggcgacugcuaccugaugaucaccgacggccccgccagcggcaucagcgagugcagauuccugaagaucagagagggcagaaucaucaaggagaucuuccccaccggcagagugaagcacaccgaggagugcaccugcggcuucgccagcaacaagaccaucgagugcgccugcagagacaacagcuacaccgccaagagacccuucgugaagcugaacguggagaccgacaccgccgagaucagacugaugugcaccgagaccuaccuggacacccccagacccaacgacggcagcaucaccggccccugcgagagcgacggcgacaagggcagcggcggcaucaagggcggcuucgugcaccagagaauggccagcaagaucggcagaugguacagcagaaccaugagcaagaccaagagaaugggcaugggccuguacgugaaguacgacggcgaccccuggaccgacagcgaggcccuggcccugagcggcgugauggugagcauggaggagcccggcugguacagcuucggcuucgagaucaaggacaagaagugcgacgugcccugcaucggcaucgagauggugcacgacggcggcaagaccaccuggcacagcgccgccaccgccaucuacugccugaugggcagcggccagcugcugugggacaccgugaccggcguggacauggcccuguga

SEQ ID NO: 189788 - RNA, 1401 nt, Artificial Sequence; identical to SEQ ID NO: 189787
  derived and/or modified CDS sequence (opt4) from neuraminidase__InfluenzaB__AGX23010

SEQ ID NO: 189789 - RNA, 1401 nt, Artificial Sequence; identical to SEQ ID NO: 188687
  derived and/or modified CDS sequence (opt4) from neuraminidase__InfluenzaB__AGX23021

SEQ ID NO: 189790 - RNA, 1401 nt, Artificial Sequence; identical to SEQ ID NO: 188848
  derived and/or modified CDS sequence (opt4) from neuraminidase__InfluenzaB__AGX23032

SEQ ID NO: 189791 - RNA, 1401 nt, Artificial Sequence
  derived and/or modified CDS sequence (opt4) from neuraminidase__InfluenzaB__AGX23043
augcugcccagcaccauccagacccugacccuguuccugaccagcggcggcgugcugcugagccuguacgugagcgccagccugagcuaccugcuguacagcgacauccugcugaaguucagccagaccgagaucaccgcccccaucaugccccuggacugcgccaacgccagcaacgugcaggccgugaacagaagcgccgccaagggcgugacccugcugcugcccgagcccgaguggaccuaccccagacugagcugccccggcagcaccuuccagaaggcccugcugaucagcccccacagauucggcgagaccaagggcaacagcgccccccugaucaucagagagcccuucaucgccugcggccccaccgagugcaagcacuucgcccugacccacuacgccgcccagcccggcggcuacuacaacggcaccagagaggacagaaacaagcugagacaccugaucagcgugaagcugggcaagauccccaccguggagaacagcaucuuccacauggccgccuggagcggcagcgccugccacgacggcaaggaguggaccuacaucggcguggacggccccgacagcaacgcccugcugaagaucaaguacggcgaggccuacaccgacaccuaccacagcuacgccaagaacauccugagaacccaggagagcgccugcaacugcaucggcggcgacugcuaccugaugaucaccgacggccccgcccugggcaucagcgagugcagauuccugaagaucagagagggcagaaucaucaaggagaucuuccccaccggcagagugaagcacaccgaggagugcaccugcggcuucgccagcaacaagaccaucgagugcgccugcagagacaacagcuacaccgccaagagacccuucgugaagcugaacguggagaccgacaccgccgagaucagacugaugugcaccgagaccuaccuggacacccccagacccaacgacggcagcaucaccggccccugcgagagcgacggcgacaagggcagcggcggcaucaagggcggcuucgugcaccagagaauggccagcaagaucggcagaugguacagcagaaccaugagcaagaccaagagaaugggcaugggccuguacgugaaguacgacggcgaccccuggaccgacagcgaggcccuggcccugagcggcgugauggugagcauggaggagcccggcugguacagcuucggcuucgagaucaaggacaagaagugcgacgugcccugcaucggcaucgagauggugcacgacggcggcaagaccaccuggcacagcgccgccaccgccaucuacugccugaugggcagcggccagcugcugugggacaccgugaccggcguggacauggcccuguga

SEQ ID NO: 189792 - RNA, 1401 nt, Artificial Sequence; identical to SEQ ID NO: 188687
  derived and/or modified CDS sequence (opt4) from neuraminidase__InfluenzaB__AGX23054

SEQ ID NO: 189793 - RNA, 1401 nt, Artificial Sequence; identical to SEQ ID NO: 188687
  derived and/or modified CDS sequence (opt4) from neuraminidase__InfluenzaB__AGX23065

SEQ ID NO: 189794 - RNA, 1401 nt, Artificial Sequence; identical to SEQ ID NO: 188687
  derived and/or modified CDS sequence (opt4) from neuraminidase__InfluenzaB__AGX23076

SEQ ID NO: 189795 - RNA, 1401 nt, Artificial Sequence; identical to SEQ ID NO: 188848
  derived and/or modified CDS sequence (opt4) from neuraminidase__InfluenzaB__AGX23087

SEQ ID NO: 189796 - RNA, 1401 nt, Artificial Sequence; identical to SEQ ID NO: 188687
  derived and/or modified CDS sequence (opt4) from neuraminidase__InfluenzaB__AGX23098

SEQ ID NO: 189797 - RNA, 1401 nt, Artificial Sequence
  derived and/or modified CDS sequence (opt4) from neuraminidase__InfluenzaB__AGX23109
augcugcccagcaccauccagacccugacccuguuccugaccagcggcggcgugcugcugagccuguacgugagcgccagccugagcuaccugcuguacagcgacauccugcugaaguucagccagaccgagaucaccgcccccaucaugccccuggacugcgccaacgccagcaacgugcaggccgugaacagaagcgccaccaagggcgugacccugcugcugcccgagcccgaguggaccuaccccagacugagcugccccggcagcaccuuccagaaggcccugcugaucagcccccacagauucggcgagaccaagggcaacagcgccccccugaucaucagagagcccuucaucgccugcggccccaccgagugcaagcacuucgcccugacccacuacgccgcccagcccggcggcuacuacaacggcaccagagaggacagaaacaagcugagacaccugaucagcgugaagcugggcaagauccccaccguggagaacagcaucuuccacauggccgccuggagcggcagcgccugccacgacggcaaggaguggaccuacaucggcguggacggccccgacagcaacgcccugcugaagaucaaguacggcgaggccuacaccgacaccuaccacagcuacgccaagaacauccugagaacccaggagagcgccugcaacugcaucagaggcgacugcuaccugaugaucaccgacggccccgccagcggcaucagcgagugcagauuccugaagaucagagagggcagaaucaucaaggagaucuuccccaccggcagagugaagcacaccgaggagugcaccugcggcuucgccagcaacaagaccaucgagugcgccugcagagacaacagcuacaccgccaagagacccuucgugaagcugaacguggagaccgacaccgccgagaucagacugaugugcaccgagaccuaccuggacacccccagacccaacgacggcagcaucaccggccccugcgagagcgacggcgacaagggcagcggcggcaucaagggcggcuucgugcaccagagaauggccagcaagaucggcagaugguacagcagaaccaugagcaagaccaagagaaugggcaugggccuguacgugaaguacgacggcgaccccuggaccgacagcgaggcccuggcccugagcggcgugauggugagcauggaggagcccggcugguacagcuucggcuucgagaucaaggacaagaagugcgacgugcccugcaucggcaucgagauggugcacgacggcggcaagaccaccuggcacagcgccgccaccgccaucuacugccugaugggcagcggccagcugcugugggacaccgugaccggcguggacauggcccuguga

SEQ ID NO: 189798 - RNA, 1401 nt, Artificial Sequence; identical to SEQ ID NO: 188848
  derived and/or modified CDS sequence (opt4) from neuraminidase__InfluenzaB__AGX23120

SEQ ID NO: 189799 - RNA, 1401 nt, Artificial Sequence
  derived and/or modified CDS sequence (opt4) from neuraminidase__InfluenzaB__AGX23131
augcugcccagcaccauccagacccugacccuguuccugaccagcggcggcgugcugcugagccuguacgugagcgccagccugagcuaccugcuguacagcgacauccugcugaaguucagccagaccgagaucaucgcccccaucaugccccuggacugcgccaacgccagcaacgugcaggccgugaacagaagcgccgccaagggcgugacccugcugcugcccgagcccgaguggaccuaccccagacugagcugccccggcagcaccuuccagaaggcccugcugaucagcccccacagauucggcgagaccaagggcaacagcgccccccugaucaucagagagcccuucaucgccugcggccccaccgagugcaagcacuucgcccugacccacuacgccgcccagcccggcggcuacuacaacggcaccagagaggacagaaacaagcugagacaccugaucagcgugaagcugggcaagauccccaccguggagaacagcaucuuccacauggccgccuggagcggcagcgccugccacgacggcaaggaguggaccuacaucggcguggacggccccgacagcaacgcccugcugaagaucaaguacggcgaggccuacaccgacaccuaccacagcuacgccaagaacauccugagaacccaggagagcgccugcaacugcaucggcggcgacugcuaccugaugaucaccgacggccccgccagcggcaucagcgagugcagauuccugaagaucagagagggcagaaucaucaaggagaucuuccccaccggcagagugaagcacaccgaggagugcaccugcggcuucgccagcaacaagaccaucgagugcgccugcagagacaacagcuacaccgccaagagacccuucgugaagcugaacguggagaccgacaccgccgagaucagacugaugugcaccgagaccuaccuggacacccccagacccaacgacggcagcaucaccggccccugcgagagcgacggcgacaagggcagcggcggcaucaagggcggcuucgugcaccagagaauggccagcaagaucggcagaugguacagcagaaccaugagcaagaccaagagaaugggcaugggccuguacgugaaguacgacggcgaccccuggaccgacagcgaggcccuggcccugagcggcgugauggugagcauggaggagcccggcugguacagcuucggcuucgagaucaaggacaagaagugcgacgugcccugcaucggcaucgagauggugcacgacggcggcaagaccaccuggcacagcgccgccaccgccaucuacugccugaugggcagcggccagcugcugugggacaccgugaccggcguggacauggcccuguga

SEQ ID NO: 189800 - RNA, 1401 nt, Artificial Sequence; identical to SEQ ID NO: 188848
  derived and/or modified CDS sequence (opt4) from neuraminidase__InfluenzaB__AGX23142

SEQ ID NO: 189801 - RNA, 1401 nt, Artificial Sequence; identical to SEQ ID NO: 188687
  derived and/or modified CDS sequence (opt4) from neuraminidase__InfluenzaB__AGX23153

SEQ ID NO: 189802 - RNA, 1401 nt, Artificial Sequence; identical to SEQ ID NO: 188687
  derived and/or modified CDS sequence (opt4) from neuraminidase__InfluenzaB__AGX23164

SEQ ID NO: 189803 - RNA, 1401 nt, Artificial Sequence; identical to SEQ ID NO: 188687
  derived and/or modified CDS sequence (opt4) from neuraminidase__InfluenzaB__AGX23175

SEQ ID NO: 189804 - RNA, 1401 nt, Artificial Sequence
  derived and/or modified CDS sequence (opt4) from neuraminidase__InfluenzaB__AGX23186
augcugcccagcaccacccagacccugacccuguuccugaccagcggcggcgugcugcugagccuguacgugagcgccagccugagcuaccugcuguacagcgacauccugcugaaguucagccagaccgagaucaccgcccccaucaugccccuggacugcgccaacgccagcaacgugcaggccgugaacagaagcgccgccaagggcgugacccugcugcugcccgagcccgaguggaccuaccccagacugagcugccccggcagcaccuuccagaaggcccugcugaucagcccccacagauucggcgagaccaagggcaacagcgccccccugaucaucagagagcccuucaucgccugcggccccaccgagugcaagcacuucgcccugacccacuacgccgcccagcccggcggcuacuacaacggcaccagagaggacagaaacaagcugagacaccugaucagcgugaagcugggcaagauccccaccguggagaacagcaucuuccacauggccgccuggagcggcagcgccugccacgacggcaaggaguggaccuacaucggcguggacggccccgacagcaacgcccugcugaagaucaaguacggcgaggccuacaccgacaccuaccacagcuacgccaagaacauccugagaacccaggagagcgccugcaacugcaucggcggcgacugcuaccugaugaucaccgacggccccgccagcggcaucagcgagugcagauuccugaagaucagagagggcagaaucaucaaggagaucuuccccaccggcagagugaagcacaccgaggagugcaccugcggcuucgccagcaacaagaccaucgagugcgccugcagagacaacagcuacaccgccaagagacccuucgugaagcugaacguggagaccgacaccgccgagaucagacugaugugcaccgagaccuaccuggacacccccagacccaacgacggcagcaucaccggccccugcgagagcgacggcgacaagggcagcggcggcaucaagggcggcuucgugcaccagagaauggccagcaagaucggcagaugguacagcagaaccaugagcaagaccaagagaaugggcaugggccuguacgugaaguacgacggcgaccccuggaccgacagcgaggcccuggcccugagcggcgugauggugagcauggaggagcccggcugguacagcuucggcuucgagaucaaggacaagaagugcgacgugcccugcaucggcaucgagauggugcacgacggcggcaagaccaccuggcacagcgccgccaccgccaucuacugccugaugggcagcggccagcugcugugggacaccgugaccggcguggacauggcccuguga

SEQ ID NO: 189805 - RNA, 1401 nt, Artificial Sequence; identical to SEQ ID NO: 188848
  derived and/or modified CDS sequence (opt4) from neuraminidase__InfluenzaB__AGX23197

SEQ ID NO: 189806 - RNA, 1401 nt, Artificial Sequence; identical to SEQ ID NO: 188848
  derived and/or modified CDS sequence (opt4) from neuraminidase__InfluenzaB__AGX23208

SEQ ID NO: 189807 - RNA, 1401 nt, Artificial Sequence; identical to SEQ ID NO: 188848
  derived and/or modified CDS sequence (opt4) from neuraminidase__InfluenzaB__AGX23219

SEQ ID NO: 189808 - RNA, 1401 nt, Artificial Sequence
  derived and/or modified CDS sequence (opt4) from neuraminidase__InfluenzaB__AGX23230
augcugcccagcaccauccagacccugacccuguuccugaccagcggcggcgugcugcugagccuguacgugagcgccagccugagcuaccugcuguacagcgacauccugcugaaguucagccagaccgagaucaccgcccccaucaugccccuggacugcgccaacgccagcaacgugcaggccgugaacagaagcgccgccaagggcgugacccugcugcugcccgagcccgaguggaccuaccccagacugagcugccccggcagcaccuuccagaaggcccugcugaucagcccccacagauucggcgagaccaagggcaacagcgccccccugaucaucagagagcccuucaucgccugcggccccaccgagugcaagcacuucgcccugacccacuacgccgcccagcccggcgaguacuacaacggcaccagagaggacagaaacaagcugagacaccugaucagcgugaagcugggcaagauccccaccguggagaacagcaucuuccacauggccgccuggagcggcagcgccugccacgacggcaaggaguggaccuacaucggcguggacggccccgacagcaacgcccugcugaagaucaaguacggcgaggccuacaccgacaccuaccacagcuacgccaagaacauccugagaacccaggagagcgccugcaacugcaucggcggcgacugcuaccugaugaucaccgacggccccagcagcggcaucagcgagugcagauuccugaagaucagagagggcagaaucaucaaggagaucuuccccaccggcagagugaagcacaccgaggagugcaccugcggcuucgccagcaacaagaccaucgagugcgccugcagagacaacagcuacaccgccaagagacccuucgugaagcugaacguggagaccgacaccgccgagaucagacugaugugcaccgagaccuaccuggacacccccagacccaacgacggcagcaucaccggccccugcgagagcgacggcgacaagggcagcggcggcaucaagggcggcuucgugcaccagagaauggccagcaagaucggcagaugguacagcagaaccaugagcaagaccaagagaaugggcaugggccuguacgugaaguacgacggcgaccccuggaccgacagcgaggcccuggcccugagcggcgugauggugagcauggaggagcccggcugguacagcuucggcuucgagaucaaggacaagaagugcgacgugcccugcaucggcaucgagauggugcacgacggcggcaagaccaccuggcacagcgccgccaccgccaucuacugccugaugggcagcggccagcugcugugggacaccgugaccggcguggacauggcccuguga

SEQ ID NO: 189809 - RNA, 1401 nt, Artificial Sequence; identical to SEQ ID NO: 188687
  derived and/or modified CDS sequence (opt4) from neuraminidase__InfluenzaB__AGX23241

SEQ ID NO: 189810 - RNA, 1401 nt, Artificial Sequence; identical to SEQ ID NO: 188848
  derived and/or modified CDS sequence (opt4) from neuraminidase__InfluenzaB__AGX23252

SEQ ID NO: 189811 - RNA, 1401 nt, Artificial Sequence; identical to SEQ ID NO: 188848
  derived and/or modified CDS sequence (opt4) from neuraminidase__InfluenzaB__AGX23263

SEQ ID NO: 189812 - RNA, 1401 nt, Artificial Sequence; identical to SEQ ID NO: 188848
  derived and/or modified CDS sequence (opt4) from neuraminidase__InfluenzaB__AGX23274

SEQ ID NO: 189813 - RNA, 1401 nt, Artificial Sequence; identical to SEQ ID NO: 188687
  derived and/or modified CDS sequence (opt4) from neuraminidase__InfluenzaB__AGX23285

SEQ ID NO: 189814 - RNA, 1401 nt, Artificial Sequence; identical to SEQ ID NO: 188848
  derived and/or modified CDS sequence (opt4) from neuraminidase__InfluenzaB__AGX23296

SEQ ID NO: 189815 - RNA, 1401 nt, Artificial Sequence
  derived and/or modified CDS sequence (opt4) from neuraminidase__InfluenzaB__AGX23307
augcugcccagcaccauccagacccugacccuguuccugaccagcggcggcgugcugcugagccuguacgugagcgccagccugagcuaccugcuguacagcgacauccugcugaaguucagccagaccgagaucaccgcccccaucaugccccuggacugcgccaacgccagcaacgugcaggccgugaacagaagcgccgccaagggcgugacccugcugcugcccgagcccgaguggaccuaccccagacugagcugccccggcagcaccuuccagaaggcccugcugaucagcccccacagauucggcgagaccaagggcaacagcgccccccugaucaucagagagcccuucaucgccugcggccccaccgagugcaagcacuucgcccugacccacuacgccgcccagcccggcggcuacuacaacggcaccagagaggacagaaacaagcugagacaccugaucagcgugaagcugggcaagauccccaccguggagaacagcaucuuccacauggccgccuggagcggcagcgccugccacgacggcaaggaguggaccuacgugggcguggacggccccgacagcaacgcccugcugaagaucaaguacggcgaggccuacaccgacaccuaccacagcuacgccaagaacauccugagaacccaggagagcgccugcaacugcaucggcggcgacugcuaccugaugaucaccgacggccccgccagcggcaucagcgagugcagauuccugaagaucagagagggcagaaucaucaaggagaucuuccccaccggcagagugaagcacaccgaggagugcaccugcggcuucgccagcaacaagaccaucgagugcgccugcagagacaacagcuacaccgccaagagacccuucgugaagcugaacguggagaccgacaccgccgagaucagacugaugugcaccgagaccuaccuggacacccccagacccaacgacggcagcaucaccggccccugcgagagcgacggcgacaagggcagcggcggcaucaagggcggcuucgugcaccagagaauggccagcaagaucggcagaugguacagcagaaccaugagcaagaccaagagaaugggcaugggccuguacgugaaguacgacggcgaccccuggaccgacagcgaggcccuggcccugagcggcgugauggugagcauggaggagcccggcugguacagcuucggcuucgagaucaaggacaagaagugcgacgugcccugcaucggcaucgagauggugcacgacggcggcaagaccaccuggcacagcgccgccaccgccaucuacugccugaugggcagcggccagcugcugugggacaccgugaccggcguggacauggcccuguga

SEQ ID NO: 189816 - RNA, 1401 nt, Artificial Sequence; identical to SEQ ID NO: 189815
  derived and/or modified CDS sequence (opt4) from neuraminidase__InfluenzaB__AGX23318

SEQ ID NO: 189817 - RNA, 1401 nt, Artificial Sequence; identical to SEQ ID NO: 189815
  derived and/or modified CDS sequence (opt4) from neuraminidase__InfluenzaB__AGX23329

SEQ ID NO: 189818 - RNA, 1401 nt, Artificial Sequence; identical to SEQ ID NO: 189815
  derived and/or modified CDS sequence (opt4) from neuraminidase__InfluenzaB__AGX23340

SEQ ID NO: 189819 - RNA, 1401 nt, Artificial Sequence; identical to SEQ ID NO: 189815
  derived and/or modified CDS sequence (opt4) from neuraminidase__InfluenzaB__AGX23351

SEQ ID NO: 189820 - RNA, 1401 nt, Artificial Sequence; identical to SEQ ID NO: 189815
  derived and/or modified CDS sequence (opt4) from neuraminidase__InfluenzaB__AGX23362

SEQ ID NO: 189821 - RNA, 1401 nt, Artificial Sequence; identical to SEQ ID NO: 189815
  derived and/or modified CDS sequence (opt4) from neuraminidase__InfluenzaB__AGX23373

SEQ ID NO: 189822 - RNA, 1401 nt, Artificial Sequence; identical to SEQ ID NO: 189815
  derived and/or modified CDS sequence (opt4) from neuraminidase__InfluenzaB__AGX23384

SEQ ID NO: 189823 - RNA, 1401 nt, Artificial Sequence
  derived and/or modified CDS sequence (opt4) from neuraminidase__InfluenzaB__AGX23395
augcugcccagcaccauccagacccugacccuguuccugaccagcggcggcgugcugcugagccuguacgugagcgccagccugagcuaccugcuguacagcgacauccugcugaaguucagccagaccgagaucaccgcccccaucaugccccuggacugcgccaacgccagcaacgugcaggccgugaacagaagcgccgccaagggcgugacccugcugcugcccgagcccgaguggaccuaccccagacugagcugccccggcagcaccuuccagaaggcccugcugaucagcccccacagauucggcgagaccaagggcaacagcgccccccugaucaucagagagcccuucaucgccugcggccccaccgagugcaagcacuucgcccugacccacuacgccgcccagcccggcggcuacuacaacggcaccagagaggacagaaacaagcugagacaccugaucagcgugaagcugggcaagauccccaccguggagaacagcaucuuccacauggccgccuggagcggcagcgccugccacgacggcaaggaguggaccuacgugggcguggacggccccgacagcaacgcccugcugaagaucaaguacggcgaggccuacaccgacaccuaccacagcuacgccaagaacauccugagaacccaggagagcgccugcaacugcaucggcggcgacugcuaccugaugaucaccgacggccccgccagcggcaucagcgagugcagauuccugaagaucagagagggcagaaucaucaaggagaucuuccccaccggcagagugaagcacaccgaggagugcaccugcggcuucgccagcaacaagaccaucgagugcgccugcagagacaacagcuacaccgccaagagacccuucgugaagcugaacguggagaccgacaccgccgagaucagacugaugugcaccgagaccuaccuggacacccccagacccaacgacggcagcaucaccggccccugcgagagcgacggcgacaagggcagcggcggcaucaagggcggcuucgugcaccagagaauggccagcaagaucggcagaugguacagcagaaccaugagcaagaccaagagaaugggcaugggccuguacgugaaguacgacggcgaccccuggaccgacagcgaggcccuggcccugagcggcgugauggugagcauggaggagcccggcugguacagcuucggcuucgagaucaaggacaagaagugcgacgugcccugcaucggcaucgagauggugcacgacggcggcaagaccaccuggcacagcgccgccaccgccaucuacugccugaugggcagcggccagcugcuguggaacaccgugaccggcguggacauggcccuguga

SEQ ID NO: 189824 - RNA, 1401 nt, Artificial Sequence
  derived and/or modified CDS sequence (opt4) from neuraminidase__InfluenzaB__AGX23417
augcugcccagcaccauccagacccugacccuguuccugaccagcggcggcgugcugcugagccuguacgugagcgccagccugagcuaccugcuguacagcgacauccugcugaaguucagccagaccgagaucaccgcccccaucaugccccuggacugcgccaacgccagcaacgugcaggccgugaacagaagcgccgccaagggcgugaccuuccugcugcccgagcccgaguggaccuaccccagacugagcugccccggcagcaccuuccagaaggcccugcugaucagcccccacagauucggcgagaccaagggcaacagcgccccccugaucaucagagagcccuucaucgccugcggccccaccgagugcaagcacuucgcccugacccacuacgccgcccagcccggcggcuacuacaacggcaccagagaggacagaaacaagcugagacaccugaucagcgugaagcugggcaagauccccaccguggagaacagcaucuuccacauggccgccuggagcggcagcgccugccacgacggcaaggaguggaccuacaucggcguggacggccccgacagcaacgcccugcugaagaucaaguacggcgaggccuacaccgacaccuaccacagcuacgccaagaacauccugagaacccaggagagcgccugcaacugcaucggcggcgacugcuaccugaugaucaccgacggccccgccagcggcaucagcgagugcagauuccugaagaucagagagggcagaaucaucaaggagaucuuccccaccggcagagugaagcacaccgaggagugcaccugcggcuucgccagcaacaagaccaucgagugcgccugcagagacaacagcuacaccgccaagagacccuucgugaagcugaacguggagaccgacaccgccgagaucagacugaugugcaccgagaccuaccuggacacccccagacccaacgacggcagcaucaccggccccugcgagagcgacggcgacaagggcagcggcggcaucaagggcggcuucgugcaccagagaauggccagcaagaucggcagaugguacagcagaaccaugagcaagaccaagagaaugggcaugggccuguacgugaaguacgacggcgaccccuggaccgacagcgaggcccuggcccugagcggcgugauggugagcauggaggagcccggcugguacagcuucggcuucgagaucaaggacaagaagugcgacgugcccugcaucggcaucgagauggugcacgacggcggcaagaccaccuggcacagcgccgccaccgccaucuacugccugaugggcagcggccagcugcugugggacaccgugaccggcguggacauggcccuguga

SEQ ID NO: 189825 - RNA, 1401 nt, Artificial Sequence; identical to SEQ ID NO: 189824
  derived and/or modified CDS sequence (opt4) from neuraminidase__InfluenzaB__AGX23428

SEQ ID NO: 189826 - RNA, 1401 nt, Artificial Sequence; identical to SEQ ID NO: 189207
  derived and/or modified CDS sequence (opt4) from neuraminidase__InfluenzaB__AGX23450

SEQ ID NO: 189827 - RNA, 1401 nt, Artificial Sequence
  derived and/or modified CDS sequence (opt4) from neuraminidase__InfluenzaB__AGX23461
augcugcccagcaccauccagacccugacccuguuccugaccagcggcggcgugcugcugagccuguacgugagcgccagccugagcuaccugcuguacagcgacauccugcugaaguucagcagaaccgagaucaccgcccccaucaugccccuggacugcgccaacgccagcaacauccaggccgugaacagaagcgccaccaagggcgugacccugcugcugcccgagcccgaguggaccuaccccagacugagcugccccggcagcaccuuccagaaggcccugcugaucagcccccacagauucggcgagaccaagggcaacagcgccccccugaucaucagagagcccuucaucgccugcggccccaaggagugcaagcacuucgcccugacccacuacgccgcccagcccggcggcuacuacaacggcaccagagaggacagaaacaagcugagacaccugaucagcgugaagcugggcaagauccccaccguggagaacagcaucuuccacauggccgccuggagcggcagcgccugccacgacggcagagaguggaccuacaucggcguggacggccccgacagcaacgcccugcugaagaucaaguacggcgaggccuacaccgacaccuaccacagcuacgccaagaacauccugagaacccaggagagcgccugcaacugcaucggcggcgacugcuaccugaugaucaccgacggccccgccagcggcaucagcgagugcagauuccugaagaucagagagggcagaaucaucaaggagaucuuccccaccggcagagugaagcacaccgaggagugcaccugcggcuucgccagcaacaagaccaucgagugcgccugcagagacaacagcuacaccgccaagagacccuucgugaagcugaacguggagaccgacaccgccgagaucagacugaugugcaccgagaccuaccuggacacccccagacccaacgacggcagcaucaccggccccugcgagagcaacggcgacaagggcagcggcggcaucaagggcggcuucgugcaccagagaauggccagcaagaucggcagaugguacagcagaaccaugagcaagaccaagagaaugggcaugggccuguacgugaaguacgacggcgaccccuggaccgacagcgaggcccuggcccugagcggcgugauggugagcaucgaggagcccggcugguacagcuucggcuucgagaucaaggacaagaagugcgacgugcccugcaucggcaucgagauggugcacgacggcggcaagaccaccuggcacagcgccgccaccgccaucuacugccugaugggcagcggccagcugcugugggacaccgugaccggcguggacauggcccuguga

SEQ ID NO: 189828 - RNA, 1401 nt, Artificial Sequence; identical to SEQ ID NO: 189207
  derived and/or modified CDS sequence (opt4) from neuraminidase__InfluenzaB__AGX23472

SEQ ID NO: 189829 - RNA, 1401 nt, Artificial Sequence; identical to SEQ ID NO: 188848
  derived and/or modified CDS sequence (opt4) from neuraminidase__InfluenzaB__AGX23483

SEQ ID NO: 189830 - RNA, 1401 nt, Artificial Sequence
  derived and/or modified CDS sequence (opt4) from neuraminidase__InfluenzaB__AGX23494
augcugcccagcaccauccagacccugacccuguuccugaccagcggcggcgugcugcugagccuguacgugagcgccagccugagcuaccugcuguacagcgacauccugcugaaguucagccagaccgagaucaccgcccccaucaugccccuggacugcgccaacgccagcaacgugcaggccgugaacagaagcgccgccaagggcgugacccugcugcugcccgagcccgaguggaccuaccccagacugagcugccccggcagcaccuuccagaaggcccugcugaucagcccccacagauucggcgagaccaagggcaacagcgccccccugaucaucagagagcccuucaucgccugcggccccaccgagugcaagcacuucgcccugacccacuacgccgcccagcccggcggcuacuacaacggcaccagagaggacagaaacaagcugagacaccugaucagcgugaagcugggcaagauccccaccguggagaacagcaucuuccacauggccgccuggagcggcagcgccugccacgacggcaaggaguggaccuacgugggcguggacggccccgacagcaacgcccugcugaagaucaaguacggcgaggccuacaccgacaccuaccacagcuacgccaagaacauccugagaacccaggagagcgccugcaacugcaucggcggcgacugcuaccugaugaucaccgacggccccgccagcggcaucagcgagugcagauuccugaagaucagagagggcagaaucaucaaggagaucuuccccaccggcagagugaagcacaccgaggagugcaccugcggcuucgccagcaacaagaccaucgagugcgccugcagagacaacagcuacaccgccaagagacccuucgugaagcugaacguggagaccgacaccgccgagaucagacugaugugcaccgagaccuaccuggacacccccagacccaacgacggcagcaucaccggccccugcggcagcgacggcgacaagggcagcggcggcaucaagggcggcuucgugcaccagagaauggccagcaagaucggcagaugguacagcagaaccaugagcaagaccaagagaaugggcaugggccuguacgugaaguacgacggcgaccccuggaccgacagcgaggcccuggcccugagcggcgugauggugagcauggacgagcccggcugguacagcuucggcuucgagaucaaggacaagaagugcgacgugcccugcaucggcaucgagauggugcacgacggcggcaagaccaccuggcacagcgccgccaccgccaucuacugccugaugggcagcggccagcugcugugggacaccgugaccggcguggacauggcccuguga

SEQ ID NO: 189831 - RNA, 1401 nt, Artificial Sequence
  derived and/or modified CDS sequence (opt4) from neuraminidase__InfluenzaB__AGX23505
augcugcccagcaccauccagacccugacccuguuccugaccagcggcggcgugcugcugagccuguacgugagcgccagccugagcuaccugcuguacagcgacauccugcugaaguucagccagaccgagaucaccgcccccaucaugccccuggacugcgccaacgccagcaacgugcaggccgugaacagaagcgccgccaagggcgugacccugcugcugcccgagcccgaguggaccuaccccagacugagcugccccggcagcaccuuccagaaggcccugcugaucagcccccacagauucggcgagaccaagggcaacagcgccccccugaucaucagagagcccuucaucgccugcggccccaccgagugcaagcacuucgcccugacccacuacgccgcccagcccggcggcuacuacaacggcaccagagaggacagaaacaagcugagacaccugaucagcgugaagcugggcaagauccccaccguggagaacagcaucuuccacauggccgccuggagcggcagcgccugccacgacggcaaggaguggaccuacaucggcguggacggccccgacaacaacgcccugcugaagaucaaguacggcgaggccuacaccgacaccuaccacagcuacgccaagaacauccugagaacccaggagagcgccugcaacugcaucggcggcgacugcuaccugaugaucaccgacggccccgccagcggcaucagcgagugcagauuccugaagaucagagagggcagaaucaucaaggagaucuuccccaccggcagagugaagcacaccgaggagugcaccugcggcuucgccagcaacaagaccaucgagugcgccugcagagacaacagcuacaccgccaagagacccuucgugaagcugaacguggagaccgacaccgccgagaucagacugaugugcaccgagaccuaccuggacacccccagacccaacgacggcagcaucaccggccccugcgagagcgacggcgacaagggcagcggcggcaucaagggcggcuucgugcaccagagaauggccagcaagaucggcagaugguacagcagaaccaugagcaagaccaagagaaugggcaugggccuguacgugaaguacgacggcgaccccuggaccgacagcgaggcccuggcccugagcggcgugauggugagcauggaggagcccggcugguacagcuucggcuucgagaucaaggacaagaagugcgacgugcccugcaucggcaucgagauggugcacgacggcggcaagaccaccuggcacagcgccgccaccgccaucuacugccugaugggcagcggccagcugcugugggacaccgugaccggcguggacauggcccuguga

SEQ ID NO: 189832 - RNA, 1401 nt, Artificial Sequence
  derived and/or modified CDS sequence (opt4) from neuraminidase__InfluenzaB__AGX23516
augcugcccagcaccauccagacccugacccuguuccugaccagcggcggcgugcugcugagccuguacgugagcgccagccugagcuaccugcuguacagcgacauccugcugaaguucagccagaccgagaucaccgcccccaucaugccccuggacugcgccaacgccagcaacgugcaggccgugaacagaagcgccgccaagggcgugacccugcugcugcccgagcccgaguggaccuaccccagacugagcugccccggcagcaccuuccagaaggcccugcugaucagcccccacagauucggcgagaccaagggcaacagcgccccccugaucaucagagagcccuucaucgccugcggccccaccgagugcaagcacuucgcccugacccacuacgccgcccagcccggcggcuacuacaacggcaccagagaggacagaaacaagcugagacaccugaucagcgugaagcugggcaagauccccaccguggagaacagcaucuuccacauggccgccuggagcggcagcgccugccacgacggcaaggaguggaccuacaucggcguggacggccccgacagcaacgcccugcugaagaucaaguacggcgaggccuacaccgacaccuaccacagcuacgccaagaacauccugagaacccaggagagcgccugcaacugcaucggcggcgacugcuaccugaugaucaccgacggccccgccagcggcgugagcgagugcagauuccugaagaucagagagggcagaaucaucaaggagaucuuccccaccggcagagugaagcacaccgaggagugcaccugcggcuucgccagcaacaagaccaucgagugcgccugcagagacaacagcuacaccgccaagagacccuucgugaagcugaacguggagaccgacaccgccgagaucagacugaugugcaccgagaccuaccuggacacccccagacccaacgacggcagcaucaccggccccugcgagagcgacggcgacaagggcagcggcggcaucaagggcggcuucgugcaccagagaauggccagcaagaucggcagaugguacagcagaaccaugagcaaggccaagagaaugggcaugggccuguacgugaaguacgacggcgaccccuggaccgacagcgaggcccuggcccugagcggcgugauggugagcauggaggagcccggcugguacagcuucggcuucgagaucaaggacaagaagugcgacgugcccugcaucggcaucgagauggugcacgacggcggcaagaccaccuggcacagcgccgccaccgccaucuacugccugaugggcagcggccagcugcugugggacaccgugaccggcguggacauggcccuguga

SEQ ID NO: 189833 - RNA, 1401 nt, Artificial Sequence; identical to SEQ ID NO: 188848
  derived and/or modified CDS sequence (opt4) from neuraminidase__InfluenzaB__AGX23527

SEQ ID NO: 189834 - RNA, 1401 nt, Artificial Sequence
  derived and/or modified CDS sequence (opt4) from neuraminidase__InfluenzaB__AGX23538
augcugcccagcaccauccagacccugacccuguuccugaccagcggcggcgugcugcugagccuguacgugagcgccagccugagcuaccugcuguacagcgacauccugcugaaguucagccagaccgagaucaccgcccccaucaugccccuggacugcgccaacgccagcaacgugcaggccgugaacagaagcgccgccaagggcgugacccugcugcugcccaagcccgaguggaccuaccccagacugagcugccccggcagcaccuuccagaaggcccugcugaucagcccccacagauucggcgagaccaagggcaacagcgccccccugaucaucagagagcccuucaucgccugcggccccaccgagugcaagcacuucgcccugacccacuacgccgcccagcccggcggcuacuacaacggcaccagagaggacagaaacaagcugagacaccugaucagcgugaagcugggcaagauccccaccguggagaacagcaucuuccacauggccgccuggagcggcagcgccugccacgacggcaaggaguggaccuacaucggcguggacggccccgacagcaacgcccugcugaagaucaaguacggcgaggccuacaccgacaccuaccacagcuacgccaagaacauccugagaacccaggagagcgccugcaacugcaucggcggcgacugcuaccugaugaucaccgacggccccgccagcggcgugagcgagugcagauuccugaagaucagagagggcagaaucaucaaggagaucuuccccaccggcagagugaagcacaccgaggagugcaccugcggcuucgccagcaacaagaccaucgagugcgccugcagagacaacagcuacaccgccaagagacccuucgugaagcugaacguggagaccgacaccgccgagaucagacugaugugcaccgagaccuaccuggacacccccagacccaacgacggcagcaucaccggccccugcgagagcgacggcgacaagggcagcggcggcaucaagggcggcuucgugcaccagagaauggccagcaagaucggcagaugguacagcagaaccaugagcaccaccaagagaaugggcaugggccuguacgugaaguacgacggcgaccccuggaccgacagcgaggcccuggcccugagcggcgugauggugagcauggaggagcccggcugguacagcuucggcuucgagaucaaggacaagaagugcgacgugcccugcaucggcaucgagauggugcacgacggcggcaagaccaccuggcacagcgccgccaccgccaucuacugccugaugggcagcggccagcugcugugggacaccgugaccggcguggacauggcccuguga

SEQ ID NO: 189835 - RNA, 1401 nt, Artificial Sequence
  derived and/or modified CDS sequence (opt4) from neuraminidase__InfluenzaB__AGX23549
augcugcccagcaccauccagacccugacccuguuccugaccagcggcggcgugcugcugagccuguacgugagcgccagccugagcuaccugcuguacagcgacauccugcugaaguucagccagaccgagaucaccgcccccaucaugccccuggacugcgccaacgccagcaacgugcaggccgugaacagaagcgccgccaagggcgugacccugcugcugcccgagcccgaguggaccuaccccagacugagcugccccggcagcaccuuccagaaggcccugcugaucagcccccacagauucggcgagaccaagggcaacagcgccccccugaucaucagagagcccuucaucgccugcggccccaccgagugcaagcacuucgcccugacccacuacgccgcccagcccggcggcuacuacaacggcaccagagaggacagaaacaagcugagacaccugaucagcgugaagcugggcaagauccccaccguggagaacagcaucuuccacauggccgccuggagcggcagcgccugccacgacggcaaggaguggaccuacaucggcguggacggccccgacagcaacgcccugcugaagaucaaguacggcgaggccuacaccgacaccuaccacagcuacgccaagaacauccugagaacccaggagagcgccugcaacugcaucggcggcgacugcuaccugaugaucaccgacggccccgccagcggcgugagcgagugcagauuccugaagaucagagagggcagaaucaucaaggagaucuuccccaccggcagagugaagcacaccgaggagugcaccugcggcuucgccagcaacaagaccaucgagugcgccugcagagacaacagcuacaccgccaagagacccuucgugaagcugaacguggagaccgacaccgccgagaucagacugaugugcaccgagaccuaccuggacacccccagacccaacgacggcagcaucaccggccccugcgagagcgacggcgacaagggcagcggcggcaucaagggcggcuucgugcaccagagaauggccagcaagaucggcagaugguacagcagaaccaugagcaccaccaagagaaugggcaugggccuguacgugaaguacgacggcgaccccuggaccgacagcgaggcccuggcccugagcggcgugauggugagcauggaggagcccggcugguacagcuucggcuucgagaucaaggacaagaagugcgacgugcccugcaucggcaucgagauggugcacgacggcggcaagaccaccuggcacagcgccgccaccgccaucuacugccugaugggcagcggccagcugcugugggacaccgugaccggcguggacauggcccuguga

SEQ ID NO: 189836 - RNA, 1401 nt, Artificial Sequence; identical to SEQ ID NO: 188848
  derived and/or modified CDS sequence (opt4) from neuraminidase__InfluenzaB__AGX23560

SEQ ID NO: 189837 - RNA, 1401 nt, Artificial Sequence; identical to SEQ ID NO: 189830
  derived and/or modified CDS sequence (opt4) from neuraminidase__InfluenzaB__AGX23571

SEQ ID NO: 189838 - RNA, 1401 nt, Artificial Sequence; identical to SEQ ID NO: 189830
  derived and/or modified CDS sequence (opt4) from neuraminidase__InfluenzaB__AGX23582

SEQ ID NO: 189839 - RNA, 1401 nt, Artificial Sequence
  derived and/or modified CDS sequence (opt4) from neuraminidase__InfluenzaB__AGX23593
augcugcccagcaccauccagacccugacccuguuccugaccagcggcggcgugcugcugagccuguacgugagcgccagccugagcuaccugcuguacagcgacauccugcugaaguucagccagaccgagaucaccgcccccaucaugccccuggacugcgccaacgccagcaacgugcaggccgugaacagaagcgccgccaagggcgugacccugcugcugcccgagcccgaguggaccuaccccagacugagcugccccggcagcaccuuccagaaggcccugcugaucagcccccacagauucggcgagaccaagggcaacagcgccccccugaucaucagagagcccuucaucgccugcggccccaccgagugcaagcacuucgcccugacccacuacgccgcccagcccggcggcuacuacaacggcaccagagaggacagaaacaagcugagacaccugaucagcgugaagcugggcaagauccccaccguggagaacagcaucuuccacauggccgccuggagcggcagcgccugccacgacggcaaggaguggaccuacaucggcguggacggccccgacagcaacgcccugcugaagaucaaguacggcgaggccuacaccgacaccuaccacagcuacgccaagaacauccugagaacccaggagagcgccugcaacugcaucggcggcgacugcuaccugaugaucaccgacggccccgccagcggcaucagcgagugcagauuccugaagaucagagagggcagaaucaucaaggagaucuuccccaccggcagagugaagcacaccgaggagugcaccugcggcuucgccagcaacaagaccaucgagugcgccugcagagacaacagcuacaccgccaagagacccuucgugaagcugaacguggagaccgacaccgccgagaucagacugaugugcaccgagaccuaccuggacacccccagacccaacgacggcagcaucaccggccccugcgagagcgacggcgacaagggcagcggcggcaucaagggcggcuucgugcaccagagaauggccagcaagaucggcagaugguacagcagaaccaugagcaagaccaagagaaugggcaugggccuguacgugaaguacgacggcgaccccuggaccgacagcgaggcccugacccugagcggcgugauggugagcauggaggagcccggcugguacagcuucggcuucgagaucaaggacaagaagugcgacgugcccugcaucggcaucgagauggugcacgacggcggcaagaccaccuggcacagcgccgccaccgccaucuacugccugaugggcagcggccagcugcugugggacaccgugaccggcguggacauggcccuguga

SEQ ID NO: 189840 - RNA, 1401 nt, Artificial Sequence; identical to SEQ ID NO: 188848
  derived and/or modified CDS sequence (opt4) from neuraminidase__InfluenzaB__AGX23604

SEQ ID NO: 189841 - RNA, 1401 nt, Artificial Sequence
  derived and/or modified CDS sequence (opt4) from neuraminidase__InfluenzaB__AGX23615
augcugcccagcaccauccagacccugacccuguuccugaccagcggcggcgugcugcugagccuguacgugagcgccagccugagcuaccugcuguacagcgacauccugcugaaguucagccagaccgagaucaccacccccaucaugccccuggacugcgccaacgccagcaacgugcaggccgugaacagaagcgccgccaagggcgugacccugcugcugcccgagcccgaguggaccuaccccagacugagcugccccggcagcaccuuccagaaggcccugcugaucagcccccacagauucggcgagaccaagggcaacagcgccccccugaucaucagagagcccuucaucgccugcggccccaccgagugcaagcacuucgcccugacccacuacgccgcccagcccggcggcuacuacaacggcaccagagaggacagaaacaagcugagacaccugaucagcgugaagcugggcaagauccccaccguggagaacagcaucuuccacauggccgccuggagcggcagcgccugccacgacggcaaggaguggaccuacaucggcguggacggccccgacagcaacgcccugcugaagaucaaguacggcgaggccuacaccgacaccuaccacagcuacgccaagaacauccugagaacccaggagagcgccugcaacugcaucggcggcgacugcuaccugaugaucaccgacggccccgccagcggcaucagcgagugcagauuccugaagaucagagagggcagaaucaucaaggagaucuuccccaccggcagagugaagcacaccgaggagugcaccugcggcuucgccagcaacaagaccaucgagugcgccugcagagacaacagcuacaccgccaagagacccuucgugaagcugaacguggagaccgacaccgccgagaucagacugaugugcaccgagaccuaccuggacacccccagacccaacgacggcagcaucaccggccccugcgagagcgacggcgacaagggcagcggcggcaucaagggcggcuucgugcaccagagaauggccagcaagaucggcagaugguacagcagaaccaugagcaagaccaagagaaugggcaugggccuguacgugaaguacgacggcgaccccuggaccgacagcgaggcccuggcccugagcggcgugauggugagcauggaggagcccggcugguacagcuucggcuucgagaucaaggacaagaagugcgacgugcccugcaucggcaucgagauggugcacgacggcggcaagaccaccuggcacagcgccgccaccgccaucuacugccugaugggcagcggccagcugcugugggacaccgugaccggcguggacauggcccuguga

SEQ ID NO: 189842 - RNA, 1401 nt, Artificial Sequence; identical to SEQ ID NO: 189830
  derived and/or modified CDS sequence (opt4) from neuraminidase__InfluenzaB__AGX23626

SEQ ID NO: 189843 - RNA, 1401 nt, Artificial Sequence; identical to SEQ ID NO: 189207
  derived and/or modified CDS sequence (opt4) from neuraminidase__InfluenzaB__AGX23637

SEQ ID NO: 189844 - RNA, 1401 nt, Artificial Sequence; identical to SEQ ID NO: 188848
  derived and/or modified CDS sequence (opt4) from neuraminidase__InfluenzaB__AGX23659

SEQ ID NO: 189845 - RNA, 1401 nt, Artificial Sequence; identical to SEQ ID NO: 189207
  derived and/or modified CDS sequence (opt4) from neuraminidase__InfluenzaB__AGX23670

SEQ ID NO: 189846 - RNA, 1401 nt, Artificial Sequence; identical to SEQ ID NO: 189207
  derived and/or modified CDS sequence (opt4) from neuraminidase__InfluenzaB__AGX23681

SEQ ID NO: 189847 - RNA, 1401 nt, Artificial Sequence; identical to SEQ ID NO: 189207
  derived and/or modified CDS sequence (opt4) from neuraminidase__InfluenzaB__AGX23692

SEQ ID NO: 189848 - RNA, 1401 nt, Artificial Sequence; identical to SEQ ID NO: 189207
  derived and/or modified CDS sequence (opt4) from neuraminidase__InfluenzaB__AGX23703

SEQ ID NO: 189849 - RNA, 1401 nt, Artificial Sequence
  derived and/or modified CDS sequence (opt4) from neuraminidase__InfluenzaB__AGX23714
augcugcccagcaccauccagacccugacccuguuccugaccagcggcggcgugcugcugagccuguacgugagcgccagccugagcuaccugcuguacagcgacauccugcugaaguucagccagaccgagaucaccgcccccaucaugccccuggacugcgccaacgccagcaacgugcaggccgugaacagaagcgccgccaagggcgugacccugcugcugcccgagcccgaguggaccuaccccagacugagcugccccggcagcaccuuccagaaggcccugcugaucagcccccacagauucggcgagaccaagggcaacagcgccccccugaucaucagagagcccuucaucgccugcggccccaccgagugcaagcacuucgcccugacccacuacgccgcccagcccggcggcuacuacaacggcaccagagaggacagaaacaagcugagacaccugaucagcgugaagcugggcaagauccccaccguggagaacagcaucuuccacauggccgccuggagcggcagcgccugccacgacggcaaggaguggaccuacgugggcguggacggccccgacagcaacgcccugcugaagaucaaguacggcgaggccuacaccgacaccuaccacagcuacgagaagaacauccugagaacccaggagagcgccugcaacugcaucggcggcgacugcuaccugaugaucaccgacggccccgccagcggcaucagcgagugcagauuccugaagaucagagagggcagaaucaucaaggagaucuuccccaccggcagagugaagcacaccgaggagugcaccugcggcuucgccagcaacaagaccaucgagugcgccugcagagacaacagcuacaccgccaagagacccuucgugaagcugaacguggagaccgacaccgccgagaucagacugaugugcaccgagaccuaccuggacacccccagacccaacgacggcagcaucaccggccccugcggcagcgacggcgacaagggcagcggcggcaucaagggcggcuucgugcaccagagaauggccagcaagaucggcagaugguacagcagaaccaugagcaagaccaagagaaugggcaugggccuguacgugaaguacgacggcgaccccuggaccgacagcgaggcccuggcccugagcggcgugauggugagcauggacgagcccggcugguacagcuucggcuucgagaucaaggacaagaagugcgacgugcccugcaucggcaucgagauggugcacgacggcggcaagaccaccuggcacagcgccgccaccgccaucuacugccugaugggcagcggccagcugcugugggacaccgugaccggcguggacauggcccuguga

SEQ ID NO: 189850 - RNA, 1401 nt, Artificial Sequence; identical to SEQ ID NO: 189207
  derived and/or modified CDS sequence (opt4) from neuraminidase__InfluenzaB__AGX23725

SEQ ID NO: 189851 - RNA, 1401 nt, Artificial Sequence; identical to SEQ ID NO: 189830
  derived and/or modified CDS sequence (opt4) from neuraminidase__InfluenzaB__AGX23736

SEQ ID NO: 189852 - RNA, 1401 nt, Artificial Sequence; identical to SEQ ID NO: 189207
  derived and/or modified CDS sequence (opt4) from neuraminidase__InfluenzaB__AGX23747

SEQ ID NO: 189853 - RNA, 1401 nt, Artificial Sequence; identical to SEQ ID NO: 189207
  derived and/or modified CDS sequence (opt4) from neuraminidase__InfluenzaB__AGX23758

SEQ ID NO: 189854 - RNA, 1401 nt, Artificial Sequence; identical to SEQ ID NO: 189830
  derived and/or modified CDS sequence (opt4) from neuraminidase__InfluenzaB__AGX23769

SEQ ID NO: 189855 - RNA, 1401 nt, Artificial Sequence
  derived and/or modified CDS sequence (opt4) from neuraminidase__InfluenzaB__AGX23780
augcugcccagcaccauccagacccugacccugcugcugaccagcggcggcgugcugcugagccuguacgugagcgccagccugagcuaccugcuguacagcgacauccugcugaaguucagccagaccgagaucaccgcccccaucaugccccuggacugcgccaacgccagcaacgugcaggccgugaacagaagcgccgccaagggcgugacccugcugcugcccgagcccgaguggaccuaccccagacugagcugccccggcagcaccuuccagaaggcccugcugaucagcccccacagauucggcgagaccaagggcaacagcgccccccugaucaucagagagcccuucaucgccugcggccccaccgagugcaagcacuucgcccugacccacuacgccgcccagcccggcggcuacuacaacggcaccagagaggacagaaacaagcugagacaccugaucagcgugaagcugggcaagauccccaccguggagaacagcaucuuccacauggccgccuggagcggcagcgccugccacgacggcaaggaguggaccuacaucggcguggacggccccgacagcaacgcccugcugaagaucaaguacggcgaggccuacaccgacaccuaccacagcuacgccaagaacauccugagaacccaggagagcgccugcaacugcaucggcggcgacugcuaccugaugaucaccgacggccccgccagcggcgugagcgagugcagauuccugaagaucagagagggcagaaucaucaaggagaucuuccccaccggcagagugaagcacaccgaggagugcaccugcggcuucgccagcaacaagaccaucgagugcgccugcagagacaacagcuacaccgccaagagacccuucgugaagcugaacguggagaccgacaccgccgagaucagacugaugugcaccgagaccuaccuggacacccccagacccaacgacggcagcaucaccggccccugcgagagcgacggcgacaagggcagcggcggcaucaagggcggcuucgugcaccagagaauggccagcaagaucggcagaugguacagcagaaccaugagcaagaccaagagaaugggcaugggccuguacgugaaguacgacggcgaccccuggaccgacagcgaggcccuggcccugagcggcgugauggugagcauggaggagcccggcugguacagcuucggcuucgagaucaaggacaagaagugcgacgugcccugcaucggcaucgagauggugcacgacggcggcaagaccaccuggcacagcgccgccaccgccaucuacugccugaugggcagcggccagcugcugugggacaccgugaccggcguggacauggcccuguga

SEQ ID NO: 189856 - RNA, 1401 nt, Artificial Sequence
  derived and/or modified CDS sequence (opt4) from neuraminidase__InfluenzaB__AGX23791
augcugcccagcaccauccagacccugacccuguuccugaccagcggcggcgugcugcugagccuguacgugagcgccagccugagcuaccugcuguacagcgacauccugcugaaguucagccagaccgagaucaccgcccccaucaugccccuggacugcgccaacgccagcaacgcccaggccgugaacagaagcgccgccaagggcgugacccugcugcugcccgagcccgaguggaccuaccccagacugagcugccccggcagcaccuuccagaaggcccugcugaucagcccccacagauucggcgagaccaagggcaacagcgccccccugaucaucagagagcccuucaucgccugcggccccaccgagugcaagcacuucgcccugacccacuacgccgcccagcccggcggcuacuacaacggcaccagagaggacagaaacaagcugagacaccugaucagcgugaagcugggcaagauccccaccguggagaacagcaucuuccacauggccgccuggagcggcagcgccugccacgacggcaaggaguggaccuacaucggcguggacggccccgacagcaacgcccugcugaagaucaaguacggcgaggccuacaccgacaccuaccacagcuacgccaagaacauccugagaacccaggagagcgccugcaacugcaucggcggcgacugcuaccugaugaucaccgacggccccgccagcggcgugagcgagugcagauuccugaagaucagagagggcagaaucaucaaggagaucuuccccaccggcagagugaagcacaccgaggagugcaccugcggcuucgccagcaacaagaccaucgagugcgccugcagagacaacagcuacaccgccaagagacccuucgugaagcugaacguggagaccgacaccgccgagaucagacugaugugcaccgagaccuaccuggacacccccagacccaacgacggcagcaucaccggccccugcgagagcgacggcgacaagggcagcggcggcaucaagggcggcuucgugcaccagagaauggccagcaagaucggcagaugguacagcagaaccaugagcaagaccaagagaaugggcaugggccuguacgugaaguacgacggcgaccccuggaccgacagcgaggcccuggcccugagcggcgugauggugagcauggaggagcccggcugguacagcuucggcuucgagaucaaggacaagaagugcgacgugcccugcaucggcaucgagauggugcacgacggcggcaagaccaccuggcacagcgccgccaccgccaucuacugccugaugggcagcggccagcugcugugggacaccgugaccggcguggacauggcccuguga

SEQ ID NO: 189857 - RNA, 1401 nt, Artificial Sequence; identical to SEQ ID NO: 189830
  derived and/or modified CDS sequence (opt4) from neuraminidase__InfluenzaB__AGX23802

SEQ ID NO: 189858 - RNA, 1401 nt, Artificial Sequence; identical to SEQ ID NO: 189830
  derived and/or modified CDS sequence (opt4) from neuraminidase__InfluenzaB__AGX23813

SEQ ID NO: 189859 - RNA, 1401 nt, Artificial Sequence; identical to SEQ ID NO: 189830
  derived and/or modified CDS sequence (opt4) from neuraminidase__InfluenzaB__AGX23824

SEQ ID NO: 189860 - RNA, 1401 nt, Artificial Sequence; identical to SEQ ID NO: 189830
  derived and/or modified CDS sequence (opt4) from neuraminidase__InfluenzaB__AGX23846

SEQ ID NO: 189861 - RNA, 1401 nt, Artificial Sequence; identical to SEQ ID NO: 188848
  derived and/or modified CDS sequence (opt4) from neuraminidase__InfluenzaB__AGX23857

SEQ ID NO: 189862 - RNA, 1401 nt, Artificial Sequence; identical to SEQ ID NO: 189830
  derived and/or modified CDS sequence (opt4) from neuraminidase__InfluenzaB__AGX23868

SEQ ID NO: 189863 - RNA, 1401 nt, Artificial Sequence
  derived and/or modified CDS sequence (opt4) from neuraminidase__InfluenzaB__AGX23879
augcugcccagcaccauccagacccugacccuguuccugaccagcggcggcgugcugcugagccuguacgugagcgccagccugagcuaccugcuguacagcgacauccugcugaaguucagccagaccgagaucaccgcccccaucaugccccuggacugcgccaacgccagcaacgugcaggccgugaacagaagcgccgccaagggcgugacccugcugcugcccgagcccgaguggaccuaccccagacugagcugccccggcagcaccuuccagaaggcccugcugaucagcccccacagauucggcgagaccaagggcaacagcgccccccugaucaucagagagcccuucaucgccugcggccccaccgagugcaagcacuucgcccugacccacuacgccgcccagcccggcggcuacuacaacggcaccagagaggacagaaacaagcugagacaccugaucagcgugaagcugggcaagauccccaccguggagaccagcaucuuccacauggccgccuggagcggcagcgccugccacgacggcaaggaguggaccuacaucggcguggacggccccgacagcaacgcccugcugaagaucaaguacggcgaggccuacaccgacaccuaccacagcuacgccaagaacauccugagaacccaggagagcgccugcaacugcaucggcggcgacugcuaccugaugaucaccgacggccccgccagcggcgugagcgagugcagauuccugaagaucagagagggcagaaucaucaaggagaucuuccccaccggcagagugaagcacaccgaggagugcaccugcggcuucgccagcaacaagaccaucgagugcgccugcagagacaacagcuacaccgccaagagacccuucgugaagcugaacguggagaccgacaccgccgagaucagacugaugugcaccgagaccuaccuggacacccccagacccaacgacggcagcaucaccggccccugcgagagcgacggcgacaagggcagcggcggcaucaagggcggcuucgugcaccagagaauggccagcaagaucggcagaugguacagcagaaccaugagcaagaccaagagaaugggcaugggccuguacgugaaguacgacggcgaccccuggaccgacagcgaggcccuggcccugagcggcgugauggugagcauggaggagcccggcugguacagcuucggcuucgagaucaaggacaagaagugcgacgugcccugcaucggcaucgagauggugcacgacggcggcaagaccaccuggcacagcgccgccaccgccaucuacugccugaugggcagcggccagcugcugugggacaccgugaccggcguggacauggcccuguga

SEQ ID NO: 189864 - RNA, 1401 nt, Artificial Sequence; identical to SEQ ID NO: 189830
  derived and/or modified CDS sequence (opt4) from neuraminidase__InfluenzaB__AGX23890

SEQ ID NO: 189865 - RNA, 1401 nt, Artificial Sequence; identical to SEQ ID NO: 188848
  derived and/or modified CDS sequence (opt4) from neuraminidase__InfluenzaB__AGX23901

SEQ ID NO: 189866 - RNA, 1401 nt, Artificial Sequence
  derived and/or modified CDS sequence (opt4) from neuraminidase__InfluenzaB__AGX23912
augcugcccagcaccauccagacccugacccuguuccugaccagcggcggcgugcugcugagccuguacgugagcgccagccugagcuaccugcuguacagcgacauccugcugaaguucagccagaccgagaucaccgcccccaucaugccccuggacugcgccaacgccagcaacgugcaggccgugaacagaagcgccgccaagggcgugacccugcugcugcccgagcccgaguggaccuaccccagacugagcugccccggcagcaccuuccagaaggcccugcugaucagcccccacagauucggcgagaccaagggcaacagcgccccccugaucaucagagagcccuucaucgccugcggccccaccgagugcaagcacuucgcccugacccacuacgccgcccagcccggcggcuacuacaacggcaccagagaggacagaaacagacugagacaccugaucagcgugaagcugggcaagauccccaccguggagaacagcaucuuccacauggccgccuggagcggcagcgccugccacgacggcaaggaguggaccuacgugggcguggacggccccgacagcaacgcccugcugaagaucaaguacggcgaggccuacaccgacaccuaccacagcuacgccaagaacauccugagaacccaggagagcgccugcaacugcaucggcggcgacugcuaccugaugaucaccgacggccccgccagcggcaucagcgagugcagauuccugaagaucagagagggcagaaucaucaaggagaucuuccccaccggcagagugaagcacaccgaggagugcaccugcggcuucgccagcaacaagaccaucgagugcgccugcagagacaacagcuacaccgccaagagacccuucgugaagcugaacguggagaccgacaccgccgagaucagacugaugugcaccgagaccuaccuggacacccccagacccaacgacggcagcaucaccggccccugcggcagcgacggcgacaagggcagcggcggcaucaagggcggcuucgugcaccagagaauggccagcaagaucggcagaugguacagcagaaccaugagcaagaccaagagaaugggcaugggccuguacgugaaguacgacggcgaccccuggaccgacagcgaggcccuggcccugagcggcgugauggugagcauggacgagcccggcugguacagcuucggcuucgagaucaaggacaagaagugcgacgugcccugcaucggcaucgagauggugcacgacggcggcaagaccaccuggcacagcgccgccaccgccaucuacugccugaugggcagcggccagcugcugugggacaccgugaccggcguggacauggcccuguga

SEQ ID NO: 189867 - RNA, 1401 nt, Artificial Sequence; identical to SEQ ID NO: 189020
  derived and/or modified CDS sequence (opt4) from neuraminidase__InfluenzaB__AGX23934

SEQ ID NO: 189868 - RNA, 1401 nt, Artificial Sequence
  derived and/or modified CDS sequence (opt4) from neuraminidase__InfluenzaB__AGX23945
augcugcccagcaccauccagacccugacccuguuccugaccagcggcggcgugcugcugagccuguacgugagcgccagccugagcuaccugcuguacagcgacauccugcugaaguucagccagaccgagaucaccgcccccaucaugccccuggacugcgccaacgccagcaacgugcaggccgugaacagaagcgccgccaagggcgugacccugcugcugcccgagcccgaguggaccuaccccagacugagcugccccggcagcaccuuccagaaggcccugcugaucagcccccacagauucggcgagaccaagggcaacagcgccccccugaucaucagagagcccuucaucgccugcggccccaccgagugcaagcacuucgcccugacccacuacgccgcccagcccggcggcuacuacaacggcaccagagaggacagaaacaagcugagacaccugaucagcgugaagcugggcaagauccccaccguggagaacagcaucuuccacauggccgccuggagcggcagcgccugccacgacggcaaggaguggaccuacgugggcguggacggccccgacagcaacgcccugcugaagaucaaguacggcgaggccuacaccgacaccuaccacagcuacgccaagaacauccugagaacccaggagagcgccugcaacugcaucggcggcgacugcuaccugaugaucaccgacggccccgccagcggcaucagcgagugcagauuccugaagaucagagagggcagaaucaucaaggagaucuuccccaccggcagaaucaagcacaccgaggagugcaccugcggcuucgccagcaacaagaccaucgagugcgccugcagagacaacagcuacaccgccaagagacccuucgugaagcugaacguggagaccgacaccgccgagaucagacugaugugcaccgagaccuaccuggacacccccagacccaacgacggcagcaucaccggccccugcggcagcgacggcgacaagggcagcggcggcaucaagggcggcuucgugcaccagagaauggccagcaagaucggcagaugguacagcagaaccaugagcaagaccaagagaaugggcaugggccuguacgugaaguacgacggcgaccccuggaccgacagcgaggcccuggcccugagcggcgugauggugagcauggacgagcccggcugguacagcuucggcuucgagaucaaggacaagaagugcgacgugcccugcaucggcaucgagauggugcacgacggcggcaagaccaccuggcacagcgccgccaccgccaucuacugccugaugggcagcggccagcugcugugggacaccgugaccggcguggacauggcccuguga

SEQ ID NO: 189869 - RNA, 1401 nt, Artificial Sequence
  derived and/or modified CDS sequence (opt4) from neuraminidase__InfluenzaB__AGX23956
augcugcccagcaccauccagacccugacccuguuccugaccagcggcggcgugcugcugagccuguacgugagcgccagccugagcuaccugcuguacagcgacauccugcugaaguucagccagaccgagaucaccgcccccaucaugccccuggacugcgccaacgccagcaacgugcaggccgugaacagaagcgccgccaagggcgugacccugcugcugcccgagcccgaguggaccuaccccagacugagcugccccggcagcaccuuccagaaggcccugcugaucagcccccacagauucggcgagaccaagggcaacagcgccccccugaucaucagagagcccuucaucgccugcggccccaccgagugcaagcacuucgcccugacccacuacgccgcccagcccggcggcuacuacaacggcaccagagaggacagaaacaagcugagacaccugaucagcgugaagcugggcaagauccccaccguggagaacagcaucuuccacauggccgccuggagcggcagcgccugccacgacggcaaggaguggaccuacaucggcaucgacggccccgacagcaacgcccugcugaagaucaaguacggcgaggccuacaccgacaccuaccacagcuacgccaagaacauccugagaacccaggagagcgccugcaacugcaucggcggcgacugcuaccugaugaucaccgacggccccgccagcggcgugagcgagugcagauuccugaagaucagagagggcagaaucaucaaggagaucuuccccaccggcagagugaagcacaccgaggagugcaccugcggcuucgccagcaacaagaccaucgagugcgccugcagagacaacagcuacaccgccaagagacccuucgugaagcugaacguggagaccgacaccgccgagaucagacugaugugcaccgagaccuaccuggacacccccagacccaacgacggcagcaucaccggccccugcgagagcgacggcgacaagggcagcggcggcaucaagggcggcuucgugcaccagagaauggccagcaagaucggcagaugguacagcagaaccaugagcaagaccaagagaaugggcaugggccuguacgugaaguacgacggcgaccccuggaccgacagcgaggcccuggcccugagcggcgugauggugagcauggaggagcccggcugguacagcuucggcuucgagaucaaggacaagaagugcgacgugcccugcaucggcaucgagauggugcacgacggcggcaagaccaccuggcacagcgccgccaccgccaucuacugccugaugggcagcggccagcugcugugggacaccgugaccggcguggacauggcccuguga

SEQ ID NO: 189870 - RNA, 1401 nt, Artificial Sequence; identical to SEQ ID NO: 189207
  derived and/or modified CDS sequence (opt4) from neuraminidase__InfluenzaB__AGX23967

SEQ ID NO: 189871 - RNA, 1401 nt, Artificial Sequence; identical to SEQ ID NO: 189020
  derived and/or modified CDS sequence (opt4) from neuraminidase__InfluenzaB__AGX23978

SEQ ID NO: 189872 - RNA, 1401 nt, Artificial Sequence
  derived and/or modified CDS sequence (opt4) from neuraminidase__InfluenzaB__AGX23989
augcugcccagcaccauccagacccugacccuguuccugaccagcggcggcgugcugcugagccuguacgugagcgccagccugagcuaccugcuguacagcgacauccugcugaaguucagccagaccgagaucaccgcccccaucaugccccuggacugcgccaacgccagcaacgugcaggccgugaacagaagcgccgccaagggcgugacccugcugcugcccgagcccgaguggaccuaccccagacugagcugccccggcagcaccuuccagaaggcccugcugaucagcccccacagauucggcgagaccaagggcaacagcgccccccugaucaucagagagcccuucaucgccugcggccccaccgagugcaagcacuucgcccugacccacuacgccgcccagcccggcggcuacuacaacggcaccagagaggacagaaacaagcugagacaccugaucagcgugaagcugggcaagauccccaccguggagaacagcaucuuccacauggccgccuggagcggcagcgccugccacgacggcaaggaguggaccuacaucggcguggacggccccgacagcaacgcccugcugaagaucaaguacggcgaggccuacaccgacaccuaccacagcuacgccaagaacauccugagaacccaggagagcgccugcaacugcaucggcggcgacugcuaccugaugaucaccgacggccccgccagcggcaucagcgagugcagauuccugaagaucagagagggcagaaucaucaaggagaucuuccccaccggcagagugaagcacaccgaggagugcaccugcggcuucgccagcaacaagaccaucgagugcgccugcagagacaacagauacaccgccaagagacccuucgugaagcugaacguggagaccgacaaggccgagaucagacugaugugcaccgagaccuaccuggacacccccagacccaacgacggcagcaucaccggccccugcgagagcgacggcgacaagggcagcggcggcaucaagggcggcuucgugcaccagagaauggccagcaagaucggcagaugguacagcagaaccaugagcaagaccaagagaaugggcaugggccuguacgugaaguacgacggcgaccccuggaccgacagcggcgcccuggcccugagcggcgugauggugagcaucgaggagcccggcugguacagcuucggcuucgagaucaaggacaagaagugcgacgugcccugcaucggcaucgagauggugcacgacggcggcaagaccaccuggcacagcgccgccaccgccaucuacugccugaugggcagcggccagcugcugugggacaccgugaccggcguggacauggcccuguga

SEQ ID NO: 189873 - RNA, 1401 nt, Artificial Sequence; identical to SEQ ID NO: 189830
  derived and/or modified CDS sequence (opt4) from neuraminidase__InfluenzaB__AGX24000

SEQ ID NO: 189874 - RNA, 1401 nt, Artificial Sequence
  derived and/or modified CDS sequence (opt4) from neuraminidase__InfluenzaB__AGX24011
augcugcccagcaccauccagacccugacccuguuccugaccagcggcggcgugcugcugagccuguacgugagcgccagccugagcuaccugcuguacagcgacauccugcugaaguucagccagaccgagaucaccgcccccaucaugccccuggacuacgccaacgccagcaacgugcaggccgugaaccacagcgccgccaagggcgugacccugcugcugcccgagcccgaguggaccuaccccagacugagcugccccggcagcaccuuccagaaggcccugcugaucagcccccacagauucggcgagaccaagggcaacagcgccccccugaucaucagagagcccuucaucgccugcggccccaccgagugcaagcacuucgcccugacccacuacgccgcccagcccggcggcuacuacaacggcaccagagaggacagaaacaagcugagacaccugaucagcgugaagcugggcaagauccccaccguggagaacagcaucuuccacauggccgccuggagcggcagcgccugccacgacggcaaggaguggaccuacaucggcguggacggccccgacagcaacgcccugcugaagaucaaguacggcgaggccuacaucgacaccuaccacagcuacgccaagaacauccugagaacccaggagagcgccugcaacugcaucggcggcgacugcuaccugaugaucaccgacggccccgccagcggcaucagcgagugcagauuccugaagaucagagagggcagaaucaucaaggagaucuuccccaccggcagagugaagcacaccgaggagugcaccugcggcuucgccagcaacaagaccaucgagugcgccugcagagacaacagcuacaccgccaagagacccuucgugaagcugaacguggagaccgacaccgccgagaucagacugaugugcaccgagaccuaccuggacacccccagacccaacgacggcagcaucaccggccccugcgagagcgacggcgacaagggcagcggcggcaucaagggcggcuucgugcaccagagaauggccagcaagaucggcagaugguacagcagaaccaugagcaagaccaagagaaugggcaugggccuguacgugaaguacgacggcgaccccuggaccgacagcgaggcccuggcccugagcggcgugauggugagcauggaggagcccggcugguacagcuucggcuucgagaucaaggacaagaagugcgacgugcccugcaucggcaucgagauggugcacgacggcggcaagaccaccuggcacagcgccgccaccgccaucuacugccugaugggcagcggccagcugcugugggacaccgugaccggcguggacauggcccuguga

SEQ ID NO: 189875 - RNA, 1401 nt, Artificial Sequence; identical to SEQ ID NO: 189020
  derived and/or modified CDS sequence (opt4) from neuraminidase__InfluenzaB__AGX24022

SEQ ID NO: 189876 - RNA, 1401 nt, Artificial Sequence
  derived and/or modified CDS sequence (opt4) from neuraminidase__InfluenzaB__AGX24033
augcugcccagcaccauccagacccugacccuguuccugaccagcggcggcgugcugcugagccuguacgugagcgccagccugagcuaccugcuguacagcgacauccugcugaaguucagccagaccgagaucaccgcccagaucaugccccuggacugcgccaacgccagcaacgugcaggccgugaacagaagcgccgccaagggcgugacccugcugcugcccgagcccgaguggaccuaccccagacugagcugccccggcagcaccuuccagaaggcccugcugaucagcccccacagauucggcgagaccaagggcaacagcgccccccugaucaucagagagcccuucaucgccugcggccccaccgagugcaagcacuucgcccugacccacuacgccgcccagcccggcggcuacuacaacggcaccagagaggacagaaacaagcugagacaccugaucagcgugaagcugggcaagauccccaccguggagaacagcaucuuccacauggccgccuggagcggcagcgccugccacgacggcaaggaguggaccuacaucggcguggacggccccgacagcaacgcccugcugaagaucaaguacggcgaggccuacaccgacaccuaccacagcuacgccaagaacauccugagaacccaggagagcgccugcaacugcaucggcggcgacugcuaccugaugaucaccgacggccccgccagcggcaucagcgagugcagauuccugaagaucagagagggcagaaucaucaaggagaucuuccccaccggcagagugaagcacaccgaggagugcaccugcggcuucgccagcaacaagaccaucgagugcgccugcagagacaacagauacaccgccaagagacccuucgugaagcugaacguggagaccgacaaggccgagaucagacugaugugcaccgagaccuaccuggacacccccagacccaacgacggcagcaucaccggccccugcgagagcgacggcgacaagggcagcggcggcaucaagggcggcuucgugcaccagagaauggccagcaagaucggcagaugguacagcagaaccaugagcaagaccaagagaaugggcaugggccuguacgugaaguacgacggcgaccccuggaccgacagcggcgcccuggcccugagcggcgugauggugagcaucgaggagcccggcugguacagcuucggcuucgagaucaaggacaagaagugcgacgugcccugcaucggcaucgagauggugcacgacggcggcaagaccaccuggcacagcgccgccaccgccaucuacugccugaugggcagcggccagcugcugugggacaccgugaccggcguggacauggcccuguga

SEQ ID NO: 189877 - RNA, 1401 nt, Artificial Sequence; identical to SEQ ID NO: 189020
  derived and/or modified CDS sequence (opt4) from neuraminidase__InfluenzaB__AGX24044

SEQ ID NO: 189878 - RNA, 1401 nt, Artificial Sequence
  derived and/or modified CDS sequence (opt4) from neuraminidase__InfluenzaB__AGX24055
augcugcccagcaccauccagacccugacccuguuccugaccagcggcggcgugcugcugagccuguacgugagcgccagccugagcuaccugcuguacagcgacauccugcugaaguucagccagaccgagaucaccgcccccaucaugccccuggacugcgccaacgccagcaacgugcaggccgugaacagaagcgccaccaagggcgugacccugcugcugcccgagcuggaguggaccuaccccagacugagcugccccggcagcaccuuccagaaggcccugcugaucagcccccacagauucggcgagaccaagggcaacagcgccccccugaucaucagagagcccuucguggccugcggccccaccgagugcaagcacuucgcccugacccacuacgccgcccagcccggcggcuacuacaacggcaccagagaggacagaaacaagcugagacaccugaucagcgugaagcugggcaagauccccaccguggagaacagcaucuuccacauggccgccuggagcggcagcgccugccacgacggcaaggaguggaccuacaucggcguggacggccccaacagcaacgcccugcugaagaucaaguacggcgaggccuacaccgacaccuaccacagcuacgccaagaacauccugagaacccaggagagcgccugcaacugcaucggcggcgacugcuaccugaugaucaccgacggccccgccagcggcgugagcgagugcagauuccugaagaucagagagggcagaaucaucaaggagaucuuccccaccggcagagugaagcacaccgaggagugcaccugcggcuucgccagcaacaagaccaucgagugcgccugcagagacaacagcuacaccgccaagagacccuucgugaagcugaacguggagaccgacaccgccgagaucagacugaugugcaccgagaccuaccuggacacccccagacccaacgacggcagcaucaccggccccugcgagagcgacggcgacaagggcagcggcggcaucaagggcggcuucgugcaccagagaauggccagcaagaucggcagaugguacagcagaaccaugagcaagaccaagagaaugggcaugggccuguacgugaaguacgacggcgaccccuggaccgacagcgaggcccuggcccugagcggcgugauggugagcauggaggagcccggcugguacagcuucggcuucgagaucaaggacaagaagugcgacgugcccugcaucggcaucgagauggugcacgacggcggcaagaccaccuggcacagcgccgccaccgccaucuacugccugaugggcagcggccagcugcugugggacaccgugaccggcguggacauggcccuguga

SEQ ID NO: 189879 - RNA, 1401 nt, Artificial Sequence; identical to SEQ ID NO: 188877
  derived and/or modified CDS sequence (opt4) from neuraminidase__InfluenzaB__AGX24066

SEQ ID NO: 189880 - RNA, 1401 nt, Artificial Sequence
  derived and/or modified CDS sequence (opt4) from neuraminidase__InfluenzaB__AGX24077
augcugcccagcaccauccagacccugacccuguuccugaccagcggcggcgugcugcugagccuguacgugagcgccagccugagcuaccugcuguacagcgacauccugcugaaguucagccagaccgagaucaccgcccccaucaugccccuggacugcgccaacgccagcaacgugcaggccgugaacagaagcgccgccaagggcgugacccugcugcugcccgagcccgaguggaccuaccccagacugagcugccccggcagcaccuuccagaaggcccugcugaucagcccccacagauucggcgagaccaagggcaacagcgccccccugaucaucagagagcccuucaucgccugcggccccaccgagugcaagcacuucgcccugacccacuacgccgcccagcccggcggcuacuacaacggcaccagagaggacagaaacaagcugagacaccugaucagcgugaagcugggcaagauccccaccguggagaacagcaucuuccacauggccgccuggagcggcagcgccugccacgacggcaaggaguggaccuacaucggcguggacggccccgacagcaacgcccugcugaagaucaaguacggcgaggccuacaccgacaccuaccacagcuacgccaagaacauccugagaacccaggagagcgccugcaacugcaucggcggcaacugcuaccugaugaucaccgacggccccgccagcggcaucagcgagugcagauuccugaagaucagagagggcagaaucaucaaggagaucuuccccaccggcagagugaagcacaccgaggagugcaccugcggcuucgccagcaacaagaccaucgagugcgccugcagagacaacagauacaccgccaagagacccuucgugaagcugaacguggagaccgacaaggccgagaucagacugaugugcaccgagaccuaccuggacacccccagacccaacgacggcagcaucaccggccccugcgagagcgacggcgacaagggcagcggcggcaucaagggcggcuucgugcaccagagaauggccagcaagaucggcagaugguacagcagaaccaugagcaagaccaagagaaugggcaugggccuguacgugaaguacgacggcgaccccugggccgacagcggcgcccuggcccugagcggcgugauggugagcaucgaggagcccggcugguacagcuucggcuucgagaucaaggacaagaagugcgacgugcccugcaucggcaucgagauggugcacgacggcggcaagaccaccuggcacagcgccgccaccgccaucuacugccugaugggcagcggccagcugcugugggacaccgugaccggcguggacauggcccuguga

SEQ ID NO: 189881 - RNA, 1401 nt, Artificial Sequence
  derived and/or modified CDS sequence (opt4) from neuraminidase__InfluenzaB__AGX24088
augcugcccagcaccauccagacccugacccuguucaucaccagcggcggcgugcugcugagccuguacgugagcgccagccugagcuaccugcuguacagcgacauccugcugaaguucagccagaccgagaucaccgcccccaucaugccccuggacugcgccaacgccagcaacgugcaggccgugaacagaagcgccgccaagggcgugacccugcugcugcccgagcccgaguggaccuaccccagacugagcugccccggcagcaccuuccagaaggcccugcugaucagcccccacagauucggcgagaccaagggcaacagcgccccccugaucaucagagagcccuucaucgccugcggccccaccgagugcaagcacuucgcccugacccacuacgccgcccagcccggcggcuacuacaacggcaccagagaggacagaaacaagcugagacaccugaucagcgugaagcugggcaagauccccaccguggagaacagcaucuuccacauggccgccuggagcggcagcgccugccacgacggcaaggaguggaccuacgugggcguggacggccccgacagcgacgcccugcugaagaucaaguacggcgaggccuacaccgacaccuaccacagcuacgccaagaacauccugagaacccaggagagcgccugcaacugcaucggcggcgacugcuaccugaugaucaccgacggccccgccagcggcaucagcgagugcagauuccugaagaucagagagggcagaaucaucaaggagaucuuccccaccggcagagugaagcacaccgaggagugcaccugcggcuucgccagcaacaagaccaucgagugcgccugcagagacaacagcuacaccgccaagagacccuucgugaagcugaacguggagaccgacaccgccgagaucagacugaugugcaccgagaccuaccuggacacccccagacccaacgacggcagcaucaccggccccugcggcagcgacggcgacaagggcagcggcggcaucaagggcggcuucgugcaccagagaauggccagcaagaucggcagaugguacagcagaaccaugagcaagaccaagagaaugggcaugggccuguacgugaaguacgacggcgaccccuggaccgacagcgaggcccuggcccugagcggcgugauggugagcauggacgagcccggcugguacagcuucggcuucgagaucaaggacaagaagugcgacgugcccugcaucggcaucgagauggugcacgacggcggcaagaccaccuggcacagcgccgccaccgccaucuacugccugaugggcagcggccagcugcugugggacaccgugaccggcguggacauggcccuguga

SEQ ID NO: 189882 - RNA, 1401 nt, Artificial Sequence; identical to SEQ ID NO: 189020
  derived and/or modified CDS sequence (opt4) from neuraminidase__InfluenzaB__AGX24099

SEQ ID NO: 189883 - RNA, 1401 nt, Artificial Sequence
  derived and/or modified CDS sequence (opt4) from neuraminidase__InfluenzaB__AGX24110
augcugcccagcaccauccagacccugacccuguuccugaccagcggcggcgugcugcugagccuguacgugagcgccagccugagcuaccugcuguacagcgacauccugcugaaguucagccagaccgagaucaccgcccccaucaugccccuggacugcgccaacgccagcaacgugcaggccgugaacagaagcgccgccaagggcgugacccugcugcugcccgagcccgaguggaccuaccccagacugagcugccccggcagcaccuuccagaaggcccugcugaucagcccccacagauucggcgagaccaagggcaacagcgccccccugaucaucagagagcccuucaucgccugcggccccaccgagugcaagcacuucgcccugacccacuacgccgcccagcccggcggcuacuacaacggcaccagagaggacagaaacaagcugagacaccugaucagcgugaagcugggcaagauccccaccguggagaacagcaucuuccacauggccgccuggagcggcagcgccugccacgacggcaaggaguggaccuacgugggcguggacggccccgacagcaacgcccugcugaagaucaaguacggcgaggccuacaccgacaccuaccacagcuacgccaagaacauccugagaacccaggagagcgccugcaacugcaucggcggcgacugcuaccugaugaucaccgacggccccgccagcggcaucagcgagugcagauuccugaagaucagagagggcagaaucaucaaggagaucuuccccaccggcagagugaagcacaccgaggagugcaccugcggcuucgccagcaacaagaccaucgagugcaccugcagagacaacagcuacaccgccaagagacccuucgugaagcugaacguggagaccgacaccgccgagaucagacugaugugcaccgagaccuaccuggacacccccagacccaacgacggcagcaucaccggccccugcggcagcgacggcgacaagggcagcggcggcaucaagggcggcuucgugcaccagagaauggccagcaagaucggcagaugguacagcagaaccaugagcaagaccaagagaaugggcaugggccuguacgugaaguacgacggcgaccccuggaccgacagcgaggcccuggcccugagcggcgugauggugagcauggacgagcccggcugguacagcuucggcuucgagaucaaggacaagaagugcgacgugcccugcaucggcaucgagauggugcacgacggcggcaagaccaccuggcacagcgccgccaccgccaucuacugccugaugggcagcggccagcugcugugggacaccgugaccggcguggacauggcccuguga

SEQ ID NO: 189884 - RNA, 1401 nt, Artificial Sequence
  derived and/or modified CDS sequence (opt4) from neuraminidase__InfluenzaB__AGX24121
augcugcccagcaccauccagacccugacccuguuccugaccagcggcggcgugcugcugagccuguacgugagcgccagccugagcuaccugcuguacagcgacauccugcugaaguucagccagaccgagaucaccgcccccaucaugccccuggacuacgccaacgccagcaacgugcaggccgugaaccacagcgccgccaagggcgugacccugcugcugcccgagcccgaguggaccuaccccagacugagcugccccggcagcaccuuccagaaggcccugcugaucagcccccacagauucggcgagaccaagggcaacagcgccccccugaucaucagagagcccuucaucgccugcggccccaccgagugcaagcacuucgcccugacccacuacgccgccaagcccggcggcuacuacaacggcaccagagaggacagaaacaagcugagacaccugaucagcgugaagcugggcaagauccccaccguggagaacagcaucuuccacauggccgccuggagcggcagcgccugccacgacggcaaggaguggaccuacaucggcguggacggccccgacagcaacgcccugcugaagaucaaguacggcgaggccuacaccgacaccuaccacagcuacgccaagaacauccugagaacccaggagagcgccugcaacugcaucggcggcgacugcuaccugaugaucaccgacggccccgccagcggcaucagcgagugcagauuccugaagaucagagagggcagaaucaucaaggagaucuuccccaccggcagagugaagcacaccgaggagugcaccugcggcuucgccagcaacaagaccaucgagugcgccugcagagacaacagcuacaccgccaagagacccuucgugaagcugaacguggagaccgacaccgccgagaucagacugaugugcaccgagaccuaccuggacacccccagacccaacgacggcagcaucaccggccccugcgagagcgacggcgacaagggcagcggcggcaucaagggcggcuucgugcaccagagaauggccagcaagaucggcagaugguacagcagaaccaugagcaagaccaagagaaugggcaugggccuguacgugaaguacgacggcgaccccuggaccgacagcgaggcccuggcccugagcggcgugauggugagcauggaggagcccggcugguacagcuucggcuucgagaucaaggacaagaagugcgacgugcccugcaucggcaucgagauggugcacgacggcggcaagaccaccuggcacagcgccgccaccgccaucuacugccugaugggcagcggccagcugcugugggacaccgugaccggcguggacauggcccuguga

SEQ ID NO: 189885 - RNA, 1401 nt, Artificial Sequence
  derived and/or modified CDS sequence (opt4) from neuraminidase__InfluenzaB__AGX24132
augcugcccagcaccauccagacccugacccuguuccugaccagcggcggcgugcugcugagccuguacgugagcgccagccugagcuaccugcuguacagcgacauccugcugaaguucagcagaaccgagaucaccgcccccaucaugccccuggacugcgccaacgccagcaacgugcaggccgugaacagaagcgccaccaagggcgugacccugccccugcccgagcccgaguggaccuaccccagacugagcugccccggcagcaccuuccagaaggcccugcugaucagcccccacagauucggcgagaccaagggcaacagcgccccccugaucaucagagagcccuucaucgccugcggccccaaggagugcaagcacuucgcccugacccacuacgccgcccagcccggcggcuacuacaacggcaccagagaggacagaaacaagcugagacaccugaucagcgugaagcugggcaagauccccaccguggagaacagcaucuuccacauggccgccuggagcggcagcgccugccacgacggcagagaguggaccuacaucggcguggacggccccgacagcaacgcccugcugaagaucaaguacggcgaggccuacaccgacaccuaccacagcuacgccaagaacauccugagaacccaggagagcgccugcaacugcaucggcggcgacugcuaccugaugaucaccgacggccccgcccugggcaucagcgagugcagauuccugaagaucagagagggcagaaucaucaaggagaucuuccccaccggcagagugaagcacaccgaggagugcaccugcggcuucgccagcaacaagaccaucgagugcgccugcagagacaacagcuacaccgccaagagacccuucgugaagcugaacguggagaccgacaccgccgagaucagacugaugugcaccgagaccuaccuggacacccccagacccaacgacggcagcaucaccggccccugcgagagcaacggcgacaagggcagcggcggcaucaagggcggcuucgugcaccagagaauggccagcaagaucggcagaugguacagcagaaccaugagcaagaccaagagaaugggcaugggccuguacgugaaguacgacggcgaccccuggaccgacagcgaggcccuggcccugagcggcgugauggugagcauggaggagcccggcugguacagcuucggcuucgagaucaaggacaagaagugcgacgugcccugcaucggcaucgagauggugcacgacggcggcaagaccaccuggcacagcgccgccaccgccaucuacugccugaugggcagcggccagcugcugugggacaccgugaccggcgugaacaugacccuguga

SEQ ID NO: 189886 - RNA, 1401 nt, Artificial Sequence
  derived and/or modified CDS sequence (opt4) from neuraminidase__InfluenzaB__AGX24143
augcugcccagcaccauccagacccugacccuguuccugaccagcggcggcgugcugcugagccuguacgugagcgccagccugagcuaccugcuguacagcgacauccugcugaaguucagccagaccgagaucaccgcccccaucaugccccuggacugcgccaacgccagcaacgugcaggccgugaacagaagcgccgccaagggcgugacccugcugcugcccgagcccgaguggaccuaccccagacugagcugccccggcagcaccuuccagaaggcccugcugaucagcccccacagauucggcgagaccaagggcaacagcgccccccugaucaucagagagcccuucaucgccugcggccccaccgagugcaagcacuucgcccugacccacuacgccgcccagcccggcggcuacuacaacggcaccagagaggacagaaacaagcugagacaccugaucagcgugaagcugggcaagauccccaccguggagaacagcaucuuccacauggccgccuggagcggcagcgccugccacgacggcaaggaguggaccuacaucggcguggacggccccgacggcaacgcccugcugaagaucaaguacggcgaggccuacaccgacaccuaccacagcuacgccaagaacauccugagaacccaggagagcgccugcaacugcaucggcggcgacugcuaccugaugaucaccgacggccccgccagcggcaucagcgagugcagauuccugaagaucagagagggcagaaucaucaaggagaucuuccccaccggcagagugaagcacaccgaggagugcaccugcggcuucgccagcaacaagaccaucgagugcgccugcagagacaacagcuacaccgccaagagacccuucgugaagcugaacguggagaccgacaccgccgagaucagacugaugugcaccgagaccuaccuggacacccccagacccaacgacggcagcaucaccggccccugcgagagcgacggcgacaagggcagcggcggcaucaagggcggcuucgugcaccagagaauggccagcaagaucggcagaugguacagcagaaccaugagcaagaccaagagaaugggcaugggccuguacgugaaguacgacggcgaccccuggaccgacagcgaggcccuggcccugagcggcgugauggugagcauggaggagcccggcugguacagcuucggcuucgagaucaaggacaagaagugcgacgugcccugcaucggcaucgagauggugcacgacggcggcaagaccaccuggcacagcgccgccaccgccaucuacugccugaugggcagcggccagcugcugugggacaccgugaccggcguggacauggcccuguga

SEQ ID NO: 189887 - RNA, 1401 nt, Artificial Sequence; identical to SEQ ID NO: 189020
  derived and/or modified CDS sequence (opt4) from neuraminidase__InfluenzaB__AGX24154

SEQ ID NO: 189888 - RNA, 1401 nt, Artificial Sequence
  derived and/or modified CDS sequence (opt4) from neuraminidase__InfluenzaB__AGX24165
augcugcccagcaccauccagacccugacccuguuccugaccagcggcggcgugcugcugagccuguacgugagcgccagccugagcuaccugcuguacagcgacauccugcugaaguucagccagaccgagaucaccgcccccaucaugccccuggacuacgccaacgccagcaacgugcaggccgugaaccacagcgccgccaagggcgugacccugcugcugcccgagcccgaguggaccuaccccagacugagcugccccggcagcaccuuccagaaggcccugcugaucagcccccacagauucggcgagaccaagggcaacagcgccccccugaucaucagagagcccuucaucgccugcggccccaccgagugcaagcacuucgcccugacccacuacgccgcccagcccggcggcuacuacaacggcaccagagaggacagaaacaagcugagacaccugaucagcgugaagcugggcaagauccccaccguggagaacagcaucuuccacauggccgccuggagcggcagcgccugccacgacggcaaggaguggaccuacaucggcguggacggccccgacagcaacgcccugcugaagaucaaguacggcgaggccuacaccgacaccuaccacagcuacgccaagaacauccugagaacccaggagagcgccugcaacugcaucggcggcgacugcuaccugaugaucaccgacggccccgccagcggcaucagcgagugcagauuccugaagaucagagagggcagaaucaucaaggagaucuuccccaccggcagagugaagcacaccgaggagugcaccugcggcuucgccagcaacaagaccaucgagugcgccugcagagacaacagcuacaccgccaagagacccuucgugaagcugaacguggagaccgacaccgccgagaucagacugaugugcaccgagaccuaccuggacacccccagacccaacgacggcagcaucaccggccccugcgagagcgacggcgacaagggcagcggcggcaucaagggcggcuucgugcaccagagaauggccagcaagaucggcagaugguacagcagaaccaugagcaagaccaagagaaugggcaugggccuguacgugaaguacgacggcgaccccuggaccgacagcgaggcccuggcccugaacggcgugauggugagcauggaggagcccggcugguacagcuucggcuucgagaucaaggacaagaagugcgacgugcccugcaucggcaucgagauggugcacgacggcggcaagaccaccuggcacagcgccgccaccgccaucuacugccugaugggcagcggccagcugcugugggacaccgugaccggcguggacauggcccuguga

SEQ ID NO: 189889 - RNA, 1401 nt, Artificial Sequence; identical to SEQ ID NO: 188877
  derived and/or modified CDS sequence (opt4) from neuraminidase__InfluenzaB__AGX24176

SEQ ID NO: 189890 - RNA, 1401 nt, Artificial Sequence; identical to SEQ ID NO: 188877
  derived and/or modified CDS sequence (opt4) from neuraminidase__InfluenzaB__AGX24187

SEQ ID NO: 189891 - RNA, 1401 nt, Artificial Sequence; identical to SEQ ID NO: 188877
  derived and/or modified CDS sequence (opt4) from neuraminidase__InfluenzaB__AGX24198

SEQ ID NO: 189892 - RNA, 1401 nt, Artificial Sequence; identical to SEQ ID NO: 189207
  derived and/or modified CDS sequence (opt4) from neuraminidase__InfluenzaB__AGX24231

SEQ ID NO: 189893 - RNA, 1401 nt, Artificial Sequence; identical to SEQ ID NO: 188877
  derived and/or modified CDS sequence (opt4) from neuraminidase__InfluenzaB__AGX24242

SEQ ID NO: 189894 - RNA, 1401 nt, Artificial Sequence
  derived and/or modified CDS sequence (opt4) from neuraminidase__InfluenzaB__AGX24275
augcugcccagcaccauccagacccugacccuguuccugaccagcggcggcgugcugcugagccuguacgugagcgccagccugagcuaccugcuguacagcgacauccugcugaaguucagccagaccgagaucaccgcccccaucaugccccuggacugcgccaacgccagcaacgugcaggccgugaacagaagcgccgccaagggcgugacccugcugcugcccgagcccgaguggaccuaccccagacugagcugccccggcagcaccuuccagaaggcccugcugaucagcccccacagauucggcgagaccaagggcaacagcgccccccugaucaucagagagcccuucaucgccugcggccccaccgagugcaagcacuucgcccugacccacuacgccgcccagcccggcggcuacuacaacggcaccagagaggacagaaacaagcugagacaccugaucagcgugaagcugggcaagauccccaccguggagaacagcaucuuccacauggccgccuggagcggcagcgccugccacgacggcaaggaguggaccuacaucggcguggacggccccgacagcaacgcccugcugaagaucaaguacggcgaggccuacaccgacaccuaccacagcuacgccaagaacauccugagaacccaggagagcgccugcaacugcaucggcggcgacugcuaccugaugaucaccgacggccccgccagcggcaucagcgagugcagauuccugaagaucagagagggcagaaucaucaaggagaucuuccccaccggcagagugaagcacaccgaggagugcaccugcggcuucgccagcaacagaaccaucgagugcgccugcagagacaacagcuacaccgccaagagacccuucgugaagcugaacguggagaccgacaccgccgagaucagacugaugugcaccgagaccuaccuggacacccccagacccaacgacggcagcaucaccggccccugcgagagcgacggcgacaagggcagcggcggcaucaagggcggcuucgugcaccagagaauggccagcaagaucggcagaugguacagcagaaccaugagcaagaccagaagaaugggcaugggccuguacgugaaguacgacggcgaccccuggaccgacagcgaggcccuggcccugagcggcgugauggugagcauggaggagcccggcugguacagcuucggcuucgagaucaaggacaagaagugcgacgugcccugcaucggcaucgagauggugcacgacggcggcaagaccaccuggcacagcgccgccaccgccaucuacugccugaugggcagcggccagcugcugugggacaccgugaccggcguggacauggcccuguga

SEQ ID NO: 189895 - RNA, 1401 nt, Artificial Sequence; identical to SEQ ID NO: 189472
  derived and/or modified CDS sequence (opt4) from neuraminidase__InfluenzaB__AGX24286

SEQ ID NO: 189896 - RNA, 1401 nt, Artificial Sequence
  derived and/or modified CDS sequence (opt4) from neuraminidase__InfluenzaB__AGX24297
augcugcccagcaccauccagacccugacccuguuccugaccagcggcggcgugcugcugagccuguacgugagcgccagccugagcuaccugcuguacagcgacauccugcugaaguucagccagaccgagaucaccgcccccaucaugccccuggacugcgccaacgccagcaacgugcaggccgugaacagaagcgccgccaagggcgugacccugcugcugcccgagcccgaguggaccuaccccagacugagcugccccggcagcaccuuccagaaggcccugcugaucagcccccacagauucggcgagaccagaggcaacagcgccccccugaucaucagagagcccuucaucgccugcggccccaccgagugcaagcacuucgcccugacccacuacgccgcccagcccggcggcuacuacaacggcaccagagaggacagaaacaagcugagacaccugaucagcgugaagcugggcaagauccccaccguggagaacagcaucuuccacauggccgccuggagcggcagcgccugccacgacggcaaggaguggaccuacaucggcguggacggccccgacagcaacgcccugcugaagaucaaguacggcgaggccuacaccgacaccuaccacagcuacgccaagaacauccugagaacccaggagagcgccugcaacugcaucggcggcgacugcuaccugaugaucaccgacggccccgccagcggcaucagcgagugcagauuccugaagaucagagagggcagaaucaucaaggagaucuuccccaccggcagagugaagcacaccgaggagugcaccugcggcuucgccagcaacaagaccaucgagugcgccugcagagacaacagcuacaccgccaagagacccuucgugaagcugaacguggagaccgacaccgccgagaucagacugaugugcaccgagaccuaccuggacacccccagacccaacgacggcagcaucaccggccccugcgagagcgacggcgacaagggcagcggcggcaucaagggcggcuucgugcaccagagaauggccagcaagaucggcagaugguacagcagaaccaugagcaagaccaagagaaugggcaugggccuguacgugaaguacgacggcgaccccuggaccgacagcgaggcccuggcccugagcggcgugauggugagcauggaggagcccggcugguacagcuucggcuucgagaucaaggacaagaagugcgacgugcccugcaucggcaucgagauggugcacgacggcggcaagaccaccuggcacagcgccgccaccgccaucuacugccugaugggcagcggccagcugcugugggacaccgugaccggcguggacauggcccuguga

SEQ ID NO: 189897 - RNA, 1401 nt, Artificial Sequence; identical to SEQ ID NO: 189472
  derived and/or modified CDS sequence (opt4) from neuraminidase__InfluenzaB__AGX24319

SEQ ID NO: 189898 - RNA, 1401 nt, Artificial Sequence
  derived and/or modified CDS sequence (opt4) from neuraminidase__InfluenzaB__AGX24330
augcugcccagcaccauccagacccugacccuguuccugaccagcggcggcgugcugcugagccuguacgugagcgccagccugagcuaccugcuguacagcgacauccugcugaaguucagccagaccgagaucaccgcccccaucaugccccuggacuacgccaacgccagcaacgugcaggccgugaaccacagcgccgccaagggcgugacccugcugcugcccgagcccgaguggaccuaccccagacugagcugccccggcagcaccuuccagaaggcccugcugaucagcccccacagauucggcgagaccaagggcaacagcgccccccugaucaucagagagcccuucaucgccugcggccccaccgagugcaagcacuucgcccugacccacuacgccgcccagcccggcggcuacuacaacggcaccagagaggacagaaacaagcugagacaccugaucagcgugaagcugggcaagauccccaccguggagaacagcaucuuccacauggccgccuggagcggcagcgccugccacgacggcaaggaguggaccuacaucggcguggacggccccgacagcaacgcccugcugaagaucaaguacggcgaggccuacaccgacaccuaccacagcuacgccaagaacauccugagaacccaggagagcgccugcaacugcaucggcggcgacugcuaccugaugaucaccgacggccccgccagcggcaucagcgagugcagauuccugaagaucagagagggcagaaucaucaaggagaucuuccccaccggcagagugaagcacaccgaggagugcaccugcggcuucgccagcaacaagaccaucgagugcaccugcagagacaacagcuacaccgccaagagacccuucgugaagcugaacguggagaccgacaccgccgagaucagacugaugugcaccgagaccuaccuggacacccccagacccaacgacggcagcaucaccggccccugcgagagcgacggcgacaagggcagcggcggcaucaagggcggcuucgugcaccagagaauggccagcaagaucggcagaugguacagcagaaccaugagcaagaccaagagaaugggcaugggccuguacgugaaguacgacggcgaccccuggaccgacagcgaggcccuggcccugagcggcgugaugaucagcauggaggagcccggcugguacagcuucggcuucgagaucaaggacaagaagugcgacgugcccugcaucggcaucgagauggugcacgacggcggcaagaccaccugguacagcgccgccaccgccaucuacugccugaugggcagcggccagcugcugugggacaccgugaccggcguggacauggcccuguga

SEQ ID NO: 189899 - RNA, 1401 nt, Artificial Sequence
  derived and/or modified CDS sequence (opt4) from neuraminidase__InfluenzaB__AGX24341
augcugcccagcaccauccagacccugacccuguuccugaccagcggcggcgugcugcugagccuguacgugagcgccagccugagcuaccugcuguacagcgacauccugcugaaguucagcagaaccgagaucaccgcccccaucaugccccuggacugcgccaacgccagcaacgugcaggccgugaacagaagcgccaccaagggcgugacccugcugcugcccgagcccgaguggaccuaccccagacugagcugccccggcagcaccuuccagaaggcccugcugaucagcccccacagauucggcgagaccaagggcaacagcgccccccugaucaucagagagcccuucaucgccugcggccccaaggagugcaagcacuucgcccugacccacuacgccgcccagcccggcggcuacuacaacggcaccagagaggacagaaacaagcugagacaccugaucagcgugaagcugggcaagauccccaccguggagaacagcaucuuccacauggccgccuggagcggcagcgccugccacgacggcagagaguggaccuacaucggcguggacggccccgacagcaacgcccugcugaagaucaaguacggcgaggccuacaccgacaccuaccacagcuacgccaagaacauccugagaacccaggagagcgccugcaacugcaucggcggcgacugcuaccugaugaucaccgacggccccgccagcggcaucagcgagugcagauuccugaagaucagagagggcagaaucaucaaggagaucuuccccaccggcagagugaagcacaccgaggagugcaccugcggcuucgccagcaacaagaccaucgagugcgccugcagagacaacagcuacaccgccaagagacccuucgugaagcugaacguggagaccgacaccgccgagaucagacugaugugcaccgagaccuaccuggacacccccagacccaacgacggcagcaucaccggccccugcgagagcaacggcgacaagggcagcggcggcaucaagggcggcuucgugcaccagagaauggccagcaagaucggcagaugguacagcagaaccaugagcaagaccaagagaaugggcaugggccuguacgugaaguacgacggcgaccccuggaccgacagcgaggcccugacccugagcggcgugauggugagcauggaggagcccggcugguacagcuucggcuucgagaucaaggacaagaagugcgacgugcccugcaucggcaucgagauggugcacgacggcggcaagaccaccuggcacagcgccgccaccgccaucuacugccugaugggcagcggccagcugcugugggacaccgugaccggcgugaacaugacccuguga

SEQ ID NO: 189900 - RNA, 1401 nt, Artificial Sequence
  derived and/or modified CDS sequence (opt4) from neuraminidase__InfluenzaB__AGX24352
augcugcccagcaccauccagacccugacccuguuccugaccagcggcggcgugcugcugagccuguacgugagcgccagccugagcuaccugcuguacagcgacauccugcugaaguucagcagaaccgagaucaccgcccccaucaugccccuggacugcgccaacgccagcaacgugcaggccgugaacagaagcgccaccaagggcgugacccugcugcugcccgagcccgaguggaccuaccccagacugagcugccccggcagcaccuuccagaaggcccugcugaucagcccccacagauucggcgagaccaagggcaacagcgccccccugaucaucagagagcccuucaucgccugcggccccaaggagugcaagcacuucgcccugacccacuacgccgcccagcccggcggcuacuacaacggcaccagagaggacagaaacaagcugagacaccugaucagcgugaagcugggcaagauccccaccguggagaacagcaucuuccacauggccgccuggagcggcagcgccugccacgacggcagagaguggaccuacaucggcguggacggccccgacaacaacgcccugcugaagaucaaguacggcgaggccuacaccgacaccuaccacagcuacgccaagaacauccugagaacccaggagagcgccugcaacugcaucggcggcgacugcuaccugaugaucaccgacggccccgccagcggcaucagcgagugcagauuccugaagaucagagagggcagaaucaucaaggagaucuuccccaccggcagagugaagcacaccgaggagugcaccugcggcuucgccagcaacaagaccaucgagugcgccugcagagacaacagcuacaccgccaagagacccuucgugaagcugaacguggagaccgacaccgccgagaucagacugaugugcaccgagaccuaccuggacacccccagacccaacgacggcagcaucaccggccccugcgagagcaacggcgacaagggcagcggcggcaucaagggcggcuucgugcaccagagaauggccagcaagaucggcagaugguacagcagaaccaugagcaagaccaagagaaugggcaugggccuguacgugaaguacgacggcgaccccuggaccgacagcgaggcccuggcccugagcggcgugauggugagcauggaggagcccggcugguacagcuucggcuucgagaucaaggacaagaagugcgacgugcccugcaucggcaucgagauggugcacgacggcggcaagaccaccuggcacagcgccgccaccgccaucuacugccugaugggcagcggccagcugcugugggacaccgugaccggcgugaacaugacccuguga

SEQ ID NO: 189901 - RNA, 1401 nt, Artificial Sequence; identical to SEQ ID NO: 189896
  derived and/or modified CDS sequence (opt4) from neuraminidase__InfluenzaB__AGX24363

SEQ ID NO: 189902 - RNA, 1401 nt, Artificial Sequence; identical to SEQ ID NO: 189900
  derived and/or modified CDS sequence (opt4) from neuraminidase__InfluenzaB__AGX24374

SEQ ID NO: 189903 - RNA, 1401 nt, Artificial Sequence
  derived and/or modified CDS sequence (opt4) from neuraminidase__InfluenzaB__AGX24385
augcugcccagcaccauccagacccugacccuguuccugaccagcggcggcgugcugcugagccuguacgugagcgccagccugagcuaccugcuguacagcgacauccugcugaaguucagcagaaccgagaucaccgcccccaccaugccccuggacugcgccaacgccagcaacgugcaggccgugaacagaagcgccaccaagggcgugacccugcugcugcccgagcccgaguggaccuaccccagacugagcugccccggcagcaccuuccagaaggcccugcugaucagcccccacagauucggcgagaccaagggcaacagcgccccccugaucaucagagagcccuucaucgccugcggccccaaggagugcaagcacuucgcccugacccacuacgccgcccagcccggcggcuacuacaacggcaccagagaggacagaaacaagcugagacaccugaucagcgugaagcugggcaagauccccaccguggagaacagcaucuuccacauggccgccuggagcggcagcgccugccacgacggcagagaguggaccuacaucggcguggacggccccgacagcaacgcccugcugaagaucaaguacggcgaggccuacaccgacaccuaccacagcuacgccaagaacauccugagaacccaggagagcgccugcaacugcaucggcggcgacugcuaccugaugaucaccgacggccccgccagcggcaucagcgagugcagauuccugaagaucagagagggcagaaucaucaaggagaucuuccccaccggcagagugaagcacaccgaggagugcaccugcggcuucgccagcaacaagaccaucgagugcgccugcagagacaacagcuacaccgccaagagacccuucgugaagcugaacguggagaccgacaccgccgagaucagacugaugugcaccgagaccuaccuggacacccccagacccaacgacggcagcaucaccggccccugcgagagcaacggcgacaagggcagcggcggcaucaagggcggcuucgugcaccagagaauggccagcaagaucggcagaugguacagcagaaccaugagcaagaccaagagaaugggcaugggccuguacgugaaguacgacggcgaccccuggaccgacagcgaggcccuggcccugagcggcgugauggugagcauggaggagcccggcugguacagcuucggcuucgagaucaaggacaagaagugcgacgugcccugcaucggcaucgagauggugcacgacggcggcaagaccaccuggcacagcgccgccaccgccaucuacugccugaugggcagcggccagcugcugugggacaccgugaccggcgugaacaugacccuguga

SEQ ID NO: 189904 - RNA, 1401 nt, Artificial Sequence
  derived and/or modified CDS sequence (opt4) from neuraminidase__InfluenzaB__AGX24396
augcugcccagcaccauccagacccugacccuguuccugaccagcggcggcgugcugcugagccuguacgugagcgccagccugagcuaccugcuguacagcgacauccugcugaaguucagccagaccgagaucaccgcccccaucaugccccuggacugcgccaacgccagcaacgugcaggccgugaacagaagcgccgccaagggcgugacccugcugcugcccgagcccgaguggaccuaccccagacugagcugccccggcagcaccuuccagaaggcccugcugaucagcccccacagauucggcgagaccaagggcaacagcgccccccugaucaucagagagcccuucaucgccugcggccccaccgagugcaagcacuucgcccugacccacuacgccgcccagcccggcggcuacuacaacggcaccagagaggacagaaacaagcugagacaccugaucagcgugaagcugggcaagauccccaccguggagaacagcaucuuccacauggccgccuggagcggcagcgccugccacgacggcaaggaguggaccuacaucggcguggacggccccgacagcaacgcccugcugaagaucaaguacggcgaggccuacaccgacaccuaccacagcuacgccaagaacauccugagaacccaggagagcgccugcaacugcaucggcggcgacugcuaccugaugaucaccgacggccccgccagcggcaucagcgagugcagauuccugaagaucagagagggcagaaucaucaaggagaucuuccccaccggcagagugaagcacaccgaggagugcaccugcggcuucgccagcaacaagaccaucgagugcgccugcagagacaacagauacaccgccaagagacccuucgugaagcugaacguggagaccgacaccgccgagaucagacugaugugcaccgagaccuaccuggacacccccagacccaacgacggcagcaucaccggccccugcgagagcgacggcgacaagggcagcggcggcaucaagggcggcuucgugcaccagagaauggccagcaagaucggcagaugguacagcagaaccaugagcaagaccaagagaaugggcaugggccuguacgugaaguacgacggcgaccccuggaccgacagcggcgcccuggcccugagcggcgugauggugagcaucgaggagcccggcugguacagcuucggcuucgagaucaaggacaagaagugcgacgugcccugcaucggcaucgagauggugcacgacggcggcaagaccaccuggcacagcgccgccaccgccaucuacugccugaugggcagcggccagcugcugugggacaccgugaccggcguggacauggcccuguga

SEQ ID NO: 189905 - RNA, 1401 nt, Artificial Sequence; identical to SEQ ID NO: 189904
  derived and/or modified CDS sequence (opt4) from neuraminidase__InfluenzaB__AGX24407

SEQ ID NO: 189906 - RNA, 1401 nt, Artificial Sequence; identical to SEQ ID NO: 188877
  derived and/or modified CDS sequence (opt4) from neuraminidase__InfluenzaB__AGX24418

SEQ ID NO: 189907 - RNA, 1401 nt, Artificial Sequence; identical to SEQ ID NO: 188848
  derived and/or modified CDS sequence (opt4) from neuraminidase__InfluenzaB__AGX24429

SEQ ID NO: 189908 - RNA, 1401 nt, Artificial Sequence
  derived and/or modified CDS sequence (opt4) from neuraminidase__InfluenzaB__AGX24440
augcugcccagcaccauccagacccugacccuguuccugaccagcggcggcgugcugcugagccuguacgugagcgccagccugagcuaccugcuguacagcgacauccugcugaaguucagccagaccgagaucaccgcccccaucaugccccuggacugcgccaacgccagcaacgugcaggccgugaacagaagcgccgccaagggcgugacccugcugcugcccgagcccgaguggaccuaccccagacugagcugccccggcagcaccuuccagaaggcccugcugaucagcccccacagauucggcgagaccaagggcaacagcgccccccugaucaucagagagcccuucaucgccugcggcaccaccgagugcaagcacuucgcccugacccacuacgccgcccagcccggcggcuacuacaacggcaccagagaggacagaaacaagcugagacaccugaucagcgugaagcugggcaagauccccaccguggagaacagcaucuuccacauggccgccuggagcggcagcgccugccacgacggcaaggaguggaccuacaucggcguggacggccccgacagcaacgcccugcugaagaucaaguacggcgaggccuacaccgacaccuaccacagcuacgccaagaacauccugagaacccaggagagcgccugcaacugcaucggcggcgacugcuaccugaugaucaccgacggccccgccagcggcaucagcgagugcagauuccugaagaucagagagggcagaaucaucaaggagaucuuccccaccggcagagugaagcacaccgaggagugcaccugcggcuucgccagcaacaagaccaucgagugcgccugcagagacaacagauacaccgccaagagacccuucgugaagcugaacguggagaccgacaccgccgagaucagacugaugugcaccgagaccuaccuggacacccccagacccaacgacggcagcaucaccggccccugcgagagcgacggcgacaagggcagcggcggcaucaagggcggcuucgugcaccagagaauggccagcaagaucggcagaugguacagcagaaccaugagcaagaccaagagaaugggcaugggccuguacgugaaguacgacggcgaccccuggaccgacagcggcgcccuggcccugagcggcgugauggugagcaucgaggagcccggcugguacagcuucggcuucgagaucaaggacaagaagugcgacgugcccugcaucggcaucgagauggugcacgacggcggcaagaccaccuggcacagcgccgccaccaccaucuacugccugaugggcagcggccagcugcugugggacaccgugaccggcguggacauggcccuguga

SEQ ID NO: 189909 - RNA, 1401 nt, Artificial Sequence; identical to SEQ ID NO: 189472
  derived and/or modified CDS sequence (opt4) from neuraminidase__InfluenzaB__AGX24451

SEQ ID NO: 189910 - RNA, 1401 nt, Artificial Sequence
  derived and/or modified CDS sequence (opt4) from neuraminidase__InfluenzaB__AGX24462
augcugcccagcaccauccagacccugacccuguuccugaccagcggcggcgugcugcugagccuguacgugagcgccagccugagcuaccugcuguacagcgacauccugcugaaguucagccagaccgagaucaccgcccccaucaugccccuggacuacgccaacgccagcaacgugcaggccgugaaccacagcgccgccaagggcgugacccugcugcugcccgagcccgaguggaccuaccccagacugagcugccccggcagcaccuuccagaaggcccugcugaucagcccccacagauucggcgagaccaagggcaacagcgccccccugaucaucagagagcccuucaucgccugcggccccaccgagugcaagcacuucgcccugacccacuacgccgcccagcccggcggcuacuacaacggcaccagagaggacagaaacaagcugagacaccugaucagcgugaagcugggcaagauccccaccguggagaacagcaucuuccacauggccgccuggagcggcagcgccugccacgacggcaaggaguggaccuacaucggcguggacggccccgacagcaacgcccugcugaagaucaaguacggcgaggccuacaccgacaccuaccacagcuacgccaagaacauccugagaacccaggagagcgccugcaacugcaucggcggcgacugcuaccugaugaucaccgacggccccgccagcggcaucagcgagugcagauuccugaagaucagagagggcagaaucaucaaggagaucuuccccaccggcagagugaagcacaccgaggagugcaccugcggcuucgccagcaacaagaccaucgagugcgccugcagagacaacagcuacaccgccaagagacccuucgugaagcugaacguggagaccgacaccgccgagaucagacugaugugcaccgagaccuaccuggacacccccagacccaacgacggcagcaucaccggccccugcgagagcgacggcgacaagggcagcggcggcaucaagggcggcuucgugcaccagagaauggccagcaagaucggcagaugguacagcagaaccaugagcaagaccaagagaaugggcaugggccuguacgugaaguacgacggcgaccccuggaccgacagcgaggcccuggcccugagcggcgugaugaucagcauggaggagcccggcugguacagcuucggcuucgagaucaaggacaagaagugcgacgugcccugcaucggcaucgagauggugcacgacggcggcaagaccaccuggcacagcgccgccaccgccaucuacugccugaugggcagcggccagcugcugugggacaccgugaccggcguggacauggcccuguga

SEQ ID NO: 189911 - RNA, 1401 nt, Artificial Sequence; identical to SEQ ID NO: 189910
  derived and/or modified CDS sequence (opt4) from neuraminidase__InfluenzaB__AGX24473

SEQ ID NO: 189912 - RNA, 1401 nt, Artificial Sequence
  derived and/or modified CDS sequence (opt4) from neuraminidase__InfluenzaB__AGX24484
augcugcccagcaccauccagacccugacccuguuccugaccagcggcggcgugcugcugagccuguacgugagcgccagccugagcuaccugcuguacagcgacauccugcugaaguucagccagaccgagaucaccgcccccaucaugccccuggacugcgccaacgccagcaacgugcaggccgugaacagaagcgccgccaagggcgugacccugcugcugcccgagcccgaguggaccuaccccagacugagcugccccggcagcaccuuccagaaggcccugcugaucagcccccacagauucggcgagaccaagggcaacagcgccccccugaucaucagagagcccuucaucgccugcggccccaccgagugcaagcacuucgcccugacccacuacgccgcccagcccggcggcuacuacaacggcaccagagaggacagaaacaagcugagacaccugaucagcgugaagcugggcaagauccccaccguggagaacagcaucuuccacauggccgccuggagcggcagcgccugccacgacggcaaggaguggaccuacaucggcguggacggccccgacagcaacgcccugcugaagaucaaguacggcgaggccuacaccgacaccuaccacagcuacgccaagaacauccugagaacccaggagagcgccugcaacugcaucggcggcgacugcuaccugaugaucaccgacggccccgccagcggcaucagcgagugcagauuccugaagaucagagagggcagaaucaucaaggagaucuuccccaccggcagagugaagcacaccgaggagugcaccugcggcuucgccagcaacaagaccaucgagugcgccugcagagacaacggcuacaccgccaagagacccuucgugaagcugaacguggagaccgacaccgccgagaucagacugaugugcaccgagaccuaccuggacacccccagacccaacgacggcagcaucaccggccccugcgagagcgacggcgacaagggcagcggcggcaucaagggcggcuucgugcaccagagaauggccagcaagaucggcagaugguacagcagaaccaugagcaagaccagaagaaugggcaugggccuguacgugaaguacgacggcgaccccuggaccgacagcgaggcccuggcccugagcggcgugauggugagcauggaggagcccggcugguacagcuucggcuucgagaucaaggacaagaagugcgacgugcccugcaucggcaucgagauggugcacgacggcggcaagaccaccuggcacagcgccgccaccgccaucuacugccugaugggcagcggccagcugcugugggacaccgugaccggcguggacauggcccuguga

SEQ ID NO: 189913 - RNA, 1401 nt, Artificial Sequence
  derived and/or modified CDS sequence (opt4) from neuraminidase__InfluenzaB__AGX24495
augcugcccagcaccauccagacccugacccuguuccugaccagcggcggcgugcugcugagccuguacgugagcgccagccugagcuaccugcuguacagcgacauccugcugaaguucagccagaccgagaucaccgcccccaucaugccccuggacugcgccaacgccagcaacgugcagguggugaacagaagcgccgccaagggcgugacccugcugcugcccgagcccgaguggaccuaccccagacugagcugccccggcagcaccuuccagaaggcccugcugaucagcccccacagauucggcgagaccaagggcaacagcgccccccugaucaucagagagcccuucaucgccugcggccccaccgagugcaagcacuucgcccugacccacuacgccgcccagcccggcggcuacuacaacggcaccagagaggacagaaacaagcugagacaccugaucagcgugaagcugggcaagauccccaccguggagaacagcaucuuccacauggccgccuggagcggcagcgccugccacgacggcaaggaguggaccuacaucggcguggacggccccgacagcaacgcccugcugaagaucaaguacggcgaggccuacaccgacaccuaccacagcuacgccaagaacauccugagaacccaggagagcgccugcaacugcaucggcggcgacugcuaccugaugaucaccgacggccccgccagcggcaucagcgagugcagauuccugaagaucagagagggcagaaucaucaaggagaucuuccccaccggcagagugaagcacaccgaggagugcaccugcggcuucgccagcaacaagaccaucgagugcgccugcagagacaacagcuacaccgccaagagacccuucgugaagcugaacguggagaccgacaccgccgagaucagacugaugugcaccgagaccuaccuggacacccccagacccaacgacggcagcaucaccggccccugcgagagcgacggcgacaagggcagcggcggcaucaagggcggcuucgugcaccagagaauggccagcaagaucggcagaugguacagcagaaccaugagcaagaccagaagaaugggcaugggccuguacgugaaguacgacggcgaccccuggaccgacagcgaggcccuggcccugagcggcgugauggugagcauggaggagcccggcugguacagcuucggcuucgagaucaaggacaagaagugcgacgugcccugcaucggcaucgagauggugcacgacggcggcaagaccaccuggcacagcgccgccaccgccaucuacugccugaugggcagcggccagcugcugugggacaccgugaccggcguggacauggcccuguga

SEQ ID NO: 189914 - RNA, 1401 nt, Artificial Sequence; identical to SEQ ID NO: 189472
  derived and/or modified CDS sequence (opt4) from neuraminidase__InfluenzaB__AGX24506

SEQ ID NO: 189915 - RNA, 1401 nt, Artificial Sequence
  derived and/or modified CDS sequence (opt4) from neuraminidase__InfluenzaB__AGX24517
augcugcccagcaccauccagacccugacccuguuccugaccagcggcggcgugcugcugagccuguacgugagcgccagccugagcuaccugcuguacagcgacauccugcugaaguucagccagaccgagaucaccgcccccaucaugccccuggacugcgccaacgccagcaacgugcaggccgugaaccacagcgccgccaagggcgugacccugcugcugcccgagcccgaguggaccuaccccagacugagcugccccggcagcaccuuccagaaggcccugcugaucagcccccacagauucggcgagaccaagggcaacagcgccccccugaucaucagagagcccuucaucgccugcggccccaccgagugcaagcacuucgcccugacccacuacgccgcccagcccggcggcuacuacaacggcaccagagaggacagaaacaagcugagacaccugaucagcgugaagcugggcaagauccccaccguggagaacagcaucuuccacauggccgccuggagcggcagcgccugccacgacggcaaggaguggaccuacaucggcguggacggccccgacagcaacgcccugcugaagaucaaguacggcgaggccuacaccgacaccuaccacagcuacgccaagaacauccugagaacccaggagagcgccugcaacugcaucggcggcgacugcuaccugaugaucaccgacggccccgccagcggcgugagcgagugcagauuccugaagaucagagagggcagaaucaucaaggagaucuuccccaccggcagagugaagcacaccgaggagugcaccugcggcuucgccagcaacaagaccaucgagugcgccugcagagacaacagcuacaccgccaagagacccuucgugaagcugaacguggagaccgacaccgccgagaucagacugaugugcaccgagaccuaccuggacacccccagacccaacgacggcagcaucaccggccccugcgagagcgacggcgacaagggcagcggcggcaucaagggcggcuucgugcaccagagaauggccagcaagaucggcagaugguacagcagaaccaugagcaagaccaagagaaugggcaugggccuguacgugaaguacgacggcgaccccuggaccgacagcgaggcccuggcccugagcggcgugauggugagcauggaggagcccggcugguacagcuucggcuucgagaucaaggacaagaagugcgacgugcccugcaucggcaucgagauggugcacgacggcggcaagaccaccuggcacagcgccgccaccgccaucuacugccugaugggcagcggccagcugcugugggacaccgugaccggcguggacauggcccuguga

SEQ ID NO: 189916 - RNA, 1401 nt, Artificial Sequence; identical to SEQ ID NO: 189472
  derived and/or modified CDS sequence (opt4) from neuraminidase__InfluenzaB__AGX24528

SEQ ID NO: 189917 - RNA, 1401 nt, Artificial Sequence; identical to SEQ ID NO: 189900
  derived and/or modified CDS sequence (opt4) from neuraminidase__InfluenzaB__AGX24539

SEQ ID NO: 189918 - RNA, 1401 nt, Artificial Sequence
  derived and/or modified CDS sequence (opt4) from neuraminidase__InfluenzaB__AGX24550
augcugcccagcaccauccagacccugacccuguuccugaccagcggcggcgugcugcugagccuguacgugagcgccagccugagcuaccugcuguacagcgacauccugcugaaguucagccagaccgagaucaccgcccccaucaugccccuggacugcgccaacgccagcaacgugcaggccgugaacagaagcgccgccaagggcgugacccugcugauccccgagcccgaguggaccuaccccagacugagcugccccggcagcaccuuccagaaggcccugcugaucagcccccacagauucggcgagaccaagggcaacagcgccccccugaucaucagagagcccuucaucgccugcggccccaccgagugcaagcacuucgcccugacccacuacgccgcccagcccggcggcuacuacaacggcaccagagaggacagaaacaagcugagacaccugaucagcgugaagcugggcaagauccccaccguggagaacagcaucuuccacauggccgccuggagcggcagcgccugccacgacggcaaggaguggaccuacaucggcguggacggccccgacagcaacgcccugcugaagaucaaguacggcgaggccuacaccgacaccuaccacagcuacgccaagaacauccugagaacccaggagagcgccugcaacugcaucggcggcgacugcuaccugaugaucaccgacggccccgccagcggcaucagcgagugcagauuccugaagaucagagagggcagaaucaucaaggagaucuuccccaccggcagagugaagcacaccgaggagugcaccugcggcuucgccagcaacaagaccaucgagugcgccugcagagacaacagcuacaccgccaagagacccuucgugaagcugaacguggagaccgacaccgccgagaucagacugaugugcaccgagaccuaccuggacacccccagacccaacgacggcagcaucaccggccccugcgagagcgacggcgacaagggcagcggcggcaucaagggcggcuucgugcaccagagaauggccagcaagaucggcagaugguacagcagaaccaugagcaagaccaagagaaugggcaugggccuguacgugaaguacgacggcgaccccuggaccgacagcgaggcccuggcccugagcggcgugauggugagcauggaggagcccggcugguacagcuucggcuucgagaucaaggacaagaagugcgacgugcccugcaucggcaucgagauggugcacgacggcggcaagaccaccuggcacagcgccgccaccgccaucuacugccugaugggcagcggccagcugcugugggacaccgugaccggcguggacauggcccuguga

SEQ ID NO: 189919 - RNA, 1401 nt, Artificial Sequence; identical to SEQ ID NO: 189910
  derived and/or modified CDS sequence (opt4) from neuraminidase__InfluenzaB__AGX24561

SEQ ID NO: 189920 - RNA, 1401 nt, Artificial Sequence; identical to SEQ ID NO: 188877
  derived and/or modified CDS sequence (opt4) from neuraminidase__InfluenzaB__AGX24572

SEQ ID NO: 189921 - RNA, 1401 nt, Artificial Sequence
  derived and/or modified CDS sequence (opt4) from neuraminidase__InfluenzaB__AGX24583
augcugcccagcaccauccagacccugacccuguuccugaccagcggcggcgugcugcugagccuguacgugagcgccagccugagcuaccugcuguacagcgacauccugcugaaguucagccagaccgagaucaccgcccccaucaugccccuggacugcgccaacgccagcaacgugcaggccgugaacagaagcgccgccaagggcgugacccugcugcugcccgagcccgaguggaccuaccccagacugagcugccccggcagcaccuuccagaaggcccugcugaucagcccccacagauucggcgagaccaagggcaacagcgccccccugaucaucagagagcccuucaucgccugcggccccaccgagugcaagcacuucgcccugacccacuacgccgcccagcccggcggcuacuacaacggcaccagagaggacagaaacaagcugagacaccugaucagcgugaagcugggcaagauccccaccguggagaacagcaucuuccacauggccgccuggagcggcagcgccugccacgacggcaaggaguggaccuacaucggcguggacggccccgacagcaacgcccugcugaagaucaaguacggcgaggccuacaccgacaccuaccacagcuacgccaagaacauccugagaacccaggagagcgccugcaacugcaucggcggcgacugcuaccugaugaucaccgacggccccgccagcggcaucagcgagugcagauuccugaagaucagagagggcagaaucaucaaggagaucuuccccaccggcagagugaagcacaccgaggagugcaccugcggcuucgccagcaacaagaccaucgagugcgccugcagagacaacagcuacaccgccaagagacccuucgugaagcugaacguggagaccgacaccgccgagaucagacugaugugcaccgagaccuaccuggacacccccagacccaacgacggcagcaucaccggccccugcgagagcgacggcgacaagggcagcggcggcaucaagggcggcuucgugcaccagagaauggccagcaagaucggcagaugguacagcagaaccaugagcaagaccagaagaaugggcaugggccuguacgugaaguacgacggcgaccccuggaccgacagcggcgcccuggcccugagcggcgugauggugagcaucgaggagcccggcugguacagcuucggcuucgagaucaaggacaagaagugcgacgugcccugcaucggcaucgagauggugcacgacggcggcaagaccaccuggcacagcgccgccaccgccaucuacugccugaugggcagcggccagcugcugugggacaccgugaccggcguggacauggcccuguga

SEQ ID NO: 189922 - RNA, 1401 nt, Artificial Sequence; identical to SEQ ID NO: 189472
  derived and/or modified CDS sequence (opt4) from neuraminidase__InfluenzaB__AGX24594

SEQ ID NO: 189923 - RNA, 1401 nt, Artificial Sequence; identical to SEQ ID NO: 189472
  derived and/or modified CDS sequence (opt4) from neuraminidase__InfluenzaB__AGX24605

SEQ ID NO: 189924 - RNA, 1401 nt, Artificial Sequence; identical to SEQ ID NO: 189472
  derived and/or modified CDS sequence (opt4) from neuraminidase__InfluenzaB__AGX24616

SEQ ID NO: 189925 - RNA, 1401 nt, Artificial Sequence; identical to SEQ ID NO: 189896
  derived and/or modified CDS sequence (opt4) from neuraminidase__InfluenzaB__AGX24627

SEQ ID NO: 189926 - RNA, 1401 nt, Artificial Sequence; identical to SEQ ID NO: 189472
  derived and/or modified CDS sequence (opt4) from neuraminidase__InfluenzaB__AGX24638

SEQ ID NO: 189927 - RNA, 1401 nt, Artificial Sequence
  derived and/or modified CDS sequence (opt4) from neuraminidase__InfluenzaB__AGX24660
augcugcccagcaccauccagacccugacccuguuccugaccagcggcggcgugcugcugagccuguacgugagcgccagccugagcuaccugcuguacagcgacauccugcugaaguucagcagaaccgagaucaccgcccccaucaugccccuggacugcgccaacgccagcaacgugcaggccgugaacagaagcgccaccaagggcgugacccugcugcugcccgagcccgaguggaccuaccccagacugagcugccccggcagcaccuuccagaaggcccugcugaucagcccccacagauucggcgagaccaagggcaacagcgccccccugaucaucagagagcccuucaucgccugcggccccaaggagugcaagcacuucgcccugaccuacuacgccgcccagcccggcggcuacuacaacggcaccagagaggacagaaacaagcugagacaccugaucagcgugaagcugggcaagauccccaccguggagaacagcaucuuccacauggccgccuggagcggcagcgccugccacgacggcagagaguggaccuacaucggcguggacggccccgacagcaacgcccugcugaagaucaaguacggcgaggccuacaccgacaccuaccacagcuacgccaagaacauccugagaacccaggagagcgccugcaacugcaucggcggcgacugcuaccugaugaucaccgacggccccgccagcggcaucagcgagugcagauuccugaagaucagagagggcagaaucaucaaggagaucuuccccaccggcagagugaagcacaccgaggagugcaccugcggcuucgccagcaacaagaccaucgagugcgccugcagagacaacagcuacaccgccaagagacccuucgugaagcugaacguggagaccgacaccgccgagaucagacugaugugcaccgagaccuaccuggacacccccagacccaacgacggcagcaucaccggccccugcgagagcaacggcgacaagggcagcggcggcaucaagggcggcuucgugcaccagagaauggccagcaagaucggcagaugguacagcagaaccaugagcaagaccaagagaaugggcaugggccuguacgugaaguacgacggcgaccccuggaccgacagcgaggcccuggcccugagcggcgugauggugagcauggaggagcccggcugguacagcuucggcuucgagaucaaggacaagaagugcgacgugcccugcaucggcaucgagauggugcacgacggcggcaagaccaccuggcacagcgccgccaccgccaucuacugccugaugggcagcggccagcugcugugggacaccgugaccggcgugaacaugacccuguga

SEQ ID NO: 189928 - RNA, 1401 nt, Artificial Sequence
  derived and/or modified CDS sequence (opt4) from neuraminidase__InfluenzaB__AGX24671
augcugcccagcaccauccagacccugacccuguuccugaccagcggcggcgugcugcugcugcuguacgugagcgccagccugagcuaccugcuguacagcgacauccugcugaaguucagccagaccgagaucaccgcccccaucaugccccuggacugcgccaacgccagcaacgugcaggccgugaacagaagcgccgccaagggcgugacccugcugcugcccgagcccgaguggaccuaccccagacugagcugccccggcagcaccuuccagaaggcccugcugaucagcccccacagauucggcgagaccaagggcaacagcgccccccugaucaucagagagcccuucaucgccugcggccccaccgagugcaagcacuucgcccugacccacuacgccgcccagcccggcggcuacuacaacggcaccagagaggacagaaacaagcugagacaccugaucagcgugaagcugggcaagauccccaccguggagaacagcaucuuccacauggccgccuggagcggcagcgccugccacgacggcaaggaguggaccuacaucggcguggacggccccgacagcaacgcccugcugaagaucaaguacggcgaggccuacaccgacaccuaccacagcuacgccaagaacauccugagaacccaggagagcgccugcaacugcaucggcggcgacugcuaccugaugaucaccgacggccccgccagcggcaucagcgagugcagauuccugaagaucagagagggcagaaucaucaaggagaucuuccccaccggcagagugaagcacaccgaggagugcaccugcggcuucgccagcaacaagaccaucgagugcgccugcagagacaacagcuacaccgccaagagacccuucgugaagcugaacguggagaccgacaccgccgagaucagacugaugugcaccgagaccuaccuggacacccccagacccaacgacggcagcaucaccggccccugcgagagcgacggcgacaagggcagcggcggcaucaagggcggcuucgugcaccagagaauggccagcaagaucggcagaugguacagcagaaccaugagcaagaccaagagaaugggcaugggccuguacgugaaguacgacggcgaccccuggaccgacagcgaggcccuggcccugagcggcgugauggugagcauggaggagcccggcugguacagcuucggcuucgagaucaaggacaagaagugcgacauccccugcaucggcaucgagauggugcacgacggcggcaagaccaccuggcacagcgccgccaccgccaucuacugccugaugggcagcggccagcugcugugggacaccgugaccggcguggacauggcccuguga

SEQ ID NO: 189929 - RNA, 1401 nt, Artificial Sequence
  derived and/or modified CDS sequence (opt4) from neuraminidase__InfluenzaB__AGX24682
augcugcccagcaccauccagacccugacccuguuccugaccagcggcggcgugcugcugagccuguacgugagcgccagccugagcuaccugcuguacagcgacauccugcugaaguucagcagaaccgagaucaccgcccccaucaugccccuggacugcgccaacgccagcaacgugcaggccgugaacagaagcgccaccaagggcgugacccugcugcugcccgagcccgaguggaccuaccccagacugagcugccccggcagcaccuuccagaaggcccugcugaucagcccccacagauucggcgagaccaagggcaacagcgccccccugaucaucagagagcccuucaucgccugcggccccaaggagugcaagcacuucgcccugacccacuacgccgcccagcccggcggcuacuacaacggcaccagagaggacagaaacaagcugagacaccugaucagcgugaagcugggcaagauccccaccguggagaacagcaucuuccacauggccgccuggagcggcagcgccugccacgacggcagagaguggaccuacaucggcguggacggccccgacagcaacgcccugcugaagaucaaguacggcgaggccuacaccgacaccuaccacagcuacgccaagaacauccugagaacccaggagagcgccugcaacugcaucggcggcgacugcuaccugaugaucaccgacggccccgccagcggcaucagcgagugcagauuccugaagaucagagagggcagaaucaucaaggagaucuuccccaccggcagagugaagcacaccgaggagugcaccugcggcuucgccagcaacaagaccaucgagugcgccugcagagacaacagcuacaccgccaagagacccuucgugaagcugaacguggagaccgacaccgccgagaucagacugaugugcaccgagaccuaccuggacacccccagacccaacgacggcagcaucaccggccccugcgagagcaacggcgacaagggcagcggcggcaucaagggcggcuucgugcaccagagaauggccagcaagaucggcagaugguacagcagaaccaugagcaagaccaagagaaugggcaugggccuguacgugaaguacgacggcgaccccuggaccgacagcgaggcccuggugcugagcggcgugauggugagcauggaggagcccggcugguacagcuucggcuucgagaucaaggacaagaagugcgacgugcccugcaucggcaucgagauggugcacgacggcggcaagaccaccuggcacagcgccgccaccgccaucuacugccugaugggcagcggccagcugcugugggacaccgugaccggcgugaacaugacccuguga

SEQ ID NO: 189930 - RNA, 1401 nt, Artificial Sequence; identical to SEQ ID NO: 189472
  derived and/or modified CDS sequence (opt4) from neuraminidase__InfluenzaB__AGX24693

SEQ ID NO: 189931 - RNA, 1401 nt, Artificial Sequence; identical to SEQ ID NO: 189472
  derived and/or modified CDS sequence (opt4) from neuraminidase__InfluenzaB__AGX24704

SEQ ID NO: 189932 - RNA, 1401 nt, Artificial Sequence; identical to SEQ ID NO: 189472
  derived and/or modified CDS sequence (opt4) from neuraminidase__InfluenzaB__AGX24715

SEQ ID NO: 189933 - RNA, 1401 nt, Artificial Sequence
  derived and/or modified CDS sequence (opt4) from neuraminidase__InfluenzaB__AGX24737
augcugcccagcaccauccagacccugacccuguuccugaccagcggcggcgugcugcugagccuguacgugagcgccagccugagcuaccugcuguacagcgacauccugcugaaguucagccagaccgagaucaccgcccccaucaugccccuggacugcgccaacgccagcaacgugcaggccgugaacagaagcgccgccaagggcgugacccugcugcugcccgagcccgaguggaccuaccccagacugagcugccccggcagcaccuuccagaaggcccugcugaucagcccccacagauucggcgagaccaagggcaacagcgccccccugaucaucagagagcccuucaucgccugcggcaccaccgagugcaagcacuucgcccugacccacuacgccgcccagcccggcggcuacuacaacggcaccagagaggacagaaacaagcugagacaccugaucagcgugaagcugggcaagauccccaccguggagaacagcaucuuccacauggccgccuggagcggcagcgccugccacgacggcaaggaguggaccuacaucggcguggacggccccgacagcaacgcccugcugaagaucaaguacggcgaggccuacaccgacaccuaccacagcuacgccaagaacauccugagaacccaggagagcgccugcaacugcaucggcggcgacugcuaccugaugaucaccgacggccccgccagcggcaucagcgagugcagauuccugaagaucagagagggcagaaucaucaaggagaucuuccccaccggcagagugaagcacaccgaggagugcaccugcggcuucgccagcaacaagaccaucgagugcgccugcagagacaacagauacaccgccaagagacccuucgugaagcugaacguggagaccgacaccgccgagaucagacugaugugcaccgagaccuaccuggacacccccagacccaacgacggcagcaucaccggccccugcgagagcgacggcgacaagggcagcggcggcaucaagggcggcuucgugcaccagagaauggccagcaagaucggcagaugguacagcagaaccaugagcaagaccaagagaaugggcaugggccuguacgugaaguacgacggcgaccccuggaccgacagcggcgcccuggcccugagcggcgugauggugagcaucgaggagcccggcugguacagcuucggcuucgagaucaaggacaagaagugcgacgugcccugcaucggcaucgagauggugcacgacggcggcaagaccaccuggcacagcgccgccaccgccaucuacugccugaugggcagcggccagcugcugugggacaccgugaccggcguggacauggcccuguga

SEQ ID NO: 189934 - RNA, 1401 nt, Artificial Sequence
  derived and/or modified CDS sequence (opt4) from neuraminidase__InfluenzaB__AGX24748
augcugcccagcaccauccagacccugacccuguuccugaccagcggcggcgugcugcugagccuguacgugagcgccagccugagcuaccugcuguacagcgacauccugcugaaguucagccagaccgagaucaccgcccccaucaugccccuggacugcgccaacgccagcaacgugcaggccgugaacagaagcgccgccaagggcgugacccugcugcugcccgagcccgaguggaccuaccccagacugagcugccccggcagcaccuuccagaaggcccugcugaucagcccccacagauucggcgagaccaagggcaacagcgccccccugaucaucagagagcccuucaucgccugcggccccaccgagugcaagcacuucgcccugacccacuacgccgcccagcccggcagauacuacaacggcaccagagaggacagaaacaagcugagacaccugaucagcgugaagcugggcaagauccccaccguggagaacagcaucuuccacauggccgccuggagcggcagcgccugccacgacggcaaggaguggaccuacaucggcguggacggccccgacagcaacgcccugcugaagaucaaguacggcgaggccuacaccgacaccuaccacagcuacgccaagaacauccugagaacccaggagagcgccugcaacugcaucggcggcgacugcuaccugaugaucaccgacggccccgccagcggcaucagcgagugcagauuccugaagaucagagagggcagaaucaucaaggagaucuuccccaccggcagagugaagcacaccgaggagugcaccugcggcuucgccagcaacaagaccaucgagugcgccugcagagacaacagcuacaccgccaagagacccuucgugaagcugaacguggagaccgacaccgccgagaucagacugaugugcaccgagaccuaccuggacacccccagacccaacgacggcagcaucaccggccccugcgagagcgacggcgacaagggcagcggcggcaucaagggcggcuucgugcaccagagaauggccagcaagaucggcagaugguacagcagaaccaugagcaagaccaagagaaugggcaugggccuguacgugaaguacgacggcgaccccuggaccgacagcgaggcccuggcccugagcggcgugauggugagcauggaggagcccggcugguacagcuucggcuucgagaucaaggacaagaagugcgacgugcccugcaucggcaucgagauggugcacgacggcggcaagaccaccuggcacagcgccgccaccgccguguacugccugaugggcagcggccagcugcugugggacaccgugaccggcguggacauggcccuguga

SEQ ID NO: 189935 - RNA, 1401 nt, Artificial Sequence
  derived and/or modified CDS sequence (opt4) from neuraminidase__InfluenzaB__AGX24759
augcugcccagcaccauccagacccugacccuguuccugaccagcggcggcgugcugcugagccuguacgugagcgccagccugagcuaccugcuguacagcgacauccugcugaaguucagccagaccgagaucaccgcccccaucaugccccuggacugcgccaacgccagcaacgugcaggccgugaacagaagcgccgccaagggcgugacccugcugcugcccgagcccgaguggaccuaccccagacugagcugccccggcagcaccuuccagaaggcccugcugaucagcccccacagauucggcgagaccaagggcaacagcgccccccugaucaucagagagcccuucaucgccugcggccccaccgagugcaagcacuucgcccugacccacuacgccgcccagcccggcggcuacuacaacggcaccagagaggacagaaacaagcugagacaccugaucagcgugaagcugggcaagauccccaccguggagaacagcaucuuccacauggccgccuggagcggcagcgccugccacgacggcaaggaguggaccuacaucggcguggacggccccgacagcaacgcccugcugaagaucaaguacggcgaggccuacaccgacaccuaccacagcuacgccaagaacauccugagaacccaggagagcgccugcaacugcaucggcggcgacugcuaccugaugaucaccgacggccccgccagcggcaucagcgagugcagauuccugaagaucagagagggcagaaucaucaaggagaucuuccccaccggcagagugaagcacaccgaggagugcaccugcggcuucgccagcaacaagaccaucgagugcgccugcagagacaacagcuacaccgccaagagacccuucgugaagcugaacguggagaccgacaccgccgagaucagacugaugugcaccgagaccuaccuggacacccccagacccaacgacggcagcaucaccggccccugcgagagcgacggcgacaagggcagcggcggcaucaagggcggcuucgugcaccagagaauggccagcaagaucggcagaugguacagcagaaccaugagcaagaccaagagaaugggcaugggccuguacgugaaguacgacggcgaccccuggaccgacagcgaggcccuggcccugagcggcgugauggugagcauggaggagcccggcugguacagcuucggcuucgagaucaaggacaagaagugcgacauccccugcaucggcaucgagauggugcacgacggcggcaagaccaccuggcacagcgccgccaccgccaucuacugccugaugggcagcggccagcugcugugggacaccgugaccggcguggacauggcccuguga

SEQ ID NO: 189936 - RNA, 1401 nt, Artificial Sequence; identical to SEQ ID NO: 189472
  derived and/or modified CDS sequence (opt4) from neuraminidase__InfluenzaB__AGX24770

SEQ ID NO: 189937 - RNA, 1401 nt, Artificial Sequence; identical to SEQ ID NO: 189934
  derived and/or modified CDS sequence (opt4) from neuraminidase__InfluenzaB__AGX24781

SEQ ID NO: 189938 - RNA, 1401 nt, Artificial Sequence; identical to SEQ ID NO: 188848
  derived and/or modified CDS sequence (opt4) from neuraminidase__InfluenzaB__AGX24792

SEQ ID NO: 189939 - RNA, 1401 nt, Artificial Sequence; identical to SEQ ID NO: 189896
  derived and/or modified CDS sequence (opt4) from neuraminidase__InfluenzaB__AGX24803

SEQ ID NO: 189940 - RNA, 1401 nt, Artificial Sequence; identical to SEQ ID NO: 189472
  derived and/or modified CDS sequence (opt4) from neuraminidase__InfluenzaB__AGX24814

SEQ ID NO: 189941 - RNA, 1401 nt, Artificial Sequence
  derived and/or modified CDS sequence (opt4) from neuraminidase__InfluenzaB__AGX24825
augcugcccagcaccauccagacccugacccuguuccugaccagcggcggcgugcugcugagccuguacgugagcgccagccugagcuaccugcuguacagcgacauccugcugaaguucagccagaccgagaucaccgcccccaucaugccccuggacugcgccaacgccagcaacgugcaggccgugaacagaagcgccgccaagggcgugacccugcugcugcccgagcccgaguggaccuaccccagacugagcugccccggcagcaccuuccagaaggcccugcugaucagcccccacagauucggcgagaccaagggcaacagcgccccccugaucaucagagagcccuucaucgccugcggccccaccgagugcaagcacuucgcccugacccacuacgccgcccagcccggcgaguacuacaacggcaccagagaggacagaaacaagcugagacaccugaucagcgugaagcugggcaagauccccaccguggagaacagcaucuuccacauggccgccuggagcggcagcgccugccacgacggcaaggaguggaccuacaucggcguggacggccccgacagcaacgcccugcugaagaucaaguacggcgaggccuacaccgacaccuaccacagcuacgccaagaacauccugagaacccaggagagcgccugcaacugcaucggcggcgacugcuaccugaugaucaccgacggccccgccagcggcaucagcgagugcagauuccugaagaucagagagggcagaaucaucaaggagaucuuccccaccggcagagugaagcacaccgaggagugcaccugcggcuucgccagcaacaagaccaucgagugcgccugcagagacaacagcuacaccgccaagagacccuucgugaagcugaacguggagaccgacaccgccgagaucagacugaugugcaccgagaccuaccuggacacccccagacccaacgacggcagcaucaccggccccugcgagagcgacggcgacaagggcagcggcggcaucaagggcggcuucgugcaccagagaauggccagcaagaucggcagaugguacagcagaaccaugagcaagaccagaagaaugggcaugggccuguacgugaaguacgacggcgaccccuggaccgacagcgaggcccuggcccugagcggcgugauggugagcauggaggagcccggcugguacagcuucggcuucgagaucaaggacaagaagugcgacgugcccugcaucggcaucgagauggugcacgacggcggcaagaccaccuggcacagcgccgccaccgccaucuacugccugaugggcagcggccagcugcugugggacaccgugaccggcguggacauggcccuguga

SEQ ID NO: 189942 - RNA, 1401 nt, Artificial Sequence; identical to SEQ ID NO: 189472
  derived and/or modified CDS sequence (opt4) from neuraminidase__InfluenzaB__AGX24836

SEQ ID NO: 189943 - RNA, 1401 nt, Artificial Sequence
  derived and/or modified CDS sequence (opt4) from neuraminidase__InfluenzaB__AGX24847
augcugcccagcaccauccagacccugacccuguuccugaccagcggcggcgugcugcugagccuguacgugagcgccagccugagcuaccugcuguacagcgacauccugcugaaguucagcagaaccgagaucaccgcccccaucaugccccuggacugcgccaacgccagcaacgugcaggccgugaacagaagcgccaccaagggcgugacccugcugcugcccgagcccgaguggaccuaccccagacugagcugccccggcagcaccuuccagaaggcccugcugaucagcccccacagauucggcgagaccaagggcaacagcgccccccugaucaucagagagcccuucaucgccugcggccccaaggagugcaagcacuucgcccugacccacuacgccgcccagcccggcggcuacuacaacggcaccagagaggacagaaacaagcugagacaccugaucagcgugaagcugggcaagauccccaccguggagaacagcaucuuccacauggccgccuggagcggcagcgccugccacgacggcagagaguggaccuacaucggcguggacggccccgacagcaacgcccugcugaagaucaaguacggcgaggccuacaccgacaccuaccacagcuacgccaagaacauccugagaacccaggagagcgccugcaacugcaucggcggcgacugcuaccugaugaucaccgacggccccgccagcggcaucagcgagugcagauuccugaagaucagagagggcagaaucaucaaggagaucuuccccaccggcagagugaagcacaccgaggagugcaccugcggcuucgccagcaacaagaccaucgagugcgccugcagagacaacagcuacaccgccaagagacccuucgugaagcugaacguggagaccgacaccgccgagaucagacugaugugcaccgagaccuaccuggacacccccagacccaacgacggcagcaucaccggccccugcgagagcaacggcgacaagggcagcggcggcaucaagggcggcuucgugcaccagagaauggccagcaagaucggcagaugguacagcagaaccaugagcaagaccaagagaaugggcaugggccuguacgugaaguacgacggcgaccccuggaccgacagcgaggcccuggcccugagcggcgugauggugagcauggaggagcccggcugguacagcuucggcuucgagaucaaggacaagaagugcgacgugcccugcaucggcaucgagauggugcacgacggcggcaagaccaccuggcacagcgccgccaccgccguguacugccugaugggcagcggccagcugcugugggacaccgugaccggcgugaacaugacccuguga

SEQ ID NO: 189944 - RNA, 1401 nt, Artificial Sequence; identical to SEQ ID NO: 188956
  derived and/or modified CDS sequence (opt4) from neuraminidase__InfluenzaB__AGX24858

SEQ ID NO: 189945 - RNA, 1401 nt, Artificial Sequence
  derived and/or modified CDS sequence (opt4) from neuraminidase__InfluenzaB__AGX24869
augcugcccagcaccauccagacccugacccuguuccugaccagcggcggcgugcugcugagccuguacgugagcgccagccugagcuaccugcuguacagcgacauccugcugaaguucagcagaaccgagaugaccgcccccaucaugccccugggcugcgccaacgccagcaacgugcaggccgugaacagaagcgccaccaagggcgugacccugcugcugcccgagcccgaguggaccuaccccagacugagcugccccggcagcaccuuccagaaggcccugcugaucagcccccacagauucggcgagaccaagggcaacagcgccccccugaucaucagagagcccuucaucgccugcggccccaaggagugcaagcacuucgcccugacccacuacgccgcccagcccggcggcuacuacaacggcaccagagaggacagaaacaagcugagacaccugaucagcgugaagcugggcaagauccccaccguggagaacagcaucuuccacauggccgccuggagcggcagcgccugccacgacggcagagaguggaccuacaucggcguggacggccccgacagcaacgcccugcugaagaucaaguacggcgaggccuacaccgacaccuaccacagcuacgccaagaacauccugagaacccaggagagcgccugcaacugcaucggcggcgacugcuaccugaugaucaccgacggccccgccagcggcaucagcgagugcagauuccugaagaucagagagggcagaaucaucaaggagaucuuccccaccggcagagugaagcacaccgaggagugcaccugcggcuucgccagcaacaagaccaucgagugcgccugcagagacaacagcuacaccgccaagagacccuucgugaagcugaacguggagaccgacaccgccgagaucagacugaugugcaccgagaccuaccuggacacccccagacccaacgacggcagcaucaccggccccugcgagagcaacggcgacaagggcagcggcggcaucaagggcggcuucgugcaccagagaauggccagcaagaucggcagaugguacagcagaaccaugagcaagaccaagagaaugggcaugggccuguacgugaaguacgacggcgaccccuggaccgacagcgaggcccuggcccugagcggcgugauggugagcauggaggagcccggcugguacagcuucggcuucgagaucaaggacaagaagugcgacgugcccugcaucggcaucgagauggugcacgacggcggcaagaccaccuggcacagcgccgccaccgccaucuacugccugaugggcagcggccagcugcugugggacaccgugaccggcgugaacaugacccuguga

SEQ ID NO: 189946 - RNA, 1401 nt, Artificial Sequence
  derived and/or modified CDS sequence (opt4) from neuraminidase__InfluenzaB__AGX24880
augcugcccagcaccauccagaugcugacccuguuccugaccagcggcggcgugcugcugagccuguacgugagcgccagccugagcuaccugcuguacagcgacauccugcugaaguucagcagaaccgagaucaccgcccccaucaugccccuggacugcgccaacgccagcaacgugcaggccgugaacagaagcgccaccaagggcgugacccugcugcugcccgagcccgaguggaccuaccccagacugagcugccccggcagcaccuuccagaaggcccugcugaucagcccccacagauucggcgagaccaagggcaacagcgccccccugaucaucagagagcccuucaucgccugcggccccaaggagugcaagcacuucgcccugacccacuacgccgcccagcccggcggcuacuacaacggcaccagagaggacagaaacaagcugagacaccugaucagcgugaagcugggcaagauccccaccguggagaacagcaucuuccacauggccgccuggagcggcagcgccugccacgacggcagagaguggaccuacaucggcguggacggccccgacagcaacgcccugcugaagaucaaguacggcgaggccuacaccgacaccuaccacagcuacgccaagaacauccugagaacccaggagagcgccugcaacugcaucggcggcgacugcuaccugaugaucaccgacggccccgccagcggcaucagcgagugcagauuccugaagaucagagagggcagaaucaucaaggagaucuuccccaccggcagagugaagcacaccgaggagugcaccugcggcuucgccagcaacaagaccaucgagugcgccugcagagacaacagcuacaccgccaagagacccuucgugaagcugaacguggagaccgacaccgccgagaucagacugaugugcaccgagaccuaccuggacacccccagacccaacgacggcagcaucaccggccccugcgagagcaacggcgacaagggcagcggcggcaucaagggcggcuucgugcaccagagaauggccagcaagaucggcagaugguacagcagaaccaugagcaagaccaagagaaugggcaugggccuguacgugaaguacgacggcgaccccuggaccgacagcgaggcccuggcccugagcggcgugauggugagcauggaggagcccggcugguacagcuucggcuucgagaucaaggacaagaagugcgacgugcccugcaucggcaucgagauggugcacgacggcggcaagaccaccuggcacagcgccgccaccgccaucuacugccugaugggcagcggccagcugcugugggacaccgugaccggcgugaacaugacccuguga

SEQ ID NO: 189947 - RNA, 1401 nt, Artificial Sequence
  derived and/or modified CDS sequence (opt4) from neuraminidase__InfluenzaB__AGX24902
augcugcccagcaccauccagacccugacccuguuccugaccagcggcggcgugcugcugagccuguacgugagcgcccugcugagcuaccugcuguacagcgacauccugcugaaguucagcagaaccgagaucaccgcccccaucaugccccuggacugcgccaacgccagcaacgugcaggccgugaacagaagcgccaccaagggcgugacccugcugcugcccgagcccgaguggaccuaccccagacugagcugccccggcagcaccuuccagaaggcccugcugaucagcccccacagauucggcgagaacaagggcaacagcgccccccugaucaucagagagcccuucaucgccugcggccccaaggagugcaagcacuucgcccugacccacuacgccgcccagcccggcggcuacuacaacggcaccagagaggacagaaacaagcugagacaccugaucagcgugaagcugggcaagauccccaccguggagaacagcaucuuccacauggccgccuggagcggcagcgccugccacgacggcagagaguggaccuacaucggcguggacggccccgacagcaacgcccugcugaagaucaaguacggcgaggccuacaccgacaccuaccacagcuacgccaagaacauccugagaacccaggagagcgccugcaacugcaucggcggcgacugcuaccugaugaucaccgacggccccgccagcggcaucagcgagugcagauuccugaagaucagagagggcagaaucaucaaggagaucuuccccaccggcagagugaagcacaccgaggagugcaccugcggcuucgccagcaacaagaccaucgagugcgccugcagagacaacaacuacaccgccaagagacccuucgugaagcugaacguggagaccgacaccgccgagaucagacugaugugcaccgagaccuaccuggacacccccagacccaacgacggcagcaucaccggccccugcgagagcaacggcgacaagggcagcggcggcaucaagggcggcuucgugcaccagagaauggccagcaagaucggcagaugguacagcagaaccaugagcaagaccaagagaaugggcaugggccuguacgugaaguacgacggcgaccccuggaccgacagcgaggcccuggcccugagcggcgugauggugagcauggaggagcccggcugguacagcuucggcuucgagaucaaggacaagaagugcgacgugcccugcaucggcaucgagauggugcacgacggcggcaagaccaccuggcacagcgccgccaccgccaucuacugccugaugggcagcggccagcugcugugggacaccgugaccggcgugaacaugacccuguga

SEQ ID NO: 189948 - RNA, 1401 nt, Artificial Sequence; identical to SEQ ID NO: 188961
  derived and/or modified CDS sequence (opt4) from neuraminidase__InfluenzaB__AGX84846

SEQ ID NO: 189949 - RNA, 1401 nt, Artificial Sequence; identical to SEQ ID NO: 189016
  derived and/or modified CDS sequence (opt4) from neuraminidase__InfluenzaB__AGX84858

SEQ ID NO: 189950 - RNA, 1401 nt, Artificial Sequence; identical to SEQ ID NO: 188961
  derived and/or modified CDS sequence (opt4) from neuraminidase__InfluenzaB__AGX84869

SEQ ID NO: 189951 - RNA, 1401 nt, Artificial Sequence
  derived and/or modified CDS sequence (opt4) from neuraminidase__InfluenzaB__AGX84880
augcugcccagcaccauccagacccugacccuguuccugaccagcggcggcgugcugcugagccuguacgugagcgccagccugagcuaccugcuguacagcgacauccugcugaaguucagccccaccgagaucaccgcccccaccaugagccuggacugcgccaacgccagcaacgugcaggccgugaacagaagcgccaccaagggcgugaucuuccugcugcccgagcccgaguggaccuaccccagacugagcugccccggcagcaccuuccagaaggcccugcugaucagcccccacagauucggcgagaccaagggcaacagcgccccccugaucaucagagagcccuucaucgccugcggccccaacgagugcaagcacuucgcccugacccacuacgccgcccagcccggcggcuacuacaacggcaccagaggcgacagaaacaagcugagacaccugaucagcgugaagcugggcaagauccccaccguggagaacagcaucuuccacauggccgccuggagcggcagcgccugccacgacggcaaggaguggaccuacaucggcguggacggccccgacaacgacgcccugcugaaggugaaguacggcgaggccuacaccgacaccuaccacagcuacgccaacaagauccugagaacccaggagagcgccugcaacugcaucggcggcaacugcuaccugaugaucaccgacggcagcgccagcggcgugagcgagugcagauuccugaagaucagagagggcagaaucaucaaggagaucuuccccaccggcagagugaagcacaccgaggagugcaccugcggcuucgccagcaacaagaccaucgagugcgccugcagagacaacagcuacaccgccaagagacccuucgugaagcugaacguggagaccgacaccgccgagaucagacugaugugcaccgacaccuaccuggacacccccagacccgacgacggcagcaucaccggccccugcgagagcaacggcgacaagggcagcggcggcaucaagggcggcuucgugcaccagagaauggagagcaagaucggcagaugguacagcagaaccaugagcaagaccgagagaaugggcaugggccuguacgugaaguacgacggcgaccccugggccgacagcgacgcccuggccuucagcggcgugauggugagcaugaaggagcccggcugguacagcuucggcuucgagaucaaggacaagaagugcgacgugcccugcaucggcaucgagauggugcacgacggcggcaaggagaccuggcacagcgccgccaccgccaucuacugccugaugggcagcggccagcugcugugggacaccgugaccggcguggacauggcccuguga

SEQ ID NO: 189952 - RNA, 1401 nt, Artificial Sequence; identical to SEQ ID NO: 188961
  derived and/or modified CDS sequence (opt4) from neuraminidase__InfluenzaB__AGX84891

SEQ ID NO: 189953 - RNA, 1401 nt, Artificial Sequence; identical to SEQ ID NO: 189016
  derived and/or modified CDS sequence (opt4) from neuraminidase__InfluenzaB__AGX84902

SEQ ID NO: 189954 - RNA, 1401 nt, Artificial Sequence
  derived and/or modified CDS sequence (opt4) from neuraminidase__InfluenzaB__AGX84924
augcugcccagcaccauccagacccugacccuguuccugaccagcggcggcgugcugcugagccuguacgugagcgcccugcugagcuaccugcuguacagcgacauccugcugaaguucagccccaccgagaucaccgcccccaccaugagccuggacuacgccaacgccagcaacgugcaggccgugaacagaagcgccaccaagggcgugaccuuccugcugcccgagcccgaguggaccuaccccagacugagcugccccggcagcaccuuccagaaggcccugcugaucagcccccacagauucggcgagaccaagggcaacagcgccccccugaucaucagagagcccuucaucgccugcggccccaacgagugcaagcacuucgcccugacccacuacgccgcccagcccggcggcuacuacaacggcaccagaggcgacagaaacaagcugagacaccugaucagcgugaagcugggcaagauccccaccguggagaacagcaucuuccacauggccgccuggagcggcagcgccugccacgacggcaaggaguggaccuacaucggcguggacggccccgacaacgacgcccugcugaaggugaaguacggcgaggccuacaccgacaccuaccacagcuacgccaacaagauccugagaacccaggagagcgccugcaacugcaucggcggcaacugcuaccugaugaucaccgacggcagcgccagcggcgugagcgagugcagauuccugaagaucagagagggcagaaucaucaaggagaucuuccccaccggcagagugaagcacaccgaggagugcaccugcggcuucgccagcaacaagaccaucgagugcgccugcagagacaacagcuacaccgccaagagacccuucgugaagcugaacguggagaccgacaccgccgagaucagacugaugugcaccgacaccuaccuggacacccccagacccgacgacggcagcaucaccggccccugcgagagcaacggcgacaagggcagcggcggcaucaagggcggcuucgugcaccagagaauggagagcaagaucggcagaugguacagcagaaccaugagcaagaccgagagaaugggcaugggccuguacgugaaguacgacggcgaccccugggccgacagcgacgcccuggccuucagcggcgugauggugagcaugaaggagcccggcugguacagcuucggcuucgagaucaaggacaagaagugcgacgugcccugcaucggcaucgagauggugcacgacggcggcaaggagaccuggcacagcgccgccaccgccaucuacugccugaugggcagcggccagcugcugugggacaccgugaccggcguggacauggcccuguga

SEQ ID NO: 189955 - RNA, 1401 nt, Artificial Sequence
  derived and/or modified CDS sequence (opt4) from neuraminidase__InfluenzaB__AGY46393
augcugcccagcaccauccagacccugacccuguuccugaccagcggcggcgugcugcugagccuguacgugagcgccagccugagcuaccugcuguacagcgacauccugcugaaguuccccagcaccgagaucaccgcccccaccaugccccuggacugcgccaacgccaccaacgugcaggccgugaacagaagcgccaccaagggcgugacccugcugcugcccgagcccgaguggaccuaccccagacugagcugccccggcagcaccuuccagaaggcccugcugaucagcccccacagauucggcgagaucaagggcaacagcgccccccugaucaucagagagcccuucaucgccugcggccccaacgagugcaagcacuucgcccugacccacuacgccgcccagcccggcggcuacuacaacggcaccagagaggacagaaacaagcugagacaccugaucagcgugaagcugggcaagauccccaccguggagaacagcaucuuccacauggccgccuggagcggcagcgccugccacgacggcagagaguggaccuacaucggcguggacggccccgacagcaacgcccugcugaagaucaaguacggcgaggccuacaccgacaccuaccacagcuacgccaagaacauccugagaacccaggagagcgccugcaacugcaucggcggcgacugcuaccugaugaucaccgacggccccgccagcggcaucagcgagugcagauuccugaagaucagagagggcagaaucaucaaggagaucuuccccaccggcagagugaagcacaccgaggagugcaccugcggcuucgccagcaacaagaccaucgagugcgccugcagagacaacagcuacaccgccaagagacccuucgugaagcugaacguggagaccgacaccgccgagaucagacugaugugcaccgagaccuaccuggacacccccagacccaacgacggcagcaucaccggccccugcgagagcaacggcgacaagggcagcggcggcaucaagggcggcuucgugcaccagagaauggccagcaagaucggcagaugguacagcagaaccaugagcaagaccgagagaaugggcaugggccuguacgugaaguacgacggcgaccccugggccgacagcgacgcccuggccuucagcggcgugauggugagcauggaggagcccggcugguacagcuucggcuucgagaucaaggacaagaagugcgacgugcccugcaucggcaucgagauggugcacgacggcggcaaggagaccuggcacagcgccgccaccgccaucuacugccugaugggcagcggccagcugcugugggacaccgugaccggcgugaacauggcccuguga

SEQ ID NO: 189956 - RNA, 1401 nt, Artificial Sequence
  derived and/or modified CDS sequence (opt4) from neuraminidase__InfluenzaB__AGY46397
augcugcccagcaccauccagacccugacccuguuccugaccagcggcggcgugcugcugagccuguacgugagcgccagccugagcuaccugcuguacagcgacauccugcugaaguucagcagaaccgagaucaccgcccccaucaugccccuggacugcgccaacgccagcaacgugcaggccgugaacagaagcgccaccaagggcgugacccugcugcugcccgagcccgaguggaccuaccccagacugagcugccccggcagcaccuuccagaaggcccugcugaucagcccccacagauucggcgagaccaagggcaacagcgccccccugaucaucagagagcccuucaucgccugcggccccaacgagugcaagcacuucgcccugacccacuacgccgcccagcccggcggcuacuacaacggcaccagaggcgacagaaacaagcugagacaccugaucagcgugaagcugggcaagauccccaccguggagaacagcaucuuccacauggccgccuggagcggcagcgccugccacgacggcaaggaguggaccuacaucggcguggacggccccgacaacaacgcccugcugaaggugaaguacggcgaggccuacaccgacaccuaccacagcuacgccaacaagauccugagaacccaggagagcgccugcaacugcaucggcggcaacugcuaccugaugaucaccgacggcagcgccagcggcgugagcgagugcagauuccugaagaucagagagggcagaaucaucaaggagaucuuccccaccggcagagugaagcacaccgaggagugcaccugcggcuucgccagcaacaagaccaucgagugcgccugcagagacaacagcuacaccgccaagagacccuucgugaagcugaacguggagaccgacaccgccgagaucagacugaugugcaccgacaccuaccuggacacccccagacccaacgacggcagcaucaccggccccugcgagagcgacggcgacaagggcagcggcggcaucaagggcggcuucgugcaccagagaauggagagcaagaucggcagaugguacagcagaaccaugagcaagaccgagagaaugggcaugggccuguacgugaaguacgacggcgaccccugggccgacagcgacgcccuggccuucagcggcgugauggugagcaugaaggagcccggcugguacagcuucggcuucgagaucaaggacaagaagugcgacgugcccugcaucggcaucgagauggugcacgacggcggcaagaccaccuggcacagcgccgccaccgccaucuacugccugaugggcagcggccagcugcugugggacaccgugaccggcgugaacaugacccuguga

SEQ ID NO: 189957 - RNA, 1401 nt, Artificial Sequence
  derived and/or modified CDS sequence (opt4) from neuraminidase__InfluenzaB__AGY46399
augcugcccagcaccauccagacccugacccuguuccugaccagcggcggcgugcugcugagccuguacgugagcgccagccugagcuaccugcuguacagcgacauccugcugaaguucagccccaccgagaucaucgcccccaccaccccccuggacugcgccaacgccagcaacgugcaggccgugaacagaagcgccaccaagggcgugacccugcugcugcccgagcccgaguggaccuaccccagacugagcugccccggcagcaccuuccagaaggcccugcugaucagcccccacagauucggcgagaccaagggcaacagcgccccccugaucaucagagagcccuucaucgccugcggccccaaggagugcaagcacuucgcccugacccacuacgccgcccagcccggcggcuacuacaacggcaccagagaggacagaaacaagcugagacaccugaucagcgugaagcugggcaagauccccaccguggagaacagcaucuuccacauggccgccuggagcggcagcgccugccacgacggcagagaguggaccuacaucggcguggacggccccgacagcaacgcccugcugaagaucaaguacggcgaggccuacaccgacaccuaccacagcuacgccaagaacauccugagaacccaggagagcgccugcaacugcaucggcggcgacugcuaccugaugaucaccgacggccccgccagcggcaucagcgagugcagauuccugaagaucagagagggcagaaucaucaaggagaucuuccccaccggcagagugaagcacaccgaggagugcaccugcggcuucgccagcaacaagaccaucgagugcgccugcagagacaacagcuacaccgccaagagacccuucgugaagcugaacguggagaccgacaccgccgagaucagacugaugugcaccgagaccuaccuggacacccccagacccaacgacggcagcaucaccggccccugcgagagcaacggcgacaagggcagcggcggcaucaagggcggcuucgugcaccagagaauggccagcaagaucggcagaugguacagcagaaccaugagcaagaccaagagaaugggcaugggccuguacgugaaguacgacggcgaccccugggccgacagcgaggcccuggcccugagcggcgugauggugagcauggaggagcccggcugguacagcuucggcuucgagaucaaggacaagaagugcgacgugcccugcaucggcaucgagauggugcacgacggcggcaaggagaccuggcacagcgccgccaccgccaucuacugccugaugggcagcggccagcugcugugggacaccgugaccggcguggacauggcccuguga

SEQ ID NO: 189958 - RNA, 1401 nt, Artificial Sequence
  derived and/or modified CDS sequence (opt4) from neuraminidase__InfluenzaB__AGY46401
augcugcccagcaccauccagacccugacccuguuccugaccagcggcggcgugcugcugagccuguacgugagcgccagccugagcuaccugcuguacagcgacauccugcugaaguucagccccaccgagaucaccgcccccaccaugccccuggacugcgccaacgccagcaacgugcaggccgugaacagaagcgccaccaagggcgugacccugcugcugcccgagcccgaguggaccuaccccagacugagcugccccggcagcaccuuccagaaggcccugcugaucagcccccacagauucggcgagaccaagggcaacagcgccccccugaucaucagagagcccuucaucgccugcggccccaaggagugcaagcacuucgcccugacccacuacgccgcccagcccggcggcuacuacaacggcaccagagaggacagaaacaagcugagacaccugaucagcgugaagcugggcaagauccccaccguggagaacagcaucuuccacauggccgccuggagcggcagcgccugccacgacggcagagaguggaccuacaucggcguggacggccccgacagcaacgcccugcugaagaucaaguacggcgaggccuacaccgacaccuaccacagcuacgccaagaacauccugagaacccaggagagcgccugcaacugcaucggcggcgacugcuaccugaugaucaccgacggccccgccagcggcaucagcgagugcagauuccugaagaucagagagggcagaaucaucaaggagaucuuccccaccggcagagugaagcacaccgaggagugcaccugcggcuucgccagcaacaagaccaucgagugcgccugcagagacaacagcuacaccgccaagagacccuucgugaagcugaacguggagaccgacaccgccgagaucagacugaugugcaccgagaccuaccuggacacccccagacccaacgacggcagcaucaccggccccugcgagagcaacggcgacaagggcagcggcggcaucaagggcggcuucgugcaccagagaauggccagcaagaucggcagaugguacagcagaaccaugagcaagaccaagagaaugggcaugggccuguacgugaaguacgacggcgaccccugggccgacagcgacgcccuggccuucagcggcgugauggugagcaugaaggagcccggcugguacagcuucggcuucgagaucaaggacaagaagugcgacgugcccugcaucggcaucgagauggugcacgacggcggcaaggagaccuggcacagcgccgccaccgccaucuacugccugaugggcagcggccagcugcugugggacaccgugaccggcguggacauggcccuguga

SEQ ID NO: 189959 - RNA, 1401 nt, Artificial Sequence; identical to SEQ ID NO: 188676
  derived and/or modified CDS sequence (opt4) from neuraminidase__InfluenzaB__AGZ59825

SEQ ID NO: 189960 - RNA, 1401 nt, Artificial Sequence; identical to SEQ ID NO: 188742
  derived and/or modified CDS sequence (opt4) from neuraminidase__InfluenzaB__AGZ59836

SEQ ID NO: 189961 - RNA, 1401 nt, Artificial Sequence; identical to SEQ ID NO: 189431
  derived and/or modified CDS sequence (opt4) from neuraminidase__InfluenzaB__AGZ59847

SEQ ID NO: 189962 - RNA, 1401 nt, Artificial Sequence
  derived and/or modified CDS sequence (opt4) from neuraminidase__InfluenzaB__AGZ59858
augcugcccagcaccauccagacccugacccuguuccugaccagcggcggcgugcugcugagccuguacgugagcgccagccugagcuaccugcuguacagcgacauccugcugaaguucagccccaccgagaucaccgcccccaccaugccccuggacugcgccaacgccagcaacgugcacgccgugaacagaagcgccaccaagggcgugacccugcugcugcccgagcccgaguggaccuaccccagacugagcugccccggcagcaccuuccagaaggcccugcugaucagcccccacagauucggcgagaccaagggcaacagcgccccccugaucaucagagagcccuucaucgccugcggccccaacgagugcaagcacuucgcccugacccacuacgccgcccagcccggcggcuacuacaacggcaagagaggcgacagaaacaagcugagacaccugaucagcgugaagcugggcaagauccccaccguggagaacagcaucuuccacauggccgccuggagcggcagcgccugccacgacggcaaggaguggaccuacaucggcguggacggccccgacaacaacgcccugcugaagaucaaguacggcgaggccuacaccgacaccuaccacagcuacgccaacaacauccugagaacccaggagagcgccugcaacugcaucggcggcaacugcuaccugaugaucaccgacggcagcgccagcggcgugagcgagugcagauuccugaagaucagagagggcagaaucaucaaggagaucuuccccaccggcagagugaagcacaccgaggagugcaccugcggcuucgccagcaacaagaccaucgagugcgccugcagagacaacagcuacaccgccaagagacccuucgugaagcugaacguggagaccgacaccgccgagaucagacugaugugcaccgacaccuaccuggacacccccagacccgacgacggcagcaucaccggccccugcgagagcaacggcgacaagggcagcggcggcaucaagggcggcuucgugcaccagagaauggccagcaagaucggcagaugguacagcagaaccaugagcaagaccgagagaaugggcaugggccuguacgugaaguacgacggcgaccccugggccgacagcgacgcccuggccuucagcggcgugauggugagcaugaaggagcccggcugguacagcuucggcuucgagaucaaggacaagaagugcgacgugcccugcaucggcaucgagauggugcacgacggcggcaaggagaccuggcacagcgccgccaccgccaucuacugccugaugggcagcggccagcugcugugggacaccgugaccggcguggacauggcccuguga

SEQ ID NO: 189963 - RNA, 1401 nt, Artificial Sequence
  derived and/or modified CDS sequence (opt4) from neuraminidase__InfluenzaB__AGZ59869
augcugcccagcaccauccagacccugacccuguuccugaccagcggcggcgugcugcugagccuguacgugagcgccagccugagcuaccugcuguacagcgacauccugcugaaguucagccccaccgagaucaccgcccccaccaugccccuggacugcgccaacgccagcaacgugcaggccgugaacagaagcgccaccaagggcgugacccugcugcugcccgagcccgaguggaccuaccccagacugagcugccccggcagcaccuuccagaaggccgugcugaucagcccccacagauucggcgagaccaagggcaacagcgccccccugaucaucagagagcccuucaucgccugcggccccaacgagugcaagcacuucgcccugacccacuacgccgcccagcccggcggcuacuacaacggcaccagaggcgacagaaacaagcugagacaccugaucagcgugaagcugggcaagauccccaccguggagaacagcaucuuccacauggccgccuggagcggcagcgccugccacgacggcaaggaguggaccuacaucggcguggacggccccgacaacaacgcccugcugaagaucaaguacggcgaggccuacaccgacaccuaccacagcuacgccaacaagauccugagaacccaggagagcgccugcaacugcaucggcggcaacugcuaccugaugaucaccgacggcagcgccagcggcgugagcgagugcagauuccugaagaucagagagggcagaaucaucaaggagaucuuccccaccggcagagugaagcacaccgaggagugcaccugcggcuucgccagcaacaagaccaucgagugcgccugcagagacaacagcuacaccgccaagagacccuucgugaagcugaacguggagaccgacaccgccgagaucagacugaugugcaccgacaccuaccuggacacccccagacccgacgacggcagcaucaccggccccugcgagagcaacggcgacaagggcagcggcggcaucaagggcggcuucgugcaccagagaauggccagcaagaucggcagaugguacagcagaaccaugagcaagaccgagagaaugggcaugggccuguacgugaaguacgacggcgaccccugggccgacagcgacgcccuggccuucagcggcgugauggugagcaugaaggagcccggcugguacagcuucggcuucgagaucaaggacaagaagugcgacgugcccugcaucggcaucgagauggugcacgacggcggcaaggagaccuggcacagcgccgccaccgccaucuacugccugaugggcagcggccagcugcugugggacaccgugaccggcguggacauggcccuguga

SEQ ID NO: 189964 - RNA, 1401 nt, Artificial Sequence; identical to SEQ ID NO: 189460
  derived and/or modified CDS sequence (opt4) from neuraminidase__InfluenzaB__AGZ59880

SEQ ID NO: 189965 - RNA, 1401 nt, Artificial Sequence; identical to SEQ ID NO: 189904
  derived and/or modified CDS sequence (opt4) from neuraminidase__InfluenzaB__AGZ59891

SEQ ID NO: 189966 - RNA, 1401 nt, Artificial Sequence; identical to SEQ ID NO: 189021
  derived and/or modified CDS sequence (opt4) from neuraminidase__InfluenzaB__AGZ59902

SEQ ID NO: 189967 - RNA, 1401 nt, Artificial Sequence; identical to SEQ ID NO: 189021
  derived and/or modified CDS sequence (opt4) from neuraminidase__InfluenzaB__AGZ59913

SEQ ID NO: 189968 - RNA, 1401 nt, Artificial Sequence; identical to SEQ ID NO: 189021
  derived and/or modified CDS sequence (opt4) from neuraminidase__InfluenzaB__AGZ59924

SEQ ID NO: 189969 - RNA, 1401 nt, Artificial Sequence; identical to SEQ ID NO: 189021
  derived and/or modified CDS sequence (opt4) from neuraminidase__InfluenzaB__AGZ59935

SEQ ID NO: 189970 - RNA, 1401 nt, Artificial Sequence; identical to SEQ ID NO: 189021
  derived and/or modified CDS sequence (opt4) from neuraminidase__InfluenzaB__AGZ59946

SEQ ID NO: 189971 - RNA, 1401 nt, Artificial Sequence
  derived and/or modified CDS sequence (opt4) from neuraminidase__InfluenzaB__AGZ59957
augcugcccagcaccauccagacccugacccuguuccugaccagcggcggcgugcugcugagccuguacgugagcgccagccugagcuaccugcuguacagcgacauccugcugaaguucagccccaccgagaucaccgcccccaccaugccccuggacugcgccaacgccagcaacgugcaggccgugaacagaagcgccaccaagggcgugacccugcugcugcccgagcccgaguggaccuaccccagacugagcugccccggcagcaccuuccagaaggcccugcugaucagcccccacagauucggcgagaccaagggcaacagcgccccccugaucaucagagagcccuucaucgccugcggccccaacgagugcaagcacuucgcccugacccacuacgccgcccagcccggcggcuacuacaacggcaccagaggcgacagaaacaagcugagacaccugaucagcgugaagcugggcaagauccccaccguggagaacagcaucuuccacauggccgccuggagcggcagcgccugccacgacggcaaggaguggaccuacaucggcguggacggccccgacaacaacgcccugcugaaggugaaguacggcgaggccuacaccgacaccuaccacagcuacgccaacaagauccugagaacccaggagagcgccugcaacugcaucggcggcaacugcuaccugaugaucaccgacggcagcgccagcggcgugagcgagugcagauuccugaagaucagagagggcagaaucaucaaggagaucuuccccaccggcagagugaagcacaccgaggagugcaccugcggcuucgccagcaacaagaccaucgagugcgccugcagagacaacagcuacaccgccaagagacccuucgugaagcugaacguggagaccgacaccgccgagaucagacugaugugcaccgacaccuaccuggacacccccagacccaacgacggcagcaucaccggccccugcgagagcaacggcgacaagggcagcggcggcaucaagggcggcuucgugcaccagagaauggagagcaagaucggcagaugguacagcagaaccaugagcaagaccgagagaaugggcaugggccuguacgugaaguacgacggcgaccccugggccgacagcgacgcccuggccuucagcggcgugauggugagcaugaaggagcccggcugguacagcuucggcuucgagaucaaggacaagaagugcgacgugcccugcaucggcaucgagauggugcacgacggcggcaagggcaccuggcacagcgccgccaccgccaucuacugccugaugggcagcggccagcugcugugggacaccgugaccggcguggacauggcccuguga

SEQ ID NO: 189972 - RNA, 1401 nt, Artificial Sequence; identical to SEQ ID NO: 189021
  derived and/or modified CDS sequence (opt4) from neuraminidase__InfluenzaB__AGZ59969

SEQ ID NO: 189973 - RNA, 1401 nt, Artificial Sequence; identical to SEQ ID NO: 189021
  derived and/or modified CDS sequence (opt4) from neuraminidase__InfluenzaB__AGZ59980

SEQ ID NO: 189974 - RNA, 1401 nt, Artificial Sequence; identical to SEQ ID NO: 189021
  derived and/or modified CDS sequence (opt4) from neuraminidase__InfluenzaB__AGZ59991

SEQ ID NO: 189975 - RNA, 1401 nt, Artificial Sequence; identical to SEQ ID NO: 189021
  derived and/or modified CDS sequence (opt4) from neuraminidase__InfluenzaB__AGZ60003

SEQ ID NO: 189976 - RNA, 1401 nt, Artificial Sequence
  derived and/or modified CDS sequence (opt4) from neuraminidase__InfluenzaB__AGZ60014
augcugcccagcaccauccagacccugacccuguuccugaccagcggcggcgugcugcugagccuguacgugagcgcccugcugagcuaccugcuguacagcgacauccugcugaaguucagccccaccgagaucaccgcccccaccaugagccuggacugcgccaacgccagcaacgugcaggccgugaacagaagcgccaccaagggcgugaccuuccugcugcccgagcccgaguggaccuaccccagacugagcugccccggcagcaccuuccagagagcccugcugaucagcccccacagauucggcgaggccaagggcaacagcgccccccugaucaucagagagcccuucaucgccugcggccccaacgagugcaagcacuucgcccugacccacuacgccgcccagcccggcggcuacuacaacggcaccagaggcgacagaaacaagcugagacaccugaucagcgugaagcugggcaagauccccaccguggagaacagcaucuuccacauggccgccuggagcggcagcgccugccacgacggcaaggaguggaccuacaucggcguggacggccccgacaacgacgcccugcugaaggugaaguacggcgaggccuacaccgacaccuaccacagcuacgccaacaagauccugagaacccaggagagcgccugcaacugcaucggcggcaacugcuaccugaugaucaccgacggcagcgccagcggcgugagcgagugcagauuccugaagaucagagagggccagaucaucaaggagaucuuccccaccggcagagugaagcacaccgaggagugcaccugcggcuucgccagcaacaagaccaucgagugcgccugcagagacaacagcuacaccgccaagagacccuucgugaagcugaacguggagaccgacaccgccgagaucagacugaugugcaccgacaccuaccuggacacccccagacccgacgacggcagcaucaccggccccugcgagagcaacggcgacaagggcagcggcggcaucaagggcggcuucgugcaccagagaauggagagcaagaucggcagaugguacagcagaaccaugagcaagaccgagagaaugggcaugggccuguacgugaaguacgacggcgaccccugggccgacagcgacgcccuggccuucagcggcgugauggugagcaugaaggagcccggcugguacagcuucggcuucgagaucaaggacaagaagugcgacgugcccugcaucggcaucgagauggugcacgacggcggcaaggagaccuggcacagcgccgccaccgccaucuacugccugaugggcagcggccagcugcugugggacaccgugaccggcguggacauggcccuguga

SEQ ID NO: 189977 - RNA, 1401 nt, Artificial Sequence; identical to SEQ ID NO: 188955
  derived and/or modified CDS sequence (opt4) from neuraminidase__InfluenzaB__AGZ60025

SEQ ID NO: 189978 - RNA, 1401 nt, Artificial Sequence
  derived and/or modified CDS sequence (opt4) from neuraminidase__InfluenzaB__AGZ60037
augcugcccagcaccauccagacccugacccuguuccugaccagcggcggcgugcugcugagccuguacgugagcgcccugcugagcuaccugcuguacagcgacauccugcugaaguucagccccaccgagaucaccgcccccaccaugagccuggacugcgccaacgccagcaacgugcaggccgugaacagaagcgccaccaagggcgugaccuuccugcugcccgagcccgaguggaccuaccccagacugagcugccccggcagcaccuuccagaaggcccugcugaucagcccccacagauucggcgagaccaagggcaacagcgccccccugaucaucagagagcccuucaucgccugcggccccaacgagugcaagcacuucgcccugacccacuacgccgcccagcccggcggcuacuacaacggcaccagaggcgacagaaacaagcugagacaccugaucagcgugaagcugggcaagauccccaccguggagaacagcaucuuccacauggccgccuggagcggcagcgccugccacgacggcaaggaguggaccuacaucggcguggacggccccgacaacgacgcccugcugaaggugaaguacggcgaggccuacaccgacaccuaccacagcuacgccaacaagauccugagaacccaggagagcgccugcaacugcaucggcggcaacugcuaccugaugaucaccgacggcagcgccagcggcgugagcgagugcagauuccugaagaucagagagggcagaaucaucaaggagaucuuccccaccggcagagugaagcacaccgaggagugcaccugcggcuucgccagcaacaagaccaucgagugcgccugcagagacaacagcuacaccgccaagagacccuucgugaagcugaacguggagaccgacaccgccgagaucagacugaugugcaccgacaccuaccuggacacccccagacccgacgacggcagcaucaccggccccugcgagagcaacggcgacaagggcagcggcggcaucaagggcggcuucgugcaccagagaauggagagcaagaucggcagaugguacagcagaaccaugagcaagaccgagagaaugggcaugggccuguacgugaaguacgacggcgaccccugggccgagagcgacgcccuggccuucagcggcgugauggugagcaugaaggagcccggcugguacagcuucggcuucgagaucaaggacaagaagugcgacgugcccugcaucggcaucgagauggugcacgacggcggcaaggagaccuggcacagcgccgccaccgccaucuacugccugaugggcagcggccagcugcugugggacaccgugaccggcguggacaucgcccuguga

SEQ ID NO: 189979 - RNA, 1401 nt, Artificial Sequence; identical to SEQ ID NO: 189191
  derived and/or modified CDS sequence (opt4) from neuraminidase__InfluenzaB__AGZ60048

SEQ ID NO: 189980 - RNA, 1401 nt, Artificial Sequence; identical to SEQ ID NO: 189191
  derived and/or modified CDS sequence (opt4) from neuraminidase__InfluenzaB__AGZ60059

SEQ ID NO: 189981 - RNA, 1401 nt, Artificial Sequence
  derived and/or modified CDS sequence (opt4) from neuraminidase__InfluenzaB__AGZ60070
augcugcccagcaccauccagacccugacccuguuccugaccagcggcggcgugcugcugagccuguacgugagcgccagccugagcuaccugcuguacagcgacauccugcugaaguucagcaccaccgagaucaccgcccccaccaugccccuggacugcgccaacgccagcaacgugcaggccgugaaccacagcgccgccaagggcgugacccugcugcugcccgagcccgaguggaccuaccccagacugagcugccccggcagcaccuuccagaaggcccugcugaucagcccccacagauucggcgagaccaagggcaacagcgccccccugaucaucagagagcccuucaucgccugcggccccaaggagugcaagcacuucgcccugacccacuacgccgcccagcccggcggcuacuacaacggcaccagagaggacagaaacaagcugagacaccugaucagcgugaagcugggcaagauccccaccguggagaacagcaucuuccacauggccgccuggagcggcagcgccugccacgacggcaaggaguggaccuacaucggcguggacggccccgacagcaacgcccugcugaagaucaaguacggcgaggccuacaccgacaccuaccacagcuacgcccacaacauccugagaacccaggagagcgccugcaacugcaucggcggcaacugcuaccugaugaucaccgacggcagcgccagcggcaucagcgagugcagauuccugaagaucagagagggcagaaucaucaaggagaucuuccccaccggcagagugaagcacaccgaggagugcaccugcggcuucgccaacaacaagaccaucgagugcgccugcagagacaacagcuacaccgccaagagacccuucgugaagcugaacguggagaccgacaccgccgagaucagacugaugugcaccgagaccuaccuggacacccccagacccgacgacggcagcaucaccggccccugcgagagcaacggcaacaagggcagcggcggcaucaagggcggcuucgugcaccagagaauggccagcaagaucggcagaugguacagcagaaccaugagcaagaccaagagaaugggcaugggccuguacgugaaguacgacggcgaccccuggaccgacagcgacgcccugguguucagcggcgugaugaucagcguggaggagcccggcugguacagcuucggcuucgagaucaaggacaagaagugcgacgugcccugcaucggcaucgagauggugcacgacggcggcaaggagaccuggcacagcgccgccaccgccaucuacugccugaugggcagcggccagcugcugugggacaccgugaccggcgugaacaugacccuguga

SEQ ID NO: 189982 - RNA, 1401 nt, Artificial Sequence; identical to SEQ ID NO: 188687
  derived and/or modified CDS sequence (opt4) from neuraminidase__InfluenzaB__AGZ60081

SEQ ID NO: 189983 - RNA, 1401 nt, Artificial Sequence; identical to SEQ ID NO: 189207
  derived and/or modified CDS sequence (opt4) from neuraminidase__InfluenzaB__AGZ60092

SEQ ID NO: 189984 - RNA, 1401 nt, Artificial Sequence; identical to SEQ ID NO: 189830
  derived and/or modified CDS sequence (opt4) from neuraminidase__InfluenzaB__AGZ60103

SEQ ID NO: 189985 - RNA, 1401 nt, Artificial Sequence; identical to SEQ ID NO: 188848
  derived and/or modified CDS sequence (opt4) from neuraminidase__InfluenzaB__AGZ60135

SEQ ID NO: 189986 - RNA, 1401 nt, Artificial Sequence; identical to SEQ ID NO: 189020
  derived and/or modified CDS sequence (opt4) from neuraminidase__InfluenzaB__AGZ60154

SEQ ID NO: 189987 - RNA, 1401 nt, Artificial Sequence
  derived and/or modified CDS sequence (opt4) from neuraminidase__InfluenzaB__AGZ60164
augcugcccagcaccacccagacccugacccuguuccugaccagcggcggcgugcugcugagccuguacgugagcgccagccugagcuaccugcuguacagcgacauccugcugaaguucagccagaccgagaucaccgcccccaucaugccccuggacugcgccaacgccagcaacgugcaggccgugaacagaagcgccgccaagggcgugacccugcugcugcccgagcccgaguggaccuaccccagacugagcugccccggcagcaccuuccagaaggcccugcugaucaacccccacagauucggcgagaccaagggcaacagcgccccccugaucaucagagagcccuucaucgccugcggccccaccgagugcaagcacuucgcccugacccacuacgccgcccagcccggcggcuacuacaacggcaccagagaggacagaaacaagcugagacaccugaucagcgugaagcugggcaagauccccaccguggagaacagcaucuuccacauggccgccuggagcggcagcgccugccacgacggcaaggaguggaccuacaucggcguggacggccccgacagcaacgcccugcugaagaucaaguacggcgaggccuacaccgacaccuaccacagcuacgccaagaacauccugagaacccaggagagcgccugcaacugcaucggcggcgacugcuaccugaugaucaccgacggccccgccagcggcaucagcgagugcagauuccugaagaucagagagggcagaaucaucaaggagaucuuccccaccggcagagugaagcacaccgaggagugcaccugcggcuucgccagcaacaagaccaucgagugcgccugcagagacaacagcuacaccgccaagagacccuucgugaagcugaacguggagaccgacaccgccgagaucagacugaugugcaccgagaccuaccuggacacccccagacccaacgacggcagcaucaccggccccugcgagagcgacggcgacaagggcagcggcggcaucaagggcggcuucgugcaccagagaauggccagcaagaucggcagaugguacagcagaaccaugagcaagaccaagagaaugggcaugggccuguacgugaaguacgacggcgaccccuggaccgacagcgaggcccuggcccugagcggcgugauggugagcauggaggagcccggcugguacagcuucggcuucgagaucaaggacaagaagugcgacgugcccugcaucggcaucgagauggugcacgacggcggcaagaccaccuggcacagcgccgccaccgccaucuacugccugaugggcagcggccagcugcugugggacaccgugaccggcguggacauggcccuguga

SEQ ID NO: 189988 - RNA, 1401 nt, Artificial Sequence; identical to SEQ ID NO: 189900
  derived and/or modified CDS sequence (opt4) from neuraminidase__InfluenzaB__AGZ60176

SEQ ID NO: 189989 - RNA, 1401 nt, Artificial Sequence; identical to SEQ ID NO: 188877
  derived and/or modified CDS sequence (opt4) from neuraminidase__InfluenzaB__AGZ60187

SEQ ID NO: 189990 - RNA, 1401 nt, Artificial Sequence; identical to SEQ ID NO: 188877
  derived and/or modified CDS sequence (opt4) from neuraminidase__InfluenzaB__AGZ60198

SEQ ID NO: 189991 - RNA, 1401 nt, Artificial Sequence; identical to SEQ ID NO: 188877
  derived and/or modified CDS sequence (opt4) from neuraminidase__InfluenzaB__AGZ60210

SEQ ID NO: 189992 - RNA, 1401 nt, Artificial Sequence
  derived and/or modified CDS sequence (opt4) from neuraminidase__InfluenzaB__AGZ60221
augcugcccaccaccauccagacccugacccuguuccugaccagcggcggcgugcugcugagccuguacgugagcgccagccugagcuaccugcuguacagcgacauccugcugaaguucagcagaaccgagaucaccgcccccaucaugccccuggacugcgccaacgccagcaacgugcaggccgugaacagaagcgccaccaagggcgugacccugcugcugcccgagcccgaguggaccuaccccagacugagcugccccggcagcaccuuccagaaggcccugcugaucagcccccacagauucggcgagaccaagggcaacagcgccccccugaucaucagagagcccuucaucgccugcggccccaaggagugcaagcacuucgcccugacccacuacgccgcccagcccggcggcuacuacaacggcaccagagaggacagaaacaagcugagacaccugaucagcgugaagcugggcaagauccccaccguggagaacagcaucuuccacauggccgccuggagcggcagcgccugccacgacggcagagaguggaccuacaucggcguggacggccccgacagcaacgcccugcugaagaucaaguacggcgaggccuacaccgacaccuaccacagcuacgccaagaacauccugagaacccaggagagcgccugcaacugcaucggcggcgacugcuaccugaugaucaccgacggccccgccagcggcaucagcgagugcagauuccugaagaucagagagggcagaaucaucaaggagaucuuccccaccggcagagugaagcacaccgaggagugcaccugcggcuucgccagcaacaagaccaucgagugcgccugcagagacaacagcuacaccgccaagagacccuucgugaagcugaacguggagaccgacaccgccgagaucagacugaugugcaccgagaccuaccuggacacccccagacccaacgacggcagcaucaccggccccugcgagagcaacggcgacaagggcagcggcggcaucaagggcggcuucgugcaccagagaauggccagcaagaucggcagaugguacagcagaaccaugagcaagaccaagagaaugggcaugggccuguacgugaaguacgacggcgaccccuggaccgacagcgaggcccuggcccugagcggcgugauggugagcauggaggagcccggcugguacagcuucggcuucgagaucaaggacaagaagugcgacgugcccugcaucggcaucgagauggugcacgacggcggcaagaccaccuggcacagcgccgccaccgccaucuacugccugaugggcagcggccagcugcugugggacaccgugaccggcgugaacaugacccuguga

SEQ ID NO: 189993 - RNA, 1401 nt, Artificial Sequence
  derived and/or modified CDS sequence (opt4) from neuraminidase__InfluenzaB__AGZ60272
augcugcccagcaccauccagacccugacccuguuccugaccagcggcggcgugcugcugagccuguacgugagcgccagccugagcuaccugcuguacagcgacauccugcugaaguucagccagaccgagaucaccgcccccaucaugccccuggacugcgccaacgccagcaacgugcaggccgugaacagaagcgccgccaagggcgugacccugcugcugcccaagcccgaguggaccuaccccagacugagcugccccggcagcaccuuccagaaggcccugcugaucagcccccacagauucggcgagaccaagggcaacagcgccccccugaucaucagagagcccuucaucgccugcggccccaccgagugcaagcacuucgcccugacccacuacgccgcccagcccggcggcuacuacaacggcaccagagaggacagaaacaagcugagacaccugaucagcgugaagcugggcaagauccccaccguggagaacagcaucuuccacauggccgccuggagcggcagcgccugccacgacggcaaggaguggaccuacaucggcguggacggccccgacagcaacgcccugcugaagaucaaguacggcgaggccuacaccgacaccuaccacagcuacgccaagaacauccugagaacccaggagagcgccugcaacugcaucggcggcgacugcuaccugaugaucaccgacggccccgccagcggcaucagcgagugcagauuccugaagaucagagagggcagaaucaucaaggagaucuuccccaccggcagagugaagcacaccgaggagugcaccugcggcuucgccagcaacaagaccaucgagugcgccugcagagacaacagcuacaccgccaagagacccuucgugaagcugaacguggagaccgacaccgccgagaucagacugaugugcaccgagaccuaccuggacacccccagacccaacgacggcagcaucaccggccccugcgagagcgacggcgacaagggcagcggcggcaucaagggcggcuucgugcaccagagaauggccagcaagaucggcagaugguacagcagaaccaugagcaagaccaagagaaugggcaugggccuguacgugaaguacgacggcgaccccuggaccgacagcgaggcccuggcccugagcggcgugauggugagcauggaggagcccggcugguacagcuucggcuucgagaucaaggacaagaagugcgacgugcccugcaucggcaucgagauggugcacgacggcggcaagaccaccuggcacagcgccgccaccgccaucuacugccugaugggcagcggccagcugcugugggacaccgugaccggcguggacauggcccuguga

SEQ ID NO: 189994 - RNA, 1398 nt, Artificial Sequence
  derived and/or modified CDS sequence (opt4) from neuraminidase__InfluenzaB__AHL91182
augcugcccagcaccauccagacccugacccuguuccugaccagcggcggcgugcugcugagccuguacgugagcgcccugcugagcuaccugcuguacagcgacauccugcugaaguucagccccaagaucaucgcccccaccaugagccuggacugcgccaacgccagcaacgugcaggccgugaaccacagcgccaccaaggagaugaaguuccugccccccgagcccgaguggaccuaccccagacugagcugccagggcagcaccuuccagaaggcccugcugaucagcccccacagauucggcgaggccaagggcaacagcgccccccugaucaucagagagcccuucaucgccugcggccccaaggagugcaagcacuucgcccugacccacuacgccgcccagcccggcggcuacuacaacggcaccagagaggacagaaacaagcugagacaccugaucagcgugaaccugggcaagauccccaccguggagaacagcaucuuccacauggccgccuggagcggcagcgccugccacgacggcagagaguggaccuacaucggcguggacggccccgacagcaacgcccugaucaagaucaaguacggcgaggccuacaccgacaccuaccacagcuacgccaacaacauccugagaacccaggagagcgccugcaacugcaucggcggcgacugcuaccugaugaucaccgacggcagcgccagcggcaucagcaagugcagauuccugaagaucagagagggcagaaucaucaaggagaucuuccccaccggcagaguggagcacaccgaggagugcaccugcggcuucgccagcaacaagaccaucgagugcgccugcagagacaacagcuacaccgccaagagacccuucgugaagcugaacguggagaccgacaccgccgagaucagacugaugugcaccgagaccuaccuggacacccccagacccgacgacggcagcaucaccggccccugcgagagcaacggcgacaagggcagaggcggcgugaagggcggcuucgugcaccagagaauggccagcaagaucggcagaugguacagcagaaccaugagcaagaccaagagaaugggcauggagcuguacgugaaguacgacggcgaccccuggaccgacagcgacgcccuggcccccagcggcgugauggugagcauggaggagcccggcugguacagcuucggcuucgagaucaaggacaagaagugcgacgugcccugcaucggcaucgagauggugcacgacggcggcaagagaaccuggcacagcgccgccaccgccaucuacugccugaugggcagcggccagcugcugugggacaccgugaccggcguggacauggcccuguga

SEQ ID NO: 189995 - RNA, 1398 nt, Artificial Sequence
  derived and/or modified CDS sequence (opt4) from neuraminidase__InfluenzaB__AHL91193
augcugcccagcaccauccagacccugacccuguuccugaccagcggcggcgugcugcugagccuguacgugagcgcccugcugagcuaccugcuguacagcgacauccugcugaaguucagccccaagaucaucgcccccaccaugagccuggacugcgccaacgccagcaacgugcaggccgugaaccacagcgccaccaaggagaugaaguuccugcccagcgagcccgaguggaccuaccccagacugagcugccagggcagcaccuuccagaaggcccugcugaucagcccccacagauucggcgaggccaagggcaacagcgccccccugaucaucagagagcccuucaucgccugcggccccaaggagugcaagcacuucgcccugacccacuacgccgcccagcccggcggcuacuacaacggcaccagagaggacagaaacaagcugagacaccugaucagcgugaaccugggcaagauccccaccguggagaacagcaucuuccacauggccgccuggagcggcagcgccugccacgacggcagagaguggaccuacaucggcguggacggccccgacagcaacgcccugaucaagaucaaguacggcgaggccuacaccgacaccuaccacagcuacgccaacaacauccugagaacccaggagagcgccugcaacugcaucggcggcgacugcuaccugaugaucaccgacggcagcgccagcggcaucagcaagugcagauuccugaagaucagagagggcagaaucaucaaggagaucuuccccaccggcagaguggagcacaccgaggagugcaccugcggcuucgccagcaacaagaccaucgagugcgccugcagagacaacagcuacaccgccaagagacccuucgugaagcugaacguggagaccgacaccgccgagaucagacugaugugcaccgagaccuaccuggacacccccagacccgacgacggcagcaucaccggccccugcgagagcaacggcgacaagggcagaggcggcgugaagggcggcuucgugcaccagagaauggccagcaagaucggcagaugguacagcagaaccaugagcaagaccaagagaaugggcauggagcuguacgugaaguacgacggcgaccccuggaccgacagcgacgcccuggcccccagcggcgugauggugagcauggaggagcccggcugguacagcuucggcuucgagaucaaggacaagaagugcgacgugcccugcaucggcaucgagauggugcacgacggcggcaagagaaccuggcacagcgccgccaccgccaucuacugccugaugggcagcggccagcugcugugggacaccgugaccggcguggacauggcccuguga

SEQ ID NO: 189996 - RNA, 1398 nt, Artificial Sequence
  derived and/or modified CDS sequence (opt4) from neuraminidase__InfluenzaB__AHL91204
augcugcccagcaccauccagacccugacccuguuccugaccagcggcggcgugcugcugagccuguacgugagcgcccugcugagcuaccugcuguacagcgacgugcugcugaaguucagccccaagaucaucgcccccaccaugagccuggacugcgccaacgccagcaacgugcaggccgugaaccacagcgccaccgaggagaugaccuuccugcugcccgagcccgaguggaccuaccccagacugagcugccagggcagcaccuuccagaaggcccugcugaucagcccccacagauucggcgaggccaagggcaacagcgccccccugaucaucagagagcccuucaucgccugcggccccaaggagugcaagcacuucgcccugacccacuacgccgcccagcccggcggcuacuacaacggcaccagagaggacagaaacaagcugagacaccugaucagcgugaaccugggcaagauccccaccguggagaacagcaucuuccacauggccgccuggagcggcagcgccugccacgacggcagagaguggaccuacaucggcguggacggccccgacagcaacgcccugaucaagaucaaguacggcgaggccuacaccgacaccuaccacagcuacgccaacaacauccugagaacccaggagagcgccugcaacugcaucggcggcgacugcuaccugaugaucaccgacggcagcgccagcggcaucagcaagugcagauuccugaagaucagagagggcagaaucaucaaggagaucuuccccaccggcagaguggagcacaccgaggagugcaccugcggcuucgccagcaacaagaccaucgagugcgccugcagagacaacaucuacaccgccaagagacccuucgugaagcugaacguggagaccgacaccgccgagaucagacugaugugcaccgagaccuaccuggacacccccagacccgacgacggcagcaucaccggccccugcgagagcaacggcgacaagggccacggcggcaucaagggcggcuucgugcaccagagaauggccagcaagaucggcagaugguacagcagaaccaugagcaagaccaagagaaugggcauggagcuguacgugaaguacgacggcgaccccuggaccgacagcgacgcccuggcccccagcggcgugauggugagcauggaggagcccggcugguacagcuucggcuucgagaucaaggacaagaagugcgacgugcccugcaucggcaucgagauggugcacgacggcggcaagaagaccuggcacagcgccgccaccgccaucuacugccugaugggcagcggccagcugcugugggacaccgugaccggcguggacauggcccuguga

SEQ ID NO: 189997 - RNA, 1398 nt, Artificial Sequence
  derived and/or modified CDS sequence (opt4) from neuraminidase__InfluenzaB__AHL91215
augcugcccagcaccauccagacccugacccuguuccugaccagcggcggcgugcugcugagccuguacgugagcacccugcugagcuaccugcuguacagcgacauccugcugaaguucagccccaagaucaucgcccccaccaccagccuggacugcgccaacgccagcaacgugcaggccgugaaccacagcgccaccaaggagaugaaguuccugcccaccgagcccgaguggaccuaccccagacugagcugccagggcagcaccuuccagaaggcccugcugaucagcccccacagauucggcgaggccaagggcaacagcgccccccugaucaucagagagcccuucaucgccugcggccccaaggagugcaagcacuucgcccugacccacuacgccgcccagcccggcggcuacuacaacggcaccagagaggacagaaacaagcugagacaccugaucagcgugaaccugggcaagauccccaccguggagaacagcaucuuccacauggccgccuggagcggcagcgccugccacgacggcagagaguggaccuacaucggcguggacggccccgacagcaacgcccugaucaagaucaaguacggcgaggccuacaccgacaccuaccacagcuacgccaacaacauccugagaacccaggagagcgccugcaacugcaucggcggcgacugcuaccugaugaucaccgacggcagcgccagcggcaucagcaagugcagauuccugaagaucagagagggcagaaucaucaaggagaucuuccccaccggcagaguggagcacaccgaggagugcaccugcggcuucgccagcaacaagaccaucgagugcgccugcagagacaacagcuacaccgccaagagacccuucgugaagcugaacguggagaccgacaccgccgagaucagacugaugugcaccgagaccuaccuggacacccccagacccgacgacggcagcaucaccggccccugcgagagcaacggcgacaagggcagcggcggcgugaagggcggcuucgugcaccagagaaugaccagcaagaucggcagaugguacagcagaaccaugagcaagaccaagagaaugggcauggagcuguacgugaaguacgacggcgaccccuggaccgacagcgacgcccuggcccccagcggcgugauggugagcauggaggagcccggcugguacagcuucggcuucgagaucaaggacaagaagugcgacgugcccugcaucggcaucgagauggugcacgacggcggcaagagaaccuggcacagcgccgccaccgccaucuacugccugaugggcagcggccagcugcugugggacaccgugaccggcguggacauggcccuguga

SEQ ID NO: 189998 - RNA, 1401 nt, Artificial Sequence; identical to SEQ ID NO: 188769
  derived and/or modified CDS sequence (opt4) from neuraminidase__InfluenzaB__AHL91226

SEQ ID NO: 189999 - RNA, 1401 nt, Artificial Sequence; identical to SEQ ID NO: 188770
  derived and/or modified CDS sequence (opt4) from neuraminidase__InfluenzaB__AHL91237

SEQ ID NO: 190000 - RNA, 1401 nt, Artificial Sequence; identical to SEQ ID NO: 188770
  derived and/or modified CDS sequence (opt4) from neuraminidase__InfluenzaB__AHL91248

SEQ ID NO: 190001 - RNA, 1401 nt, Artificial Sequence; identical to SEQ ID NO: 188769
  derived and/or modified CDS sequence (opt4) from neuraminidase__InfluenzaB__AHL91259

SEQ ID NO: 190002 - RNA, 1401 nt, Artificial Sequence; identical to SEQ ID NO: 188769
  derived and/or modified CDS sequence (opt4) from neuraminidase__InfluenzaB__AHL91270

SEQ ID NO: 190003 - RNA, 1398 nt, Artificial Sequence; identical to SEQ ID NO: 188741
  derived and/or modified CDS sequence (opt4) from neuraminidase__InfluenzaB__AHL91281

SEQ ID NO: 190004 - RNA, 1401 nt, Artificial Sequence
  derived and/or modified CDS sequence (opt4) from neuraminidase__InfluenzaB__AHL91303
augcugcccagcaccauccagacccugacccuguuccugaccagcggcggcgugcugcugagccuguacgugagcgccagccugagcuaccugcuguacagcgacauccugcugaaguucagccccaccgagaucaccgcccccaccaugccccuggacugcgccaacgccagcaacgugcaggccgugaacagaagcgccaccaagggcgugacccugcugcugcccgagcccgaguggaccuaccccagacugagcugccccggcagcaccuuccagaaggcccugcugaucagcccccacagauucggcgagaccaagggcaacagcgccccccugaucaucagagagcccuucaucgccugcggccccaaggagugcaagcacuucgcccugacccacuacgccgcccagcccggcggcuacuacaacggcaccagagaggacagaaacaagcugagacaccugaucagcgugaagcugggcaagauccccaccguggagaacagcaucuuccacauggccgccuggagcggcagcgccugccacgacggcagagaguggaccuacaucggcguggacggccccgacagcaacgcccugcugaagaucaaguacggcgaggccuacaccgacaccuaccacagcuacgccaacaacauccugagaacccaggagagcgccugcaacugcaucggcggcgacugcuaccugaugaucaccgacggcagcgccagcggcaucaacgagugcagauuccugaagaucagagagggcagaaucaucaaggagaucuuccccaccggcagaguggagcacaccgaggagugcaccugcggcuucgccagcaacaagaccaucgagugcgccugcagagacaacagcuacaccgccaagagacccuucgugaagcugaacguggagaccgacaccgccgagaucagacugaugugcaccgagaccuaccuggacacccccagacccgacgacggcagcaucaccggccccugcgagagcaacggcgacaagggcagcggcggcaucaagggcggcuucgugcaccagagaauggccagcaagaucggcagaugguacagcagaaccaugagcaagaccagaagaaugggcaugggccuguacgugaaguacgacggcgaccccuggaccgacagcgacgcccuggcccugagcggcgugauggugagcauggaggagcccggcugguacagcuucggcuucgagaucaaggacaagaagugcgacgugcccugcaucggcaucgagauggugcacgacggcggcaagaagaccuggcacagcgccgccaccgccaucuacugccugaugggcagcggccagcugcugugggacaccgugaccggcguggacauggcccuguga

SEQ ID NO: 190005 - RNA, 1401 nt, Artificial Sequence; identical to SEQ ID NO: 188770
  derived and/or modified CDS sequence (opt4) from neuraminidase__InfluenzaB__AHL91314

SEQ ID NO: 190006 - RNA, 1401 nt, Artificial Sequence; identical to SEQ ID NO: 188770
  derived and/or modified CDS sequence (opt4) from neuraminidase__InfluenzaB__AHL91325

SEQ ID NO: 190007 - RNA, 1401 nt, Artificial Sequence
  derived and/or modified CDS sequence (opt4) from neuraminidase__InfluenzaB__AHL91347
augcugcccagcaccauccagacccugacccuguuccugaccagcggcggcgugcugcugagccuguacgugagcgccagccugagcuaccugcuguacagcgacgugcugcugaaguucagccccaccgagaucaccgcccccaccaugccccuggacugcgccaacgccagcaacgugcaggccgugaacagaagcgccaccaagggcgugacccugcugcugcccgagcccgaguggaccuaccccagacugagcugccccggcagcaccuuccagaaggcccugcugaucagcccccacagauucggcgagaccaagggcaacagcgccccccugaucaucagagagcccuucaucgccugcggccccaaggagugcaagcacuucgcccugacccacuacgccgcccagcccggcggcuacuacaacggcaccagagaggacagaaacaagcugagacaccugaucagcgugaagcugggcaagauccccaccguggagaacagcaucuuccacauggccgccuggagcggcagcgccugccacgacggcagagaguggaccuacaucggcguggacggccccgacagcaacgcccugcugaagaucaaguacggcgaggccuacaccgacaccuaccacagcuacgccaacaacauccugagaacccaggagagcgccugcaacugcaucggcggcgacugcuaccugaugaucaccgacggcagcgccagcggcaucagcgagugcagauuccugaagaucagagagggcagaaucgugaaggagaucuuccccaccggcagaguggagcacaccgaggagugcaccugcggcuucgccagcaacaagaccaucgagugcgccugcagagacaacagcuacaccgccaagagacccuucgugaagcugaacguggagaccgacaccgccgagaucagacugaugugcaccgagaccuaccuggacacccccagacccgaggacggcagcaucaccggccccugcgagagcaacggcgacaagggcagcggcggcaucaagggcggcuucgugcaccagagaauggccagcaagaucggcagaugguacagcagaaccaugagcaagaccaagagaaugggcaugggccuguacgugaaguacgacggcgaccccuggaccgacagcgacgcccuggcccugagcggcgugauggugagcauggaggagcccggcugguacagcuucggcuucgagaucaaggacaagaagugcgacgugcccugcaucggcaucgagauggugcacgacggcggcaaggagaccuggcacagcgccgccaccgccaucuacugccugaugggcagcggccagcugcugugggacaccgugaccggcguggacauggcccuguga

SEQ ID NO: 190008 - RNA, 1401 nt, Artificial Sequence; identical to SEQ ID NO: 190007
  derived and/or modified CDS sequence (opt4) from neuraminidase__InfluenzaB__AHL91358

SEQ ID NO: 190009 - RNA, 1401 nt, Artificial Sequence; identical to SEQ ID NO: 188745
  derived and/or modified CDS sequence (opt4) from neuraminidase__InfluenzaB__AHL91369

SEQ ID NO: 190010 - RNA, 1401 nt, Artificial Sequence; identical to SEQ ID NO: 188745
  derived and/or modified CDS sequence (opt4) from neuraminidase__InfluenzaB__AHL91380

SEQ ID NO: 190011 - RNA, 1401 nt, Artificial Sequence
  derived and/or modified CDS sequence (opt4) from neuraminidase__InfluenzaB__AHL91391
augcugcccagcaccauccagacccugacccuguuccugaccagcggcggcgugcugcugagccuguacgugagcgccagccugagcuaccugcuguacagcgacauccugcugaaguucagccccaaggagaucaccgcccccaccaugccccugaacugcgccaacgccagcaacgugcaggccgugaacagaagcgccaccaagggcgugacccugccccugcccgagcccgaguggaccuaccccagacugagcugccccggcagcaccuuccagaaggcccugcugaucagcccccacagauucggcgagaccaagggcaacagcgccccccugaucaucagagagcccuucaucgccugcggccccaaggagugcaagcacuucgcccugacccacuacgccgcccagcccggcggcuacuacaacggcaccagagaggacagaaacaagcugagacaccugaucagcgugaagcugggcaagauccccaccguggagaacagcaucuuccacauggccgccuggagcggcagcgccugccacgacggcagagaguggaccuacaucggcguggacggccccgacaacaacgcccugcugaagaucaaguacggcgaggccuacaccgacaccuaccacagcuacgccaacaacauccugagaacccaggagagcgccugcaacugcaucggcggcgacugcuaccugaugaucaccgacggcagcgccagcggcaucagcgagugcagauuccugaagaucagagagggcagaaucaucaaggagaucuuccccaccggcagaguggagcacaccgaggagugcaccugcggcuucgccagcaacaagaccaucgagugcgccugcagagacaacagcuacaccgccaagagacccuucgugaagcugaacguggagaccgacaccgccgagaucagacugaugugcaccgagaccuaccuggacacccccagacccgacgacggcagcaucaccggccccugcgagagcaacggcgacaagggcagcggcggcaucaagggcggcuucgugcaccagagaauggccagcaagaucggcagaugguacagcagaaccaugagcaagaccaagagaaugggcaugggccuguacgugaaguacgacggcgaccccuggaucgacagcgacgcccugacccugagcggcgugauggugagcauggaggagcccggcugguacagcuucggcuucgagaucaaggacaagaagugcgacgugcccugcaucggcaucgagauggugcacgacggcggcaagaccaccuggcacagcgccgccaccgccaucuacugccugaugggcagcggccagcugcugugggacaccgugaccggcguggacauggcccuguga

SEQ ID NO: 190012 - RNA, 1401 nt, Artificial Sequence
  derived and/or modified CDS sequence (opt4) from neuraminidase__InfluenzaB__AHL91413
augcugcccagcaccauccagacccugacccuguuccugaccagcggcggcgugcugcugagccuguacgugagcgccagccugagcuaccugcuguacagcgacauccugcugaaguucacccccaccgagaucaccgcccccaccaugccccuggacugcgccaacgccagcaacgugcaggccgugaaccugagcgccaccaagggcgugacccugcugcugcccgagcccgaguggaccuaccccagacugagcugccccggcagcaccuuccagaaggcccugcugaucagcccccacagauucggcgagaccaagggcaacagcgccccccugaucaucagagagcccuucaucgccugcggccccaaggagugcaagcacuucgcccugacccacuacgccgcccagcccggcggcuacuacaacggcaccagagaggacagaaacaagcugagacaccugaucagcgugaagcugggcaagauccccaccguggagaacagcaucuuccacauggccgccuggagcggcagcgccugccacgacggcaaggaguggaccuacaucggcguggacggccccgacagcaacgcccugcugaagaucaaguacggcgaggccuacaccgacaccuaccacagcuacgccaacaacauccugagaacccaggagagcgccugcaacugcaucggcggcaacugcuaccugaugaucaccgacggcagcgccagcggcaucagcgagugcagauuccugaagaucagagagggcagaaucaucaaggagaucuuccccaccggcagagugaagcacaccgaggagugcaccugcggcuucgccagcaacaagaccaucgagugcgccugcagagacaacagcuacaccgccaagagacccuucgugaagcugaacguggagaccgacaccgccgagaucagacugaugugcaccgagaccuaccuggacacccccagacccgacgacggcagcaucaccggccccugcgagagcaacggcaacaagggcagcggcggcaucaagggcggcuucgugcaccagagaauggccagcaagaucggcagaugguacagcagaaccaugagcaagaccaagagaaugggcaugggccuguacgugaaguacgacggcgaccccuggaccgacagcgacgcccuggcccugagcggcgugauggugagcauggaggagcccggcugguacagcuucggcuucgagaucaaggacaagaagugcgacgugcccugcaucggcaucgagauggugcacgacggcggcaaggagaccuggcacagcgccgccaccgccaucuacugccugaugggcagcggccagcugcugugggacaccgugaccggcguggacauggcccuguga

SEQ ID NO: 190013 - RNA, 1401 nt, Artificial Sequence
  derived and/or modified CDS sequence (opt4) from neuraminidase__InfluenzaB__AHL91446
augcugcccagcaccauccagacccugacccuguuccugaccagcggcggcgugcugcugagccuguacgugagcgccagccugagcuaccugcuguacagcgacauccugcugaaguucagccccaccgagaucaccgcccccaccaugccccuggacugcgccaacgccagcaacgugcaggccgugaacagaagcgccaccaagggcaugacccugcugcugcccgagcccgaguggaccuaccccagacugagcugccccggcagcaccuuccagaaggcccugcugaucagcccccacagauucggcgagaccaagggcaacagcgccccccugaucaucagagagcccuucaucgccugcggccccaaggagugcaagcacuucgcccugacccacuacgccgcccagcccggcggcuacuacaacggcaccagagaggacagaaacaagcugagacaccugaucagcgugaagcugggcaagauccccaccguggagaacagcaucuuccacauggccgccuggagcggcagcgccugccacgacggcaaggaguggaccuacaucggcguggacggccccgacagcaacgcccugcugaagaucaaguacggcgaggccuacaccgacaccuaccacagcuacgccaacaacauccugagaacccaggagagcgccugcaacugcaucggcggcaacugcuaccugaugaucaccgacggcagcgccagcggcaucagcgagugcagauuccugaagaucagagagggcagaaucaucaaggagaucuuccccaccggcagaguggagcacaccgaggagugcaccugcggcuucgccagcaacaagaccaucgagugcgccugcagagacaacagcuacaccgccaagagacccuucgugaagcugaacguggagaccgacaccgccgagaucagacugaugugcaccgagaccuaccuggacacccccagacccgacgacggcagcaucaccggccccugcgagagcaacggcggcaagggcagcggcggcaucaagggcggcuucgugcaccagagaauggagagcaagaucggcagaugguacagcagaaccaugagcaagaccaagagaaugggcaugggccuguacgugaaguacgacggcgaccccuggaccgacagcgacgcccuggcccugagcggcgugauggugagcauggaggagcccggcugguacagcuucggcuucgagaucaaggacaaggagugcgacgugcccugcaucggcaucgagauggugcacgacggcggcaaggagaccuggcacagcgccgccaccgccaucuacugccugaugggcagcggccagcugcugugggacaccgugaccggcgugaacauggcccuguga

SEQ ID NO: 190014 - RNA, 1401 nt, Artificial Sequence
  derived and/or modified CDS sequence (opt4) from neuraminidase__InfluenzaB__AHL91457
augcugcccagcaccauccagacccugacccuguuccugaccagcggcggcgugcugcugagccuguacgugagcgccagccugagcuaccugcuguacagcgacauccugcugaaguucagccccaccgagaucaccgcccccaucaugccccuggacugcgccaacgccagcaacgugcaggccgugaacagaagcgccaccaagggcgugacccugcugcugcccgagcccgaguggaccuaccccagacugagcugccccggcagcaccuuccagaaggcccugcugaucagcccccacagauucggcgagaccaagggcaacagcgccccccugaucaucagagagcccuucaucgccugcggccccaaggagugcaagcacuucgcccugacccacuacgccgcccagcccggcggcuacuacaacggcaccagaggcgacagaaacaagcugagacaccugaucagcgugaagcugggcaagauccccaccguggagaacagcaucuuccacauggccgccuggagcggcagcgccugccacgacggcaaggaguggaccuacaucggcguggacggccccgacaacaacgcccugcugaagaucaaguacggcgaggccuacaccgacaccuaccacagcuacgccaacaacacccugagaacccaggagagcgccugcaacugcaucggcggcaacugcuaccugaugaucaccgacggcagcgccagcggcaucagcgagugcagauuccugaagaucagagagggcagaaucaucaaggagaucuuccccaccggcagagugaagcacaccgaggagugcaccugcggcuucgccagcaacaagaccaucgagugcgccugcagagacaacagcuacaccgccaagagacccuucgugaagcugaacguggagaccgacaccgccgagaucagacugaugugcaccgagaccuaccuggacacccccagacccgacgacggcagcaucaccggccccugcgagagcaacggcaacaagggcagcggcggcaucaagggcggcuucgugcaccagagaauggccagcaagaucggcagaugguacagcagaaccaugagcaagaccaagagaaugggcaugggccuguacgugaaguacgacggcgaccccuggaccgacagcgacgcccuggcccugagcggcgugauggugagcauggaggagcccggcugguacagcuucggcuucgagaucaaggacaagaagugcgacgugcccugcaucggcaucgagauggugcacgacggcggcaaggagaccuggcacagcgccgccaccgccaucuacugccugaugggcagcggccagcugcugugggacaccgugaccggcguggacauggcccuguga

SEQ ID NO: 190015 - RNA, 1401 nt, Artificial Sequence
  derived and/or modified CDS sequence (opt4) from neuraminidase__InfluenzaB__AHL91468
augcugcccagcaccauccagacccugacccuguuccugaccagcggcggcgugcugcugagccuguacgugagcgccagccugagcuaccugcuguacagcgacauccugcugaaguucagccccaccgagaucaccgcccccaccaugccccuggacugcgccaacgccagcaacgugcaggccgugaacagaagcgccaccaagggcgugacccugcugcugcccgagcccgaguggaccuaccccagacugagcugccccggcagcaccuuccagaaggcccugcugaucagcccccacagauucggcgagaccaagggcaacagcgccccccugaucaucagagagcccuucaucgccugcggccccaaggagugcaagcacuucgcccugacccacuacgccgcccagcccggcggcuacuacaacggcaccagagaggacagaaacaagcugagacaccugaucagcgugaagcugggcaagauccccaccguggagaacagcaucuuccacauggccgccuggagcggcagcgccugccacgacggcaaggaguggaccuacaucggcguggacggccccgacagcaacgcccugcugaagaucaaguacggcgaggccuacaccgacaccuaccacagcuacgccaacaacauccugagaacccaggagagcgccugcaacugcaucggcggcaacugcuaccugaugaucaccgacggcagcgccagcggcaucagcgagugcagauuccugaagaucagagagggcagaaucaucaaggagaucuuccccaccggcagagugaagcacaccgaggagugcaccugcggcuucgccagcaacaagaccaucgagugcgccugcagagacaacagcuacaccgccaagagacccuucgugaagcugaacguggagaccgacaccgccgagaucagacugaugugcaccgagaccuaccuggacacccccagacccgacgacggcagcaucaccggccccugcgagagcaacggcgacaagggcagcggcggcaucaagggcggcuucgugcaccagagaauggccagcaagaucggcagaugguacagcagaaccaugagcaagaccaagagaaugggcaugggccuguacgugaaguacgacggcgaccccuggaccgacagcgacgcccuggcccugagcggcgugauggugagcgugggcgagcccggcugguacagcuucggcuucgagaucaaggacaagaagugcgacgugcccugcaucggcaucgagauggugcacgacggcggcaaggagaccuggcacagcgccgccaccgccaucuacugccugaugggcagcggccagcugcugugggacaccgugaccggcguggacauggcccuguga

SEQ ID NO: 190016 - RNA, 1401 nt, Artificial Sequence
  derived and/or modified CDS sequence (opt4) from neuraminidase__InfluenzaB__AHL91479
augcugcccagcaccauccagacccugacccuguuccugaccagcggcggcgugcugcugagccuguacgugagcgccagccugagcuaccugcuguacagcgacauccugcugaaguucagccccaccgagaucaccgcccccaccaugcccagcgacugcgccaacgccagcaacgugcaggccgugaacagaagcgccaccaagggcgugacccugcugcugcccgagcccgaguggaccuaccccagacugagcugccccggcagcaccuuccagaaggcccugcugaucagcccccacagauucggcgagaccaagggcaacagcgccccccugaucaucagagagcccuucaucgccugcggccccaaggagugcaagcacuucgcccugacccacuacgccgcccagcccggcggcuacuacaacggcaccagaggcgacagaaacaagcugagacaccugaucagcgugaagcugggcaagauccccaccguggagaacagcaucuuccacauggccgccuggagcggcagcgccugccacgacggcaaggaguggaccuacaucggcguggacggccccgacagcaacgcccugcugaagaucaaguacggcgaggccuacaccgacaccuaccacagcuacgccaacaacauccugagaacccaggagagcgccugcaacugcaucggcggcaacugcuaccugaugaucaccgacggcagcgccagcggcaucagcgagugcagauuccugaagaucagagagggcagaaucaucaaggagaucuuccccaccggcagagugaagcacaccgaggagugcaccugcggcuucgccagcaacaagaccaucgagugcgccugcagagacaacagcuacaccgccaagagacccuucgugaagcugaacguggagaccgacaccgccgagaucagacugaugugcaccgagaccuaccuggacacccccagacccgacgacggcagcaucaccggccccugcgagagcaacggcgacaagggcagcggcggcaucaagggcggcuucgugcaccagagaauggccagcaagaucggcagaugguacagcagaaccaugagcaagaccaagagaaugggcaugggccuguacgugaaguacgacggcgaccccuggaccgacagcgacgcccuggcccugagcggcgugauggugagcauggaggagcccggcugguacagcuucggcuucgagaucaaggacaagaagugcgacgugcccugcaucggcaucgagauggugcacgacggcggcaaggagaccuggcacagcgccgccaccgccaucuacugccugaugggcagcggccagcugcugugggacaccgugaccggcguggacauggcccuguga

SEQ ID NO: 190017 - RNA, 1401 nt, Artificial Sequence
  derived and/or modified CDS sequence (opt4) from neuraminidase__InfluenzaB__AHL91501
augcugcccagcaccauccagacccugacccuguuccugaccagcggcggcgugcugcugagccuguacgugagcgccagccugagcuaccugcuguacagcgacauccugcugaaguucagccccaccgagaucaccgcccccaccaugccccuggacugcgccaacgccagcaacgugcaggccgugaacagaagcgccaccaagggcaugacccugcugcugcccgagcccgaguggaccuaccccagacugagcugccccggcagcaccuuccagaaggcccugcugaucagcccccacagauucggcgagaccaagggcaacagcgccccccugaucaucagagagcccuucaucgccugcggccccaaggagugcaagcacuucgcccugacccacuacgccgcccagcccggcggcuacuacaacggcaccagagaggacagaaacaagcugagacaccugaucagcgugaagcugggcaagauccccaccguggagaacagcaucuuccacauggccgccuggagcggcagcgccugccacgacggcaaggaguggaccuacaucggcguggacggccccgacagcaacgcccugcugaagaucaaguacggcgaggccuacaccgacaccuaccacagcuacgccaacaacauccugagaacccaggagagcgccugcaacugcaucggcggcaacugcuaccugaugaucaccgacggcagcgccagcggcaucagcgagugcagauuccugaagaucagagagggcagaaucaucaaggagaucuuccccaccggcagaguggagcacaccgaggagugcaccugcggcuucgccagcaacaagaccaucgagugcgccugcagagacaacagcuacaccgccaagagacccuucgugaagcugaacguggagaccgacaccgccgagaucagacugaugugcaccgagaccuaccuggacacccccagacccgacgacggcagcaucaccggccccugcgagagcaacggcggcaagggcagcggcggcaucaagggcggcuucgugcaccagagaauggagagcaagaucggcagaugguacagcagaaccaugagcaagaccaagagaaugggcaugggccuguacgugaaguacgacggcgaccccuggaccgacagcgacgcccuggcccugagcggcgugauggugagcauggaggagcccggcugguacagcuucggcuucgagaucaaggacaagaagugcgacgugcccugcaucggcaucgagauggugcacgacggcggcaaggagaccuggcacagcgccgccaccgccaucuacugccugaugggcagcggccagcugcugugggacaccgugaccggcgugaacauggcccuguga

SEQ ID NO: 190018 - RNA, 1401 nt, Artificial Sequence
  derived and/or modified CDS sequence (opt4) from neuraminidase__InfluenzaB__AHL91512
augcugcccagcaccauccagacccugacccuguuccugaccagcggcggcgugcugcugagccuguacgugagcgccagccugagcuaccugcuguacagcgacauccugcugaaguucagccccaccgagaucaccgcccccaccaugccccuggacugcgccaacgccagcaacgugcaggccgugaacagaagcgccaccaagggcgugacccugcugcugcccgagcccgaguggaccuaccccagacugagcugccccggcagcaucuuccagaaggcccugcugaucagcccccacagauucggcgagaccaagggcaacagcgccccccugaucaucagagagcccuucaucgccugcggccccaaggagugcaagcacuucgcccugacccacuacgccgcccagcccggcggcuacuacaacggcaccagaggcgacagaaacaagcugagacaccugaucagcgugaagcugggcaagauccccaccguggagaacagcaucuuccacauggccgccuggagcggcagcgccugccacgacggcaaggaguggaccuacaucggcguggacggccccgacagcaacgcccugcugaagaucaaguacggcgaggccuacaccgacaccuaccacagcuacgccaacaacauccugagaacccaggagagcgccugcaacugcaucggcggcaacugcuaccugaugaucaccgacggcagcgccagcggcaucagcgagugcagauuccugaagaucagagagggcagaaucaucaaggagaucuuccccaccggcagagugaagcacaccgaggagugcaccugcggcuucgccagcaacaagaccaucgagugcgccugcagagacaacagcuacaccgccaagagacccuucgugaagcugaacguggagaccgacaccgccgagaucagacugaugugcaccgagaccuaccuggacacccccagacccgacgacggcagcaucaccggccccugcgagagcaacggcgacaagggcagcggcggcaucaagggcggcuucgugcaccagagaauggccagcaagaucggcagaugguacagcagaaccaugagcaagaccaagagaaugggcaugggccuguacgugaaguacgacggcgaccccuggaccgacagcgacgcccuggcccugagcggcgugauggugagcauggaggagcccggcugguacagcuucggcuucgagaucaaggacaagaagugcgacgugcccugcaucggcaucgagauggugcacgacggcggcaaggagaccuggcacagcgccgccaccgccaucuacugccugaugggcagcggccagcugcugugggacaccgugaccggcguggacauggcccuguga

SEQ ID NO: 190019 - RNA, 1401 nt, Artificial Sequence
  derived and/or modified CDS sequence (opt4) from neuraminidase__InfluenzaB__AHL91523
augcugcccagcaccauccagacccugacccuguuccugaccagcggcggcgugcugcugagccuguacgugagcgccagccugagcuaccugcuguacagcgacauccugcugaaguucagccccaccgagaucaccgcccccaccaugccccuggacugcgccaacgccagcaacgugcaggccgugaacagaagcgccaccaagggcgugacccugcugcugcccgagcccgaguggaccuaccccagacugagcugccccggcagcaccuuccagaaggcccugcugaucagcccccacagauucggcgagaccaagggcaacagcgccccccugaucaucagagagcccuucaucgccugcggccccaaggagugcaagcacuucgcccugacccacuacgccgcccagcccggcggcuacuacaacggcaccagaggcgacagaaacaagcugagacaccugaucagcgugaagcugggcaagauccccaccguggagaacagcaucuuccacauggccgccuggagcggcagcgccugccacgacggcaaggaguggaccuacaucggcguggacggccccgacaacaacgcccugcugaagaucaaguacggcgaggccuacaccgacaccuaccacagcuacgccaacaacauccugagaacccaggagagcgccugcaacugcaucggcggcaacugcuaccugaugaucaccgacggcagcgccagcggcaucagcgagugcagauuccugaagaucagagagggcagaaucaucaaggagaucuuccccaccggcagagugaagcacaccgaggagugcaccugcggcuucgccagcaacaagaccaucgagugcgccugcagagacaacagcuacaccgccaagagacccuucgugaagcugaacguggagaccgacaccgccgagaucagacugaugugcaccgagaccuaccuggacacccccagacccgacgacggcagcaucaccggccccugcgagagcaacggcgacaagggcagcggcggcaucaagggcggcuucgugcaccagagaauggccagcaagaucggcagaugguacagcagaaccaugagcaagaccaagagaaugggcaugggccuguacgugaaguacgacggcgaccccuggaccgacagcgacgcccuggcccugagcggcgugauggugagcauggaggagcccggcugguacagcuucggcuucgagaucaaggacaagaagugcgacgugcccugcaucggcaucgagauggugcacgacggcggcaaggagaccuggcacagcgccgccaccgccaucuacugccugaugggcagcggccagcugcugugggacaccgugaccggcguggacauggcccuguga

SEQ ID NO: 190020 - RNA, 1401 nt, Artificial Sequence; identical to SEQ ID NO: 190017
  derived and/or modified CDS sequence (opt4) from neuraminidase__InfluenzaB__AHL91534

SEQ ID NO: 190021 - RNA, 1401 nt, Artificial Sequence
  derived and/or modified CDS sequence (opt4) from neuraminidase__InfluenzaB__AHL91545
augcugcccagcaccauccagacccugacccuguuccugaccagcggcggcgugcugcugagccuguacgugagcgccagccugagcuaccugcuguacagcgacauccugcugaaguucagccccaccgagaucaccgcccccaccaugccccuggacugcgccaacgccagcaacgugcaggccgugaacagaagcgccaccaagggcgugacccugcugcugcccgagcccgaguggaccuaccccagacugagcugccccggcagcaccuuccagaaggcccugcugaucagcccccacagauucggcgagaccaagggcaacagcgccccccugaucaucagagagcccuucaucgccugcggccccaaggagugcaagcacuucgcccugacccacuacgccgcccagcccggcggcuacuacaacggcaccagaggcgacagaaacaagcugagacaccugaucagcgugaagcugggcaagauccccaccguggagaacagcaucuuccacauggccgccuggagcggcagcgccugccacgacggcaaggaguggaccuacaucggcguggacggccccgacagcaacgcccugcugaagaucaaguacggcgaggccuacaccgacaccuaccacagcuacgccaacaacauccugagaacccaggagagcgccugcaacugcaucggcggcaacugcuaccugaugaucaccgacggcagcgccagcggcaucagcgagugcagauuccugaagaucagagagggcagaaucaucaaggagaucuuccccaccggcagagugaagcacaccgaggagugcaccugcggcuucgccagcaacaagaccaucgagugcgccugcagagacaacagcuacaccgccaagagacccuucgugaagcugaacguggagaccgacaccgccgagaucagacugaugugcaccgagaccuaccuggacacccccagacccgacgacggcagcaucaccggccccugcgagagcaacggcgacaagggcagcggcggcaucaagggcggcuucgugcaccagagaaugaccagcaagaucggcagaugguacagcagaaccaugagcaagaccaagagaaugggcaugggccuguacgugaaguacgacggcgaccccuggaccgacagcgacgcccuggcccugagcggcgugauggugagcauggaggagcccggcugguacagcuucggcuucgagaucaaggacaagaagugcgacgugcccugcaucggcaucgagauggugcacgacggcggcaagggcaccuggcacagcgccgccaccgccaucuacugccugaugggcagcggccagcugcugugggacaccgugaccggcguggacauggcccuguga

SEQ ID NO: 190022 - RNA, 1401 nt, Artificial Sequence; identical to SEQ ID NO: 190017
  derived and/or modified CDS sequence (opt4) from neuraminidase__InfluenzaB__AHL91556

SEQ ID NO: 190023 - RNA, 1401 nt, Artificial Sequence; identical to SEQ ID NO: 190017
  derived and/or modified CDS sequence (opt4) from neuraminidase__InfluenzaB__AHL91578

SEQ ID NO: 190024 - RNA, 1401 nt, Artificial Sequence; identical to SEQ ID NO: 188945
  derived and/or modified CDS sequence (opt4) from neuraminidase__InfluenzaB__AHL91589

SEQ ID NO: 190025 - RNA, 1401 nt, Artificial Sequence
  derived and/or modified CDS sequence (opt4) from neuraminidase__InfluenzaB__AHL91600
augcugcccagcaccauccagacccugacccuguuccugaccaccggcggcgugcugcugagccuguacgugagcgccagccugagcuaccugcuguacagcgacauccugcugaaguucagccccaccgagaucaccgcccccaccaugccccuggacugcgccaacgccagcaacgugcaggccgugaacagaagcgccaccaagggcgugaccuuccugcugcccgagcccgaguggaccuaccccagacugagcugccccggcagcaccuuccagaaggcccugcugaucagcccccacagauucggcgagaccaagggcaacagcgccccccugaucaucagagagcccuucaucgccugcggccccaaggagugcaagcacuucgcccugacccacuacgccgcccagcccggcggcuacuacaacggcaccagaggcgacagaaacaagcugagacaccugaucagcgugaagcugggcaagauccccaccguggagaacagcaucuuccacauggccgccuggagcggcagcgccugccacgacggcaaggaguggaccuacaucggcguggacggccccgacagcaacgcccugcugaagaucaaguacggcgaggccuacaccgacaccuaccacagcuacgccaacaacauccugagaacccaggagagcgccugcaacugcaucggcggcaacugcuaccugaugaucaccgacggcagcgccagcggcaucagcgagugcagauuccugaagaucagagagggcagaaucaucaaggagaucuuccccaccggcagagugaagcacaccgaggagugcaccugcggcuucgccagcaacaagaccaucgagugcgccugcagagacaacagcuacaccgccaagagacccuucgugaagcugaacguggagaccgacaccgccgagaucagacugaugugcaccgagaccuaccuggacacccccagacccgacgacggcagcaucaccggccccugcgagagcaacggcgacaagggcagcggcggcaucaagggcggcuucgugcaccagagaauggccagcaagaucggcagaugguacagcagaaccaugagcaagaccaagagaaugggcaugggccuguacgugaaguacgacggcgaccccuggaccgacagcgacgcccuggcccugagcggcgugauggugagcauggaggagcccggcugguacagcuucggcuucgagaucaaggacaagaagugcgacgugcccugcaucggcaucgagauggugcacgacggcggcaaggagaccuggcacagcgccgccaccgccaucuacugccugaugggcagcggccagcugcugugggacaccgugaccggcguggacauggcccuguga

SEQ ID NO: 190026 - RNA, 1401 nt, Artificial Sequence; identical to SEQ ID NO: 190025
  derived and/or modified CDS sequence (opt4) from neuraminidase__InfluenzaB__AHL91611

SEQ ID NO: 190027 - RNA, 1401 nt, Artificial Sequence; identical to SEQ ID NO: 190017
  derived and/or modified CDS sequence (opt4) from neuraminidase__InfluenzaB__AHL91622

SEQ ID NO: 190028 - RNA, 1401 nt, Artificial Sequence; identical to SEQ ID NO: 190018
  derived and/or modified CDS sequence (opt4) from neuraminidase__InfluenzaB__AHL91633

SEQ ID NO: 190029 - RNA, 1401 nt, Artificial Sequence; identical to SEQ ID NO: 190018
  derived and/or modified CDS sequence (opt4) from neuraminidase__InfluenzaB__AHL91644

SEQ ID NO: 190030 - RNA, 1401 nt, Artificial Sequence
  derived and/or modified CDS sequence (opt4) from neuraminidase__InfluenzaB__AHL91655
augcugcccagcaccauccagacccugacccuguuccugaccagcggcggcgugcugcugagccuguacgugagcgccagccugagcuaccugcuguacagcgacauccugcugaaguucagccccaccgagaucaccgcccccaccaugccccuggacugcgccaacgccagcaacgugcaggccgugaacagaagcgccaccaaggaggugacccugcugcugcccgagcccgaguggaccuaccccagacugagcugccccggcagcaccuuccagaaggcccugcugaucagcccccacagauucggcgagaccaagggcaacagcgccccccugaucaucagagagcccuucaucgccugcggccccaaggagugcaagcacuucgcccugacccacuacgccgcccagcccggcggcuacuacaacggcaccagaggcgacagaaacaagcugagacaccugaucagcgugaagcugggcaagauccccaccguggagaacagcaucuuccacauggccgccuggagcggcagcgccugccacgacggcaaggaguggaccuacaucggcguggacggccccgacagcaacgcccugcugaagaucaaguacggcgaggccuacaccgacaccuaccacagcuacgccaacaacauccugagaacccaggagagcgccugcaacugcaucggcggcaacugcuaccugaugaucaccgacggcagcgccagcggcaucagcgagugcagauuccugaagaucagagagggcagaaucaucaaggagaucuuccccaccggcagagugaagcacaccgaggagugcaccugcggcuucgccagcaacaagaccaucgagugcgccugcagagacaacagcuacaccgccaagagacccuucgugaagcugaacguggagaccgacaccgccgagaucagacugaugugcaccgagaccuaccuggacacccccagacccgacgacggcagcaucaccggccccugcgagagcaacggcgacaagggcagcggcggcaucaagggcggcuucgugcaccagagaauggccagcaagaucggcagaugguacagcagaaccaugagcaagaccaagagaaugggcaugggccuguacgugaaguacgacggcgaccccuggaccgacagcgacgcccuggcccugagcggcgugauggugagcauggaggagcccggcugguacagcuucggcuucgagaucaaggacaagaagugcgacgugcccugcaucggcaucgagauggugcacgacggcggcaaggagaccuggcacagcgccgccaccgccaucuacugccugaugggcagcggccagcugcugugggacaccgugaccggcguggacauggcccuguga

SEQ ID NO: 190031 - RNA, 1401 nt, Artificial Sequence; identical to SEQ ID NO: 190017
  derived and/or modified CDS sequence (opt4) from neuraminidase__InfluenzaB__AHL91666

SEQ ID NO: 190032 - RNA, 1401 nt, Artificial Sequence; identical to SEQ ID NO: 190018
  derived and/or modified CDS sequence (opt4) from neuraminidase__InfluenzaB__AHL91677

SEQ ID NO: 190033 - RNA, 1401 nt, Artificial Sequence; identical to SEQ ID NO: 190019
  derived and/or modified CDS sequence (opt4) from neuraminidase__InfluenzaB__AHL91688

SEQ ID NO: 190034 - RNA, 1401 nt, Artificial Sequence; identical to SEQ ID NO: 188747
  derived and/or modified CDS sequence (opt4) from neuraminidase__InfluenzaB__AHL91699

SEQ ID NO: 190035 - RNA, 1401 nt, Artificial Sequence
  derived and/or modified CDS sequence (opt4) from neuraminidase__InfluenzaB__AHL91710
augcugcccagcaccauccagacccugacccuguuccugaccagcggcggcgugcugcugagccuguacgugagcgccagccugagcuaccugcuguacagcgacauccugcugaaguucagccccaccgagaucaccgcccccaccaugccccuggacugcgccaacgccagcaacgugcaggccgugaaccacagcgccaccaagggcgugacccugcugcugcccgagcccgaguggaccuaccccagacugagcugccccggcagcaccuuccagaaggcccugcugaucagcccccacagauucggcgagaccaagggcaacagcgccccccugaucaucagagagcccuucaucgccugcggccccaaggagugcaagcacuucgcccugacccacuacgccgcccagcccggcggcuacuacaacggcaccagaggcgacagaaacaagcugagacaccugaucagcgugaagcugggcaagauccccaccguggagaacagcaucuuccacauggccgccuggagcggcagcgccugccacgacggcaaggaguggaccuacaucggcguggacggccccgacagcaacgcccugcugaagaucaaguacggcgaggccuacaccgacaccuaccacagcuacgccaacaacauccugagaacccaggagagcgccugcaacugcaucggcggcaacugcuaccugaugaucaccgacggcagcgccagcggcaucagcgagugcagauuccugaagaucagagagggcagaaucaucaaggagaucuuccccaccggcagagugaagcacaccgaggagugcaccugcggcuucgccagcaacaagaccaucgagugcgccugcagagacaacagcuacaccgccaagagacccuucgugaagcugaacguggagaccgacaccgccgagaucagacugaugugcaccgagaccuaccuggacacccccagacccgacgacggcagcaucaccggccccugcgagagcaacggcgacaagggcagcggcggcaucaagggcggcuucgugcaccagagaauggccagcaagaucggcagaugguacagcagaaccaugagcaagaccaagagaaugggcaugggccuguacgugaaguacgacggcgaccccuggaccgacagcgacgcccuggcccugagcggcgugauggugagcauggaggagcccggcugguacagcuucggcuucgagaucaaggacaagaagugcgacgugcccugcaucggcaucgagauggugcacgacggcggcaaggagaccuggcacagcgccgccaccgccaucuacugccugaugggcagcggccagcugcugugggacaccgugaccggcguggacauggcccuguga

SEQ ID NO: 190036 - RNA, 1401 nt, Artificial Sequence; identical to SEQ ID NO: 188674
  derived and/or modified CDS sequence (opt4) from neuraminidase__InfluenzaB__AHL91721

SEQ ID NO: 190037 - RNA, 1401 nt, Artificial Sequence; identical to SEQ ID NO: 188742
  derived and/or modified CDS sequence (opt4) from neuraminidase__InfluenzaB__AHL91732

SEQ ID NO: 190038 - RNA, 1401 nt, Artificial Sequence; identical to SEQ ID NO: 188674
  derived and/or modified CDS sequence (opt4) from neuraminidase__InfluenzaB__AHL91743

SEQ ID NO: 190039 - RNA, 1401 nt, Artificial Sequence
  derived and/or modified CDS sequence (opt4) from neuraminidase__InfluenzaB__AHL91754
augcugcccagcaccauccagacccugacccugcugcugaccagcggcggcgugcugcugagccuguacgugagcgccagccugagcuaccugcuguacagcgacauccugcugaaguucagccccaccgagaucaccgcccccaccaugccccuggacugcgccaacgccagcaacgugcaggccgugaacagaagcgccaccaagggcgugacccugcugcugcccgagcccgaguggaccuaccccagacugagcugccccggcagcaccuuccagaaggcccugcugaucagcccccacagauucggcgagaccaagggcaacagcgccccccugaucaucagagagcccuucaucgccugcggccccaaggagugcaagcacuucgcccugacccacuacgccgcccagcccggcggcuacuacaacggcaccagaggcgacagaaacaagcugagacaccugaucagcgugaagcugggcaagauccccaccguggagaacagcaucuuccacauggccgccuggagcggcagcgccugccacgacggcaaggaguggaccuacaucggcguggacggccccgacagcaacgcccugcugaagaucaaguacggcgaggccuacaccgacaccuaccacagcuacgccaacaacauccugagaacccaggagagcgccugcaacugcaucggcggcaacugcuaccugaugaucaccgacggcagcgccagcggcaucagcgagugcagauuccugaagaucagagagggcagaaucaucaaggagaucuuccccaccggcagagugaagcacaccgaggagugcaccugcggcuucgccagcaacaagaccaucgagugcgccugcagagacaacagcuacaccgccaagagacccuucgugaagcugaacguggagaccgacaccgccgagaucagacugaugugcaccgagaccuaccuggacacccccagacccgacgacggcagcaucaccggccccugcgagagcaacggcgacaagggcagcggcggcaucaagggcggcuucgugcaccagagaauggccagcaagaucggcagaugguacagcagaaccaugagcaagaccaagagaaugggcaugggccuguacgugaaguacgacggcgaccccuggaccgacagcgacgcccuggcccugagcggcgugauggugagcauggaggagcccggcugguacagcuucggcuucgagaucaaggacaagaagugcgacgugcccugcaucggcaucgagauggugcacgacggcggcaaggagaccuggcacagcgccgccaccgccaucuacugccugaugggcagcggccagcugcugugggacaccgugaccggcguggacauggcccuguga

SEQ ID NO: 190040 - RNA, 1401 nt, Artificial Sequence; identical to SEQ ID NO: 188674
  derived and/or modified CDS sequence (opt4) from neuraminidase__InfluenzaB__AHL91765

SEQ ID NO: 190041 - RNA, 1401 nt, Artificial Sequence
  derived and/or modified CDS sequence (opt4) from neuraminidase__InfluenzaB__AHL91776
augcugcccagcaccauccagacccugacccuguuccugaccagcggcggcgugcugcugagccuguacgugagcgccagccugagcuaccugcuguacagcgacauccugcugaaguucagccccaccgagaucaccgcccccaccaugccccuggacugcgccaacgccagcaacgugcaggccgugaacagaagcgccaccaagggcgugacccugcugcugcccgagcccgaguggaccuaccccagacugagcugccccggcagcaccuuccagaaggcccugcugaucagcccccacagauucggcgagaccaagggcaacagcgccccccugaucaucagagagcccuucaucgccugcggccccaaggagugcaagcacuucgcccugacccacuacgccgcccagcccggcggcuacuacaacggcaccagaggcgacagaaacaagcugagacaccugaucagcgugaagcugggcaagauccccaccguggagaccagcaucuuccacauggccgccuggagcggcagcgccugccacgacggcaaggaguggaccuacaucggcguggacggccccgacaacaacgcccugcugaagaucaaguacggcgaggccuacaccgacaccuaccacagcuacgccaacaacauccugagaacccaggagagcgccugcaacugcaucggcggcaacugcuaccugaugaucaccgacggcagcgccagcggcgugagcgagugcagauuccugaagaucagagagggcagaaucaucaaggagaucuuccccaccggcagagugaagcacaccgaggagugcaccugcggcuucgccagcaacaagaccaucgagugcgccugcagagacaacagcuacaccgccaagagacccuucgugaagcugaacguggagaccgacaccgccgagaucagacugaugugcaccgagaccuaccuggacacccccagacccgacgacggcagcaucaccggccccugcgagagcaacggcgacaagggcagcggcggcaucaagggcggcuucgugcaccagagaauggccagcaagaucggcagaugguacagcagaaccaugagcaagaccgagagaaugggcaugggccuguacgugaaguacgacggcgaccccugggccgacagcgacgcccuggcccugagcggcgugauggugagcauggaggagcccggcugguacagcuucggcuucgagaucaaggacaagaagugcgacgugcccugcaucggcaucgagauggugcacgacggcggcaaggagaccuggcacagcgccgccaccgccaucuacugccugaugggcagcggccagcugcugugggacaccgugaccggcguggacauggcccuguga

SEQ ID NO: 190042 - RNA, 1401 nt, Artificial Sequence; identical to SEQ ID NO: 190041
  derived and/or modified CDS sequence (opt4) from neuraminidase__InfluenzaB__AHL91787

SEQ ID NO: 190043 - RNA, 1401 nt, Artificial Sequence; identical to SEQ ID NO: 190041
  derived and/or modified CDS sequence (opt4) from neuraminidase__InfluenzaB__AHL91798

SEQ ID NO: 190044 - RNA, 1401 nt, Artificial Sequence; identical to SEQ ID NO: 188678
  derived and/or modified CDS sequence (opt4) from neuraminidase__InfluenzaB__AHL91809

SEQ ID NO: 190045 - RNA, 1401 nt, Artificial Sequence
  derived and/or modified CDS sequence (opt4) from neuraminidase__InfluenzaB__AHL91820
augcugcccagcaccauccagacccugacccuguuccugaccagcggcggcgugcugcugagccuguacgugagcgccagccugagcuaccugcuguacagcgacauccugcugaaguucagccccaccgagaucaccgcccccaccaugccccuggacugcgccaacgccagcaacgugcaggccgugaacagaagcgccaccaagggcgugacccugcugcugcccgagcccgaguggaccuaccccagacugagcugccccggcagcaccuuccagaaggcccugcugaucagcccccacagauucggcgagaccaagggcaacagcgccccccugaucaucagagagcccuucaucgccugcggccccaacgagugcaagcacuucgcccugacccacuacgccgcccagcccggcggcuacuacaacggcaccagaggcgacagaaacaagcugagacaccugaucagcgugaagcugggcaagauccccaccguggagaacagcaucuuccacauggccgccuggagcggcagcgccugccacgacggcaaggaguggaccuacaucggcguggacggccccgacaacaacgcccugcugaagaucaaguacggcgaggccuacaccgacaccuaccacagcuacgccaacaacauccugagaacccaggagagcgccugcaacugcaucggcggcaacugcuaccugauggugaccgacggcagcgccagcggcgugagcgagugcagauuccugaagaucagagagggcagaaucaucaaggagaucuuccccaccggcagagugaagcacaccgaggagugcaccugcggcuucgccagcaacaagaccaucgagugcgccugcagagacaacagcuacaccgccaagagacccuucgugaagcugaacguggagaccgacaccgccgagaucagacugaugugcaccgagaccuaccuggacacccccagacccgacgacggcagcaucaccggccccugcgagagcaacggcgacaagggcagcggcggcaucaagggcggcuucgugcaccagagaauggccagcaagaucggcagaugguacagcagaaccaugagcaagaccgagagaaugggcaugggccuguacgugaaguacgacggcgaccccugggccgacagcgacgcccuggcccugagcggcgugauggugagcauggaggagcccggcugguacagcuucggcuucgagaucaaggacaagaagugcgacgugcccugcaucggcaucgagauggugcacgacggcggcaaggagaccuggcacagcgccgccaccgccaucuacugccugaugggcagcggccagcugcugugggacaccgugaccggcguggacauggcccuguga

SEQ ID NO: 190046 - RNA, 1401 nt, Artificial Sequence
  derived and/or modified CDS sequence (opt4) from neuraminidase__InfluenzaB__AHL91831
augcugcccagcaccauccagacccugacccuguuccugaccagcggcggcgugcugcugagccuguacgugagcgccagccugagcuaccugcuguacagcgacauccugcugaaguucagccccaccgagaucaccgcccccaccaugccccuggacugcgccaacgccagcaacgugcaggccgugaacagaagcgccaccaagggcgugacccugcugcugcccgagcccgaguggaccuaccccagacugagcugccccggcagcaccuuccagaaggcccugcugaucagcccccacagauucggcgagaccaagggcaacagcgccccccugaucaucagagagcccuucaucgccugcggccccaacgagugcaagcacuucgcccugacccacuacgccgcccagcccggcggcuacuacaacggcaccagaggcgacagaaacaagcugagacaccugaucagcgugaagcugggcaagauccccaccguggagaacagcaucuuccacauggccgccuggagcggcagcgccugccacgacggcaaggaguggaccuacaucggcguggacggccccgacaacaacgcccugcugaagaucaaguacggcgaggccuacaccgacaccuaccacagcuacgccaacaacauccugagaacccaggagagcgccugcaacugcaucggcggcaacugcuaccugaugaucaccgacggcagcgccagcggcgugagcgagugcagauuccugaagaucagagagggcagaaucaucaaggagaucuuccccaccggcagagugaagcacaccgaggagugcaccugcggcuucgccagcaacaagaccaucgagugcgccugcagagacaacagcuacaccgccaagagacccuucgugaagcugaacguggagaccgacaccgccgagaucagacugaugugcaccgagaccuaccuggacacccccagacccgacgacggcagcaucaccggccccugcgagagcaacggcgacaagggcagcggcggcaucaagggcggcuucgugcaccagagaaugaccagcaagaucggcagaugguacagcagaaccaugagcaagaccgagagaaugggcaugggccuguacgugaaguacgacggcgaccccugggccgacagcgacgcccuggcccugagcggcgugauggugagcauggaggagcccggcugguacagcuucggcuucgagaucaaggacaagaagugcgacgugcccugcaucggcaucgagauggugcacgacggcggcaaggagaccuggcacagcgccgccaccgccaucuacugccugaugggcagcggccagcugcugugggacaccgugaccggcguggacauggcccuguga

SEQ ID NO: 190047 - RNA, 1401 nt, Artificial Sequence; identical to SEQ ID NO: 189191
  derived and/or modified CDS sequence (opt4) from neuraminidase__InfluenzaB__AHL91842

SEQ ID NO: 190048 - RNA, 1401 nt, Artificial Sequence
  derived and/or modified CDS sequence (opt4) from neuraminidase__InfluenzaB__AHL91853
augcugcccagcaccauccagacccugacccuguuccugaccagcggcggcgugcugcugagccuguacgugagcgccagccugagcuaccugcuguacagcgacauccugcugaaguucagcaccaccgagaucaccgcccccaccaugcccagcgacugcgccaacgccagcaacgugcaggccgugaacagaagcgccaccaagggcgugacccugcugcugcccgagcccgaguggaccuaccccagacugagcugccccggcagcaccuuccagaaggcccugcugaucagcccccacagauucggcgagaccaagggcaacagcgccccccugaucaucagagagcccuucaucgccugcggccccaaggagugcaagcacuucgcccugacccacuacgccgcccagcccggcggcuacuacaacggcaccagagaggacagaaacaagcugagacaccugaucagcgugaagcugggcaagauccccaccguggagaacagcaucuuccacauggccgccuggagcggcagcgccugccacgacggcaaggaguggaccuacaucggcguggacggccccgacagcaacgcccugcugaagaucaaguacggcgaggccuacaccgacaccuaccacagcuacgccaacaacauccugagaacccaggagagcgccugcaacugcaucggcggcaacugcuaccugaugaucaccgacggcagcgccagcggcaucagcgagugcagauuccugaagaucagagagggcagaaucaucaaggagaucuuccccaccggcagagugaagcacaccgaggagugcaccugcggcuucgccagcaacaagaccaucgagugcgccugcagagacaacagcuacaccgccaagagacccuucgugaagcugaacguggagaccgacaccgccgagaucagacugaugugcaccgagaccuaccuggacacccccagacccgacgacggcagcaucaccggccccugcgagagcaacggcaacaagggcagcggcggcaucaagggcggcuucgugcaccagagaauggccagcaagaucggcagaugguacagcagaaccaugagcaagaccaagagaaugggcaugggccuguacgugaaguacgacggcgaccccuggaccgacagcgacgcccuggcccugagcggcgugauggugagcauggaggagcccggcugguacagcuucggcuucgagaucaaggacaagaagugcgacgugcccugcaucggcaucgagauggugcacgacggcggcaaggagaccuggcacagcgccgccaccgccaucuacugccugaugggcagcggccagcugcugugggacaccgugaccggcguggacauggcccuguga

SEQ ID NO: 190049 - RNA, 1401 nt, Artificial Sequence; identical to SEQ ID NO: 189189
  derived and/or modified CDS sequence (opt4) from neuraminidase__InfluenzaB__AHL91864

SEQ ID NO: 190050 - RNA, 1401 nt, Artificial Sequence; identical to SEQ ID NO: 189189
  derived and/or modified CDS sequence (opt4) from neuraminidase__InfluenzaB__AHL91875

SEQ ID NO: 190051 - RNA, 1401 nt, Artificial Sequence; identical to SEQ ID NO: 188946
  derived and/or modified CDS sequence (opt4) from neuraminidase__InfluenzaB__AHL91886

SEQ ID NO: 190052 - RNA, 1401 nt, Artificial Sequence; identical to SEQ ID NO: 188687
  derived and/or modified CDS sequence (opt4) from neuraminidase__InfluenzaB__AHL91897

SEQ ID NO: 190053 - RNA, 1401 nt, Artificial Sequence; identical to SEQ ID NO: 188687
  derived and/or modified CDS sequence (opt4) from neuraminidase__InfluenzaB__AHL91908

SEQ ID NO: 190054 - RNA, 1401 nt, Artificial Sequence
  derived and/or modified CDS sequence (opt4) from neuraminidase__InfluenzaB__AHL91919
augcugcccagcaccauccagacccugacccuguuccugaccagcggcggcgugcugcugagccuguacgugagcgccagccugagcuaccugcuguacagcgacauccugcugaaguucagccagaccgagaucaccgcccccaucaugccccuggacugcgccaacgccagcaacgugcaggccgugaacagaagcgccaccaagggcgugaccccccugcugcccgagcccgaguggaccuaccccagacugagcugccccggcagcaccuuccagaaggcccugcugaucagcccccacagauucggcgagaccaagggcaacagcgccccccugaucaucagagagcccuucaucgccugcggccccaaggagugcaagcacuucgcccugacccacuacgccgcccagcccggcggcuacuacaacggcaccagagaggacagaaacaagcugagacaccugaucagcgugaagcugggcaagauccccaccguggagaacagcaucuuccacauggccgccuggagcggcagcgccugccacgacggcagagaguggaccuacaucggcguggacggccccgacagcaacgcccugcugaagaucaaguacggcgaggccuacaccgacaccuaccacagcuacgccaagaacauccugagaacccaggagagcgccugcaacugcaucggcggcgacugcuaccugaugaucaccgacggccccgccagcggcaucagcgagugcagauuccugaagaucagagagggcagaaucaucaaggagaucuuccccaccggcagagugaagcacaccgaggagugcaccugcggcuucgccagcaacaagaccaucgagugcgccugcagagacaacagcuacaccgccaagagacccuucgugaagcugaacguggagaccgacaccgccgagaucagacugaugugcaccgagaccuaccuggacacccccagacccaacgacggcagcaucaccggccccugcgagagcaacggcgacaagggcagcggcggcaucaagggcggcuucgugcaccagagaauggccagcaagaucggcagaugguacagcagaaccaugagcaagaccaagagaaugggcaugggccuguacgugaaguacgacggcgaccccuggaccgacagcgaggcccuggcccugagcggcgugauggugagcauggaggagcccggcugguacagcuucggcuucgagaucaaggacaagaagugcgacgugcccugcaucggcaucgagauggugcacgacggcggcaagaccaccuggcacagcgccgccaccgccaucuacugccugaugggcagcggccagcugcugugggacaccgugaccggcguggacauggcccuguga

SEQ ID NO: 190055 - RNA, 1401 nt, Artificial Sequence; identical to SEQ ID NO: 189749
  derived and/or modified CDS sequence (opt4) from neuraminidase__InfluenzaB__AHL91930

SEQ ID NO: 190056 - RNA, 1401 nt, Artificial Sequence; identical to SEQ ID NO: 188687
  derived and/or modified CDS sequence (opt4) from neuraminidase__InfluenzaB__AHL91941

SEQ ID NO: 190057 - RNA, 1401 nt, Artificial Sequence; identical to SEQ ID NO: 188687
  derived and/or modified CDS sequence (opt4) from neuraminidase__InfluenzaB__AHL91952

SEQ ID NO: 190058 - RNA, 1401 nt, Artificial Sequence; identical to SEQ ID NO: 188730
  derived and/or modified CDS sequence (opt4) from neuraminidase__InfluenzaB__AHL91963

SEQ ID NO: 190059 - RNA, 1401 nt, Artificial Sequence
  derived and/or modified CDS sequence (opt4) from neuraminidase__InfluenzaB__AHL91974
augcugcccagcaccauccagacccugacccuguuccugaccagcggcggcgugcugcugagccuguacgugagcgccagccugagcuaccugcuguacagcgacauccugcugaaguucagccccaccgagaucaccacccccaccaugccccuggacugcgccaacgccagcaacgugcaggccgugaacagaagcgccaccaagggcgugacccugcugcugcccgagcccgaguggaccuaccccagacugagcugccccggcagcaccuuccagaaggcccugcugaucagcccccacagauucggcgagaccaagggcaacagcgccccccugaucaucagagagcccuucaucgccugcggccccaacgagugcaagcacuucgcccugacccacuacgccgcccagcccggcggcuacuacaacggcaccagaggcgacagaaacaagcugagacaccugaucagcgugaagcugggcaagauccccaccguggagaacagcaucuuccacauggccgccuggagcggcagcgccugccacgacggcaaggaguggaccuacaucggcguggacggccccgacaacaacgcccugcugaagaucaaguacggcgaggccuacaccgacaccuaccacagcuacgccaacaacauccugagaacccaggagagcgccugcaacugcaucggcggcaacugcuaccugaugaucaccgacggcagcgccagcggcgugagcgagugcagauuccugaagaucagagagggcagaaucaucaaggagaucuuccccaccggcagagugaagcacaccgaggagugcaccugcggcuucgccagcaacaagaccaucgagugcgccugcagagacaacagcuacaccgccaagagacccuucgugaagcugaacguggagaccgacaccgccgagaucagacugaugugcaccgacaccuaccuggacacccccagacccgacgacggcagcaucaccggccccugcgagagcaacggcgacaagggcagcggcggcaucaagggcggcuucgugcaccagagaauggccagcaagaucggcagaugguacagcagaaccaugagcaagaccgagagaaugggcaugggccuguacgugaaguacgacggcgaccccugggccgacagcgacgcccuggccuucagcggcgugauggugagcaugaaggagcccggcugguacagcuucggcuucgagaucaaggacaagaagugcgacgugcccugcaucggcaucgagauggugcacgacggcggcaaggagaccuggcacagcgccgccaccgccaucuacugccugaugggcagcggccagcugcugugggacaccgugaccggcguggacauggcccuguga

SEQ ID NO: 190060 - RNA, 1401 nt, Artificial Sequence; identical to SEQ ID NO: 188730
  derived and/or modified CDS sequence (opt4) from neuraminidase__InfluenzaB__AHL91985

SEQ ID NO: 190061 - RNA, 1401 nt, Artificial Sequence; identical to SEQ ID NO: 188687
  derived and/or modified CDS sequence (opt4) from neuraminidase__InfluenzaB__AHL91995

SEQ ID NO: 190062 - RNA, 1401 nt, Artificial Sequence
  derived and/or modified CDS sequence (opt4) from neuraminidase__InfluenzaB__AHL92006
augcugcccagcaccauccagacccugacccuguuccugaccagcggcggcgugcugcugagccuguacgugagcgccagccugagcuaccugcuguacagcgacauccugcugaaguucagccccaccgagaucaccgcccccaccaugccccuggacugcgccaacgccagcaacgugcaggccgugaacagaagcgccaccaagggcgugacccugcugcugcccgagcccgaguggaccuaccccagacugagcugccccggcagcaccuuccagaaggcccugcugaucagcccccacagauucggcgagaccaagggcaacagcgccccccugaucaucagagagcccuucaucgccugcggccccaacgagugcaagcacuucgcccugacccacuacgccgcccagcccggcggcuacuacaacggcaccagaggcgacagaaacaagcugagacaccugaucagcgugaagcugggcaagauccccaccguggagaacagcaucuuccacauggccgccuggagcggcagcgccugccacgacggcaaggaguggaccuacaucggcguggacggccccgacaacaacgcccugcugaagaucaaguacggcgaggccuacaccgacaccuaccacagcuacgccaacaagauccugagaacccaggagagcgccugcaacugcaucggcggcaacugcuaccugaugaucaccgacggcagcgccagcggcgugagcgagugcagauuccugaagaucagagagggcagaaucaucaaggagaucuuccccaccggcagagugaagcacaccgaggagugcaccugcggcuucgccagcaacaagaccaucgagugcgccugcagagacaacagcuacaccgccaagagacccuucgugaagcugaacguggagaccgacaccgccgagaucagacugaugugcaccgacaccuaccuggacacccccagacccgacgacggcagcaucaccggccccugcgagagcaacggcgacaagggcagcggcggcaucaagggcggcuucgugcaccagagaauggccagcaagaucggcagaugguacagcagaaccaugagcaagaccgagagaaugggcaugggccuguacgugaaguacgacggcgaccccugggccgacagcgacgcccuggccuucagcggcgugauggugagcaugaaggagcccggcugguacagcuucggcuucgagaucaaggacaagaagugcgacgugcccugcaucggcguggagauggugcacgacggcggcaaggagaccuggcacagcgccgccaccgccaucuacugccugaugggcagcggccagcugcugugggacaccgugaccggcguggacauggcccuguga

SEQ ID NO: 190063 - RNA, 1401 nt, Artificial Sequence; identical to SEQ ID NO: 188695
  derived and/or modified CDS sequence (opt4) from neuraminidase__InfluenzaB__AHL92017

SEQ ID NO: 190064 - RNA, 1401 nt, Artificial Sequence; identical to SEQ ID NO: 188695
  derived and/or modified CDS sequence (opt4) from neuraminidase__InfluenzaB__AHL92028

SEQ ID NO: 190065 - RNA, 1401 nt, Artificial Sequence
  derived and/or modified CDS sequence (opt4) from neuraminidase__InfluenzaB__AHL92039
augcugcccagcaccauccagacccugacccuguuccugaccagcggcggcgugcugcugagccuguacgugagcgccagccugagcuaccugcuguacagcgacauccugcugaaguucagccccaccgagaucaccgcccccaccaugccccuggacugcgccaacgccagcaacgugcacgccgugaacagaagcgccaccaagggcgugacccugcugcugcccgagcccgaguggaucuaccccagacugagcugccccggcagcaccuuccagaaggcccugcugaucagcccccacagauucggcgagaccaagggcaacagcgccccccugaucaucagagagcccuucaucgccugcggccccaacgagugcaagcacuucgcccugacccacuacgccgcccagcccggcggcuacuacaacggcaccagaggcgacagaaacaagcugagacaccugaucagcgugaagcugggcaagauccccaccguggagaacagcaucuuccacauggccgccuggagcggcagcgccugccacgacggcaaggaguggaccuacaucggcguggacggccccgacaacaacgcccugcugaagaucaaguacggcgaggccuacaccgacaccuaccacagcuacgccaacaacauccugagaacccaggagagcgccugcaacugcaucggcggcaacugcuaccugaugaucaccgacggcagcgccagcggcgugagcgagugcagauuccugaagaucagagagggcagaaucaucaaggagaucuuccccaccggcagagugaagcacaccgaggagugcaccugcggcuucgccagcaacaagaccaucgagugcgccugcagagacaacagcuacaccgccaagagacccuucgugaagcugaacguggagaccgacaccgccgagaucagacugaugugcaccgacaccuaccuggacacccccagacccgacgacggcagcaucaccggccccugcgagagcaacggcgacaagggcagcggcggcaucaagggcggcuucgugcaccagagaauggccagcaagaucggcagaugguacagcagaaccaugagcaagaccgagagaaugggcaugggccuguacgugaaguacaacggcgaccccugggccgacagcgacgcccuggccuucagcggcgugauggugagcaugaaggagcccggcugguacagcuucggcuucgagaucaaggacaagaagugcgacgugcccugcaucggcaucgagauggugcacgacggcggcaaggagaccuggcacagcgccgccaccgccaucuacugccugaugggcagcggccagcugcugugggacaccgugaccggcguggacauggcccuguga

SEQ ID NO: 190066 - RNA, 1401 nt, Artificial Sequence; identical to SEQ ID NO: 188695
  derived and/or modified CDS sequence (opt4) from neuraminidase__InfluenzaB__AHL92050

SEQ ID NO: 190067 - RNA, 1401 nt, Artificial Sequence
  derived and/or modified CDS sequence (opt4) from neuraminidase__InfluenzaB__AHL92061
augcugcccagcaccacccagacccugacccuguuccugaccagcggcggcgugcugcugagccuguacgugagcgccagccugagcuaccugcuguacagcgacauccugcugaaguucagccccaccgagaucaccgcccccaccaugccccuggacugcgccaacgccagcaacgugcaggccgugaacagaagcgccaccaagggcgugacccugcugcugcccgagcccgaguggaccuaccccagacugagcugccccggcagcaccuuccagaaggcccugcugaucagcccccacagauucggcgagaccaagggcaacagcgccccccugaucaucagagagcccuucaucgccugcggccccaacgagugcaagcacuucgcccugacccacuacgccgcccagcccggcggcuacuacaacggcaccagaggcgacagaaacaagcugagacaccugaucagcgugaagcugggcaagauccccaccguggagaacagcaucuuccacauggccgccuggagcggcagcgccugccacgacggcaaggaguggaccuacaucggcguggacggccccgacaacaacgcccugcugaagaucaaguacggcgaggccuacaccgacaccuaccacagcuacgccaacaagauccugagaacccaggagagcgccugcaacugcaucggcggcaacugcuaccugaugaucaccgacggcagcgccagcggcgugagcgagugcagauuccugaagaucagagagggcagaaucaucaaggagaucuuccccaccggcagagugaagcacaccgaggagugcaccugcggcuucgccagcaacaagaccaucgagugcgccugcagagacaacagcuacaccgccaagagacccuucgugaagcugaacguggagaccgacaccgccgagaucagacugaugugcaccgacaccuaccuggacacccccagacccgacgacggcagcaucaccggccccugcgagagcaacggcgacaagggcagcggcggcaucaagggcggcuucgugcaccagagaauggccagcaagaucggcagaugguacagcagaaccaugagcaagaccgagagaaugggcaugggccuguacgugaaguacgacggcgaccccugggccgacagcgacgcccuggccuucagcggcgugauggugagcaugaaggagcccggcugguacagcuucggcuucgagaucaaggacaagaagugcgacgugcccugcaucggcaucgagauggugcacgacggcggcaaggagaccuggcacagcgccgccaccgccaucuacugccugaugggcagcggccagcugcugugggacaccgugaccggcguggacauggcccuguga

SEQ ID NO: 190068 - RNA, 1401 nt, Artificial Sequence
  derived and/or modified CDS sequence (opt4) from neuraminidase__InfluenzaB__AHL92072
augcugcccagcaccauccagacccugacccuguuccugaccagcggcggcgugcugcugagccuguacgugagcgccagccugagcuaccugcuguacagcgacauccugcugaaguucagccccaccgagaucaccgcccccaccaugccccuggacugcgccaacgccagcaacgugcaggccgugaaccacagcgccaccaagggcgugacccugcugcugcccgagcccgaguggaccuaccccagacugagcugccccggcagcaccuuccagaaggcccugcugaucagcccccacagauucggcgagaccaagggcaacagcgccccccugaucaucagagagcccuucaucgccugcggccccaacgagugcaagcacuucgcccugacccacuacgccgcccagcccggcggcuacuacaacggcaccagaggcgacagaaacaagcugagacaccugaucagcgugaagcugggcaagauccccaccguggagaacagcaucuuccacauggccgccuggagcggcagcgccugccacgacggcaaggaguggaccuacaucggcguggacggccccgacaacaacgcccugcugaagaucaaguacggcgaggccuacaccgacaccuaccacagcuacgccaacaagauccugagaacccaggagagcgccugcaacugcaucggcggcaacugcuaccugaugaucaccgacggcagcgccagcggcgugagcgagugcagauuccugaagaucagagagggcagaaucaucaaggagaucuuccccaccggcagagugaagcacaccgaggagugcaccugcggcuucgccagcaacaagaccaucgagugcgccugcagagacaacagcuacaccgccaagagacccuucgugaagcugaacguggagaccgacaccgccgagaucagacugaugugcaccgacaccuaccuggacacccccagacccgacgacggcagcaucaccggccccugcgagagcaacggcgacaagggcagcggcggcaucaagggcggcuucgugcaccagagaauggccagcaagaucggcagaugguacagcagaaccaugagcaagaccgagagaaugggcaugggccuguacgugaaguacgacggcgaccccugggccgacagcgacgcccuggccuucagcggcgugauggugagcaugaaggagcccggcugguacagcuucggcuucgagaucaaggacaagaagugcgacgugcccugcaucggcaucgagauggugcacgacggcggcaaggagaccuggcacagcgccgccaccgccaucuacugccugaugggcagcggccagcugcugugggacaccgugaccggcguggacauggcccuguga

SEQ ID NO: 190069 - RNA, 1401 nt, Artificial Sequence; identical to SEQ ID NO: 190068
  derived and/or modified CDS sequence (opt4) from neuraminidase__InfluenzaB__AHL92083

SEQ ID NO: 190070 - RNA, 1401 nt, Artificial Sequence; identical to SEQ ID NO: 190068
  derived and/or modified CDS sequence (opt4) from neuraminidase__InfluenzaB__AHL92094

SEQ ID NO: 190071 - RNA, 1401 nt, Artificial Sequence
  derived and/or modified CDS sequence (opt4) from neuraminidase__InfluenzaB__AHL92105
augcugcccagcaccauccagacccugacccuguuccugaccagcggcggcgugcugcugagccuguacgugagcgccagccugagcuaccugcuguacagcgacauccugcugaaguucagccccaccgagaucaccgcccccaccaugccccuggacugcgccaacgccagcaacgugcacgccgugaacagaagcgccaccaagggcgugacccugcugcugcccgagcccgaguggaccuaccccagacugagcugccccggcagcaccuuccagaaggcccugcugaucagcccccacagauucggcgagaccaagggcaacagcgccccccugaucaucagagagcccuucaucgccugcggccccaacgagugcaagcacuucgcccugacccacuacgccgcccagcccggcggcuacuacaacggcaccagaggcgacagaaacaagcugagacaccugaucagcgugaagcugggcaagauccccaccguggagaacagcaucuuccacauggccgccuggagcggcagcgccugccacgacggcaaggaguggaccuacaucggcguggacggccccgacaacaacgcccugcugaagaucaaguacggcgaggccuacaccgacaccuaccacagcuacgccaacaacauccugagaacccaggagagcgccugcaacugcaucggcggcaacugcuaccugaugaucaccgacggcagcgccagcggcgugagcgagugcagauuccugaagaucagagagggcagaaucaucaaggagaucuuccccaccggcagagugaagcacaccgaggagugcaccugcggcuucgccagcaacaagaccaucgagugcgccugcagagacaacagcuacaccgccaagagacccuucgugaagcugaacguggagaccgacaccgccgagaucagacugaugugcaccgacaccuaccuggacacccccagacccgacgacggcagcaucaccggccccugcgagagcaacggcgacaagggcggcggcggcaucaagggcggcuucgugcaccagagaauggccagcaagaucggcagaugguacagcagaaccaugagcaagaccgagagaaugggcaugggccuguacgugaaguacgacggcgaccccugggccgacagcgacgcccuggccuucagcggcgugauggugagccugaaggagcccggcugguacagcuucggcuucgagaucaaggacaagaagugcgacgugcccugcaucggcaucgagauggugcacgacggcggcaaggagaccuggcacagcgccgccaccgccaucuacugccugaugggcagcggccagcugcugugggacaccgugaccggcguggacauggcccuguga

SEQ ID NO: 190072 - RNA, 1401 nt, Artificial Sequence; identical to SEQ ID NO: 188848
  derived and/or modified CDS sequence (opt4) from neuraminidase__InfluenzaB__AHL92116

SEQ ID NO: 190073 - RNA, 1401 nt, Artificial Sequence; identical to SEQ ID NO: 190068
  derived and/or modified CDS sequence (opt4) from neuraminidase__InfluenzaB__AHL92127

SEQ ID NO: 190074 - RNA, 1401 nt, Artificial Sequence; identical to SEQ ID NO: 190068
  derived and/or modified CDS sequence (opt4) from neuraminidase__InfluenzaB__AHL92138

SEQ ID NO: 190075 - RNA, 1401 nt, Artificial Sequence; identical to SEQ ID NO: 190068
  derived and/or modified CDS sequence (opt4) from neuraminidase__InfluenzaB__AHL92149

SEQ ID NO: 190076 - RNA, 1401 nt, Artificial Sequence
  derived and/or modified CDS sequence (opt4) from neuraminidase__InfluenzaB__AHL92171
augcugcccagcaccauccagacccugacccuguuccugaccagcggcggcgugcugcugagccuguacgugagcgccagccugagcuaccugcuguacagcgacauccugcugaaguucagccccaccgagaucaccgcccccaccaugccccuggacugcgccaacgccagcaacgugcaggccgugaaccacagcgccaccaagggcgugacccugcugcugcccgagcccgaguggaccuaccccagacugagcugccccggcagcaccuuccagaaggcccugcuggugagcccccacagauucggcgagaccaagggcaacagcgccccccugaucaucagagagcccuucaucgccugcggccccaacgagugcaagcacuucgcccugacccacuacgccgcccagcccggcggcuacuacaacggcaccagaggcgacagaaacaagcugagacaccugaucagcgugaagcugggcaagauccccaccguggagaacagcaucuuccacauggccgccuggagcggcagcgccugccacgacggcaaggaguggaccuacaucggcguggacggccccgacaacaacgcccugcugaagaucaaguacggcgaggccuacaccgacaccuaccacagcuacgccaacaagauccugagaacccaggagagcgccugcaacugcaucggcggcaacugcuaccugaugaucaccgacggcagcgccagcggcgugagcgagugcagauuccugaagaucagagagggcagaaucaucaaggagaucuuccccaccggcagagugaagcacaccgaggagugcaccugcggcuucgccagcaacaagaccaucgagugcgccugcagagacaacagcuacaccgccaagagacccuucgugaagcugaacguggagaccgacaccgccgagaucagacugaugugcaccgacaccuaccuggacacccccagacccgacgacggcagcaucaccggccccugcgagagcaacggcgacaagggcagcggcggcaucaagggcggcuucgugcaccagagaauggccagcaagaucggcagaugguacagcagaaccaugagcaagaccgagagaaugggcaugggccuguacgugaaguacgacggcgaccccugggccgacagcgacgcccuggccuucagcggcgugauggugagcaugaaggagcccggcugguacagcuucggcuucgagaucaaggacaagaagugcgacgugcccugcaucggcaucgagauggugcacgacggcggcaaggagaccuggcacagcgccgccaccgccaucuacugccugaugggcagcggccagcugcugugggacaccgugaccggcguggacauggcccuguga

SEQ ID NO: 190077 - RNA, 1401 nt, Artificial Sequence
  derived and/or modified CDS sequence (opt4) from neuraminidase__InfluenzaB__AHL92182
augcugcccagcaccauccagacccugacccuguuccugaccagcggcggcgugcugcugagccuguacgugagcgccagccugagcuaccugcuguacagcgacauccugcugaaguucagccccaccgagaucaccgcccccaccaugccccuggacugcgccaacgccagcaacgugcacgccgugaacagaagcgccaccaagggcgugacccugcugcugcccgagcccgagugggccuaccccagacugagcugccccggcagcaccuuccagaaggcccugcugaucagcccccacagauucggcgagaccaagggcaacagcgccccccugaucaucagagagcccuucaucgccugcggccccaacgagugcaagcacuucgcccugacccacuacgccgcccagcccggcggcuacuacagcggcaccagaggcgacagaaacaagcugagacaccugaucagcgugaagcugggcaagauccccaccguggagaacagcaucuuccacauggccgccuggagcggcagcgccugccacgacggcaaggaguggaccuacaucggcguggacggccccgacaacaacgcccugcugaagaucaaguacggcgaggccuacaccgacaccuaccacagcuacgccaacaacauccugagaacccaggagagcgccugcaacugcaucggcggcaacugcuaccugaugaucaccgacggcagcgccagcggcgugagcgagugcagauuccugaagaucagagagggcagaaucaucaaggagaucuuccccaccggcagagugaagcacaccgaggagugcaccugcggcuucgccagcaacaagaccaucgagugcgccugcagagacaacagcuacaccgccaagagacccuucgugaagcugaacguggagaccgacaccgccgagaucagacugaugugcaccgacaccuaccuggacacccccagacccgacgacggcagcaucaccggccccugcgagagcaacggcgacaagggcagcggcggcaucaagggcggcuucgugcaccagagaauggccagcaagaucggcagaugguacagcagaaccaugagcaagaccgagagaaugggcaugggccuguacgugaaguacgacggcgaccccugggccgacagcgacgcccuggccuucagcggcgugauggugagcaugaaggagcccggcugguacagcuucggcuucgagaucaaggacaagaagugcgacgugcccugcaucggcaucgagauggugcacgacggcggcaaggagaccuggcacagcgccgccaccgccaucuacugccugaugggcagcggccagcugcugugggacaccgugaccggcguggacauggcccuguga

SEQ ID NO: 190078 - RNA, 1401 nt, Artificial Sequence; identical to SEQ ID NO: 190077
  derived and/or modified CDS sequence (opt4) from neuraminidase__InfluenzaB__AHL92193

SEQ ID NO: 190079 - RNA, 1401 nt, Artificial Sequence; identical to SEQ ID NO: 188848
  derived and/or modified CDS sequence (opt4) from neuraminidase__InfluenzaB__AHL92204

SEQ ID NO: 190080 - RNA, 1401 nt, Artificial Sequence
  derived and/or modified CDS sequence (opt4) from neuraminidase__InfluenzaB__AHL92215
augcugcccagcaccauccagacccugacccuguuccugaccagcggcggcgugcugcugagccuguacgugagcgccagccugagcuaccugcuguacagcgacauccugcugaaguucagccccaccgagaucaccgcccccaccaugccccuggacugcgccaacgccagcaacgugcaggccgugaaccacagcgccaccaagggcgugacccugcugcugcccgagcccgaguggaccuaccccagacugagcugccccggcagcaccuuccagaaggcccugcugaucagcccccacagauucggcgagaccaagggcaacagcgccccccugaucaucagagagcccuucaucgccugcggccccaacgagugcaagcacuucgcccugacccacuacgccgcccagcccggcggcuacuacaacggcaccagaggcgacagaaacaagcugagacaccugaucagcgugaagcugggcaagauccccaccguggagaacagcaucuuccacauggccgccuggagcggcagcgccugccacgacggcaaggaguggaccuacaucggcguggacggccccgacaacaacgcccugcugaagaucaaguacggcgaggccuacaccgacaccuaccacagcuacgccaacaagauccugagaacccaggagagcgccugcaacugcaucggcggcaacugcuaccugaugaucaccgacggcagcgccagcggcgugagcgagugcagauuccugaagaucagagagggcagaaucaucaaggagaucuuccccaagggcagagugaagcacaccgaggagugcaccugcggcuucgccagcaacaagaccaucgagugcgccugcagagacaacagcuacaccgccaagagacccuucgugaagcugaacguggagaccgacaccgccgagaucagacugaugugcaccgacaccuaccuggacacccccagacccgacgacggcagcaucaccggccccugcgagagcaacggcgacaagggcagcggcggcaucaagggcggcuucgugcaccagagaauggccagcaagaucggcagaugguacagcagaaccaugagcaagaccgagagaaugggcaugggccuguacgugaaguacgacggcgaccccugggccgacagcgacgcccuggccuucagcggcgugauggugagcaugaaggagcccggcugguacagcuucggcuucgagaucaaggacaagaagugcgacgugcccugcaucggcaucgagauggugcacgacggcggcaaggagaccuggcacagcgccgccaccgccaucuacugccugaugggcagcggccagcugcugugggacaccgugaccggcguggacauggcccuguga

SEQ ID NO: 190081 - RNA, 1401 nt, Artificial Sequence; identical to SEQ ID NO: 190068
  derived and/or modified CDS sequence (opt4) from neuraminidase__InfluenzaB__AHL92226

SEQ ID NO: 190082 - RNA, 1401 nt, Artificial Sequence; identical to SEQ ID NO: 188848
  derived and/or modified CDS sequence (opt4) from neuraminidase__InfluenzaB__AHL92237

SEQ ID NO: 190083 - RNA, 1401 nt, Artificial Sequence; identical to SEQ ID NO: 190068
  derived and/or modified CDS sequence (opt4) from neuraminidase__InfluenzaB__AHL92248

SEQ ID NO: 190084 - RNA, 1401 nt, Artificial Sequence
  derived and/or modified CDS sequence (opt4) from neuraminidase__InfluenzaB__AHL92259
augcugcccagcaccauccagacccugacccuguuccugaccagcggcggcgugcugcugagccuguacgugagcgccagccugagcuaccugcuguacagcgacauccugcugaaguucagccccaccgagaucaccgccagcaccaugccccuggacugcgccaacgccagcaacgugcaggccgugaacagaagcgccaccaagggcgugacccugcugcugcccgagcccgaguggaccuaccccagacugagcugccccggcagcaccuuccagaaggcccugcugaucagcccccacagauucggcgagaccaagggcaacagcgccccccugaucaucagagagcccuucaucgccugcggccccaacgagugcaagcacuucgcccugacccacuacgccgcccagcccggcggcuacuacaacggcaccagaggcgacagaaacaagcugagacaccugaucagcgugaagcugggcaagauccccaccguggagaacagcaucuuccacauggccgccuggagcggcagcgccugccacgacggcaaggaguggaccuacaucggcguggacggccccgacaacgacgcccugcugaagaucaaguacggcgaggccuacaccgacaccuaccacagcuacgccaacaagauccugagaacccaggagagcgccugcaacugcaucggcggcaacugcuaccugaugaucaccgacggcagcgccagcggcgugagcgagugcagauuccugaagaucagagagggcagaaucaucaaggagaucuuccccaccggcagagugaagcacaccgaggagugcaccugcggcuucgccagcaacaagaccaucgagugcgccugcagagacaacagcuacaccgccaagagacccuucgugaagcugaacguggagaccgacaccgccgagaucagacugaugugcaccgacaccuaccuggacacccccagacccgacgacggcagcaucaccggccccugcgagagcaacggcgacaagggcagcggcggcaucaagggcggcuucgugcaccagagaaugaccagcaagaucggcagaugguacagcagaaccaugagcaagaccgagagaaugggcaugggccuguacgugaaguacgacggcgaccccugggccgacagcgacgcccuggccuucagcggcgugauggugagcaugaaggagcccggcugguacagcuucggcuucgagaucaaggacaagaagugcgacgugcccugcaucggcaucgagauggugcacgacggcggcaaggagaccuggcacagcgccgccaccgccaucuacugccugaugggcagcggccagcugcugugggacaccgugaccggcguggacauggcccuguga

SEQ ID NO: 190085 - RNA, 1401 nt, Artificial Sequence; identical to SEQ ID NO: 190068
  derived and/or modified CDS sequence (opt4) from neuraminidase__InfluenzaB__AHL92270

SEQ ID NO: 190086 - RNA, 1401 nt, Artificial Sequence
  derived and/or modified CDS sequence (opt4) from neuraminidase__InfluenzaB__AHL92281
augcugcccagcaccauccagacccugacccuguuccugaccagcggcggcgugcugcugagccuguacgugagcgccagccugagcuaccugcuguacagcgacauccugcugaaguucagccccaccgagaucaccgcccccaccaugccccuggacugcgccaacgccagcaacgugcaggccgccaaccacagcgccaccaagggcgugacccugcugcugcccgagcccgaguggaccuaccccagacugagcugccccggcagcaccuuccagaaggcccugcugaucagcccccacagauucggcgagaccaagggcaacagcgccccccugaucaucagagagcccuucaucgccugcggccccaacgagugcaagcacuucgcccugacccacuacgccgcccagcccggcggcuacuacaacggcaccagaggcgacagaaacaagcugagacaccugaucagcgugaagcugggcaagauccccaccguggagaacagcaucuuccacauggccgccuggagcggcagcgccugccacgacggcaaggaguggaccuacaucggcguggacggccccgacaacaacgcccugcugaagaucaaguacggcgaggccuacaccgacaccuaccacagcuacgccaacaagauccugagaacccaggagagcgccugcaacugcaucggcggcaacugcuaccugaugaucaccgacggcagcgccagcggcgugagcgagugcagauuccugaagaucagagagggcagaaucaucaaggagaucuuccccaccggcagagugaagcacaccgaggagugcaccugcggcuucgccagcaacaagaccaucgagugcgccugcagagacaacagcuacaccgccaagagacccuucgugaagcugaacguggagaccgacaccgccgagaucagacugaugugcaccgacaccuaccuggacacccccagacccgacgacggcagcaucaccggccccugcgagagcaacggcgacaagggcagcggcggcaucaagggcggcuucgugcaccagagaauggccagcaagaucggcagaugguacagcagaaccaugagcaagaccgagagaaugggcaugggccuguacgugaaguacgacggcgaccccugggccgacagcgacgcccuggccuucagcggcgugauggugagcaugaaggagcccggcugguacagcuucggcuucgagaucaaggacaagaagugcgacgugcccugcaucggcaucgagauggugcacgacggcggcaaggagaccuggcacagcgccgccaccgccaucuacugccugaugggcagcggccagcugcugugggacaccgugaccggcguggacauggcccuguga

SEQ ID NO: 190087 - RNA, 1401 nt, Artificial Sequence
  derived and/or modified CDS sequence (opt4) from neuraminidase__InfluenzaB__AHL92303
augcugcccagcaccauccagacccugacccuguuccugaccagcggcggcgugcugcugagccuguacgugagcgccagccugagcuaccugcuguacagcgacauccugcugaaguucagccccaccgagaucaccgcccccaccaugccccuggacugcgccaacgccagcaacgugcacgccgugaacagaagcgccaccaagggcgugaccuuccugcugcccgagcccgaguggaccuaccccagacugagcugccccggcagcaccuuccagaaggcccugcugaucagcccccacagauucggcgagaccaagggcaacagcgccccccugaucaucagagagcccuucaucgccugcggccccaacgagugcaagcacuucgcccugacccacuacgccgcccagcccggcggcuacuacaacggcaccagaggcgacagaaacaagcugagacaccugaucagcgugaagcugggcaagauccccaccguggagaacagcaucuuccacauggccgccuggagcggcagcgccugccacgacggcaaggaguggaccuacaucggcguggacggccccgacaacaacgcccugcugaagaucaaguacggcgaggccuacaccgacaccuaccacagcuacgccaacaacauccugagaacccaggagagcgccugcaacugcaucggcggcaacugcuaccugaugaucaccgacggcagcgccagcggcgugagcgagugcagauuccugaagaucagagagggcagaaucaucaaggagaucuuccccaccggcagagugaagcacaccgaggagugcaccugcggcuucgccagcaacaagaccaucgagugcgccugcagagacaacagcuacaccgccaagagacccuucgugaagcugaacguggagaccgacaccgccgagaucagacugaugugcaccgacaccuaccuggacacccccagacccgacgacggcagcaucaccggccccugcgagagcaacggcaacaagggcagcggcggcaucaagggcggcuucgugcaccagagaauggccagcaagaucggcagaugguacagcagaaccaugagcaagaccgagagaaugggcaugggccuguacgugaaguacgacggcgaccccugggccgacagcgacgcccuggccuucagcggcgugauggugagcaugaaggagcccggcugguacagcuucggcuucgagaucaaggacaagaagugcgacgugcccugcaucggcaucgagauggugcacgacggcggcaaggagaccuggcacagcgccgccaccgccaucuacugccugaugggcagcggccagcugcugugggacaccgugaccggcguggacauggcccuguga

SEQ ID NO: 190088 - RNA, 1401 nt, Artificial Sequence
  derived and/or modified CDS sequence (opt4) from neuraminidase__InfluenzaB__AHL92314
augcugcccagcaccauccagacccugacccuguuccugaccagcggcggcgugcugcugagccuguacgugagcgccagccugagcuaccugcuguacagcgacauccugcugaaguucagccagaccaagaucaccgcccccaucaugccccuggacugcgccaacgccagcaacgugcaggccgugaacagaagcgccgccaagggcgugacccugcugcugcccgagcccgaguggaccuaccccagacugagcugccccggcagcaccuuccagaaggcccugcugaucagcccccacagauucggcgagaccaagggcaacagcgccccccugaucaucagagagcccuucaucgccugcggccccaccgagugcaagcacuucgcccugacccacuacgccgcccagcccggcggcuacuacaacggcaccagagaggacagaaacaagcugagacaccugaucagcgugaagcugggcaagauccccaccguggagaacagcaucuuccacauggccgccuggagcggcagcgccugccacgacggcaaggaguggaccuacgugggcguggacggccccgacagcaacgcccugcugaagaucaaguacggcgaggccuacaccgacaccuaccacagcuacgccaagaacauccugagaacccaggagagcgccugcaacugcaucggcggcgacugcuaccugaugaucaccgacggccccgccagcggcaucagcgagugcagauuccugaagaucagagagggcagaaucaucaaggagaucuuccccaccggcagagugaagcacaccgaggagugcaccugcggcuucgccagcaacaagaccaucgagugcgccugcagagacaacagcuacaccgccaagagacccuucgugaagcugaacguggagaccgacaccgccgagaucagacugaugugcaccgagaccuaccuggacacccccagacccaacgacggcagcaucaccggccccugcgagagcgacggcgacaagggcagcggcggcaucaagggcggcuucgugcaccagagaauggccagcaagaucggcagaugguacagcagaaccaugagcaagaccaagagaaugggcaugggccuguacgugaaguacgacggcgaccccuggaccgacagcgaggcccuggcccugagcggcgugauggugagcauggacgagcccggcugguacagcuucggcuucgagaucaaggacaagaagugcgacgugcccugcaucggcaucgagauggugcacgacggcggcaagaccaccuggcacagcgccgccaccgccaucuacugccugaugggcagcggccagcugcugugggacaccgugaccggcguggacauggcccuguga

SEQ ID NO: 190089 - RNA, 1401 nt, Artificial Sequence
  derived and/or modified CDS sequence (opt4) from neuraminidase__InfluenzaB__AHL92325
augcugcccagcaccauccagacccugacccuguuccugaccagcggcggcgugcugcugagccuguacgugagcgccagccugagcuaccugcuguacagcgacauccugcugaaguucagccagaccgagaucaccgcccccaucaugccccuggacugcgccaacgccagcaacgugcaggccgugaacagaagcgccgccaagggcgugacccugcugcugcccgagcccgaguggaccuaccccagacugagcugccccggcagcaccuuccagaaggcccugcugaucagcccccacagauucggcgagaccaagggcaacagcgccccccugaucaucagagagcccuucaucgccugcggccccaccgagugcaagcacuucgcccugacccacuacgccgcccagcccggcggcuacuacaacggcaccagagaggacagaaacaagcugagacaccugaucagcgugaagcugggcaagauccccaccguggagaacagcaucuuccacauggccgccuggagcggcagcgccugccacgacggcaaggaguggaccuacaucggcguggacggccccgacagcaacgcccugcugaagaucaaguacggcgaggccuacaccgacaccuaccacagcuacgccaagaacauccugagaacccaggagagcgccugcaacugcaucggcggcgacugcuaccugaugaucaccgacggccccgccagcggcaucagcgagugcagauuccugaagaucagagagggcagaaucaucaaggagaucuuccccaccggcagagugaagcacaccgaggagugcaccugcggcuucgccagcaacaagaccaucgagugcgccugcagagacaacagcuacaccgccaagagacccuucgugaagcugaacguggagaccgacaccgccgagaucagacugaugugcaccgagaccuaccuggacacccccagacccaacgacggcagcaucaccggccccugcgagagcgacggcgacaagggcagcggcggcaucaagggcggcuucgugcaccagagaauggccagcaagaucggcagaugguacagcagaaccaugagcaagaccaagagaaugggcaugggccuguacgugaaguacgacggcgaccccuggaccgacagcgaggcccuggcccugagcggcgugauggugagcaugggcgagcccggcugguacagcuucggcuucgagaucaaggacaagaagugcgacgugcccugcaucggcaucgagauggugcacgacggcggcaagaccaccuggcacagcgccgccaccgccaucuacugccugaugggcagcggccagcugcugugggacaccgugaccggcguggacauggcccuguga

SEQ ID NO: 190090 - RNA, 1401 nt, Artificial Sequence; identical to SEQ ID NO: 188848
  derived and/or modified CDS sequence (opt4) from neuraminidase__InfluenzaB__AHL92336

SEQ ID NO: 190091 - RNA, 1401 nt, Artificial Sequence
  derived and/or modified CDS sequence (opt4) from neuraminidase__InfluenzaB__AHL92358
augcugcccagcaccauccagacccugacccuguuccugaccagcggcggcgugcugcugagccuguacgugagcgccagccugagcuaccugcuguacagcgacauccugcugaaguucagccagaccgagaucaccgcccccaucaugccccuggacugcgccaacgccagcaacgugcaggccgugaacagaagcgccgccaagggcgugacccugcugcugcccgagcccgaguggaccuaccccagacugagcugccccggcagcaccuuccagaaggcccugcugaucagcccccacagauucggcgagaccaagggcaacagcgccccccugaucaucagagagcccuucaucgccugcggccccaaggagugcaagcacuucgcccugacccacuacgccgcccagcccggcggcuacuacaacggcaccagagaggacagaaacaagcugagacaccugaucagcgugaagcugggcaagauccccaccguggagaacagcaucuuccacauggccgccuggagcggcagcgccugccacgacggcaaggaguggaccuacgugggcguggacggccccgacagcaacgcccugcugaagaucaaguacggcgaggccuacaccgacaccuaccacagcuacgccaagaacauccugagaacccaggagagcgccugcaacugcaucggcggcgacugcuaccugaugaucaccgacggccccgccagcggcaucagcgagugcagauuccugaagaucagagagggcagaaucaucaaggagaucuuccccaccggcagagugaagcacaccgaggagugcaccugcggcuucgccagcaacaagaccaucgagugcgccugcagagacaacagcuacaccgccaagagacccuucgugaagcugaacguggagaccgacaccgccgagaucagacugaugugcaccgagaccuaccuggacacccccagacccaacgacggcagcaucaccggccccugcgagagcgacggcgacaagggcagcggcggcaucaagggcggcuucgugcaccagagaauggccagcaagaucggcagaugguacagcagaaccaugagcaagaccaagagaaugggcaugggccuguacgugaaguacgacggcgaccccuggaccgacagcgaggcccuggcccugagcggcgugauggugagcauggaggagcccggcugguacagcuucggcuucgagaucaaggacaagaagugcgacgugcccugcaucggcaucgagauggugcacgacggcggcaagaccaccuggcacagcgccgccaccgccaucuacugccugaugggcagcggccagcugcugugggacaccgugaccggcguggacauggcccuguga

SEQ ID NO: 190092 - RNA, 1401 nt, Artificial Sequence; identical to SEQ ID NO: 190091
  derived and/or modified CDS sequence (opt4) from neuraminidase__InfluenzaB__AHL92369

SEQ ID NO: 190093 - RNA, 1401 nt, Artificial Sequence
  derived and/or modified CDS sequence (opt4) from neuraminidase__InfluenzaB__AHL92380
augcugcccagcaccauccagacccugacccuguuccugaccagcggcggcgugcugcugagccuguacgugagcgccagccugagcuaccugcuguacagcgacauccugcugaaguucagcagaaccgagaucaccgcccccaucaugccccuggacugcgccaacgccagcaacgugcaggccgugaacagaagcgccaccaagggcgugaagcugcugcugcccgagcccgaguggaccuaccccagacugagcugccccggcagcaccuuccagaaggcccugcugaucagcccccacagauucggcgagaccaagggcaacagcgccccccugaucaucagagagcccuucaucgccugcggccccaaggagugcaagcacuucgcccugacccacuacgccgcccagcccggcggcuacuacaacggcaccagagaggacagaaacaagcugagacaccugaucagcgugaagcugggcaagauccccaccguggagaacagcaucuuccacauggccgccuggagcggcagcgccugccacgacggcagagaguggaccuacaucggcguggacggccccgacagcaacgcccugcugaagaucaaguacggcgaggccuacaccgacaccuaccacagcuacgccaagaacauccugagaacccaggagagcgccugcaacugcaucggcggcgacugcuaccugaugaucaccgacggccccgccagcggcaucagcgagugcagauuccugaagaucagagagggcagaaucaucaaggagaucuuccccaccggcagagugaagcacaccgaggagugcaccugcggcuucgccagcaacaagaccaucgagugcgccugcagagacaacagcuacaccgccaagagacccuucgugaagcugaacguggagaccgacaccgccgagaucagacugaugugcaccgagaccuaccuggacacccccagacccaacgacggcagcaucaccggccccugcgagagcaacggcgacaagggcagcggcggcaucaagggcggcuucgugcaccagagaauggccagcaagaucggcagaugguacagcagaaccaugagcaagaccaagagaaugggcaugggccuguacgugaaguacgacggcgaccccuggaccgacagcgaggcccuggcccugagcggcgugauggugagcauggaggagcccggcugguacagcuucggcuucgagaucaaggacaagaagugcgacgugcccugcaucggcaucgagauggugcacgacggcggcaagaccaccuggcacagcgccgccaccgccaucuacugccugaugggcagcggccagcugcugugggacaccgugaccggcgugaacaugacccuguga

SEQ ID NO: 190094 - RNA, 1401 nt, Artificial Sequence
  derived and/or modified CDS sequence (opt4) from neuraminidase__InfluenzaB__AHL92391
augcugcccagcaccauccagacccugacccuguuccugaccagcggcggcgugcugcugagccuguacgugagcgccagccugagcuaccugcuguacagcgacauccugcugaaguucagcagaaccgagaucaccgcccccaucaugccccuggacugcgccaacgccagcaacgugcaggccgugaacagaagcgccaccaagggcgugacccugcugcugcccgagcccgaguggaccuaccccagacugagcugccccggcagcaccuuccagaaggcccugcugaucagcccccacagauucggcgagaccaagggcaacagcgccccccugaucaucagagagcccuucaucgccugcggccccaaggagugcaagcacuucgcccugacccacuacgccgcccagcccggcggcuacuacaacggcaccagagaggacagaagcaagcugagacaccugaucagcgugaagcugggcaagauccccaccguggagaacagcaucuuccacauggccgccuggagcggcagcgccugccacgacggcagagaguggaccuacaucggcguggacggccccgacagcaacgcccugcugaagaucaaguacggcgaggccuacaccgacaccuaccacagcuacgccaagaacauccugagaacccaggagagcgccugcaacugcaucggcggcgacugcuaccugaugaucaccgacggccccgccagcggcaucagcgagugcagauuccugaagaucagagagggcagaaucaucaaggagaucuuccccaccggcagagugaagcacaccgaggagugcaccugcggcuucgccagcaacaagaccaucgagugcgccugcagagacaacagcuacaccgccaagagacccuucgugaagcugaacguggagaccgacaccgccgagaucagacugaugugcaccgagaccuaccuggacacccccagacccaacgacggcagcaucaccggccccugcgagagcaacggcgacaagggcagcggcggcaucaagggcggcuucgugcaccagagaauggccagcaagaucggcagaugguacagcagaaccaugagcaagaccaagagaaugggcaugggccuguacgugaaguacgacggcgaccccuggaccgacagcgaggcccuggcccugagcggcgugauggugagcauggaggagcccggcugguacagcuucggcuucgagaucaaggacaagaagugcgacgugcccugcaucggcaucgagauggugcacgacggcggcaagaccaccuggcacagcgccgccaccgccaucuacugccugaugggcagcggccagcugcugugggacaccgugaccggcgugaacaugacccuguga

SEQ ID NO: 190095 - RNA, 1401 nt, Artificial Sequence; identical to SEQ ID NO: 188877
  derived and/or modified CDS sequence (opt4) from neuraminidase__InfluenzaB__AHL92402

SEQ ID NO: 190096 - RNA, 1401 nt, Artificial Sequence; identical to SEQ ID NO: 188877
  derived and/or modified CDS sequence (opt4) from neuraminidase__InfluenzaB__AHL92413

SEQ ID NO: 190097 - RNA, 1401 nt, Artificial Sequence; identical to SEQ ID NO: 188877
  derived and/or modified CDS sequence (opt4) from neuraminidase__InfluenzaB__AHL92424

SEQ ID NO: 190098 - RNA, 1401 nt, Artificial Sequence
  derived and/or modified CDS sequence (opt4) from neuraminidase__InfluenzaB__AHL92435
augcugcccagcaccauccagacccugacccuguuccugaccagcggcggcgugcugcugagccuguacgugagcgccagccugagcuaccugcuguacagcgacauccugcugaaguucagccagaccgagaucaccgcccccaucaugccccuggacugcgccaacgccagcaacgugcaggccgugaacagaagcgccgccaagggcgugacccugcugcugcccgagcccgaguggaccuaccccagacugagcugccccggcagcaccuuccagaaggcccugcugaucagcccccacagauucggcgagaccaagggcaacagcgccccccugaucaucagagagcccuucaucgccugcggccccaccgagugcaagcacuucgcccugacccacuacgccgcccagcccggcggcuacuacaacggcaccagagaggacagaaacaagcugagacaccugaucagcgugaagcugggcaagauccccaccguggagaacagcaucuuccacauggccgccuggagcggcagcgccugccacgacggcaaggaguggaccuacaucggcguggacggccccgacagcaacgcccugcugaagaucaaguacggcgaggccuacaccgacaccuaccacagcuacgccaagaacauccugagaacccaggagagcgccugcaacugcaucggcggcgacugcuaccugaugaucaccgacggccccgccagcggcaucagcgagugcagauuccugaagaucagagagggcagaaucaucaaggagaucuuccccaccggcagagugaagcacaccgaggagugcaccugcggcuucgccagcaacaagaccaucgagugcgccugcagagacaacagcuacaccgccaagagacccuucgugaagcugaacguggagaccgacaccgccgagaucagacugaugugcaccgagaccuaccuggacacccccagacccaacgacggcagcaucaccggccccugcgagagcgacggcgacaagggcagcggcggcaucaagggcggcuucgugcaccagagaauggccagcaagaucggcagaugguacagcagaaccaugagcaagaccaagagaaugggcaugggccuguacgugaaguacgacggcgaccccuggaccgacagcgaggcccuggcccugagcggcgugaugaucagcauggaggagcccggcugguacagcuucggcuucgagaucaaggacaagaagugcgacgugcccugcaucggcaucgagauggugcacgacggcggcaagaccaccuggcacagcgccgccaccgccaucuacugccugaugggcagcggccagcugcugugggacaccgugaccggcguggacauggcccuguga

SEQ ID NO: 190099 - RNA, 1401 nt, Artificial Sequence; identical to SEQ ID NO: 188877
  derived and/or modified CDS sequence (opt4) from neuraminidase__InfluenzaB__AHL92446

SEQ ID NO: 190100 - RNA, 1401 nt, Artificial Sequence; identical to SEQ ID NO: 188877
  derived and/or modified CDS sequence (opt4) from neuraminidase__InfluenzaB__AHL92457

SEQ ID NO: 190101 - RNA, 1401 nt, Artificial Sequence; identical to SEQ ID NO: 188877
  derived and/or modified CDS sequence (opt4) from neuraminidase__InfluenzaB__AHL92468

SEQ ID NO: 190102 - RNA, 1401 nt, Artificial Sequence; identical to SEQ ID NO: 188877
  derived and/or modified CDS sequence (opt4) from neuraminidase__InfluenzaB__AHL92479

SEQ ID NO: 190103 - RNA, 1401 nt, Artificial Sequence; identical to SEQ ID NO: 188848
  derived and/or modified CDS sequence (opt4) from neuraminidase__InfluenzaB__AHL92490

SEQ ID NO: 190104 - RNA, 1401 nt, Artificial Sequence; identical to SEQ ID NO: 188877
  derived and/or modified CDS sequence (opt4) from neuraminidase__InfluenzaB__AHL92501

SEQ ID NO: 190105 - RNA, 1401 nt, Artificial Sequence
  derived and/or modified CDS sequence (opt4) from neuraminidase__InfluenzaB__AHL92512
augcugcccagcaccauccagacccugacccuguuccugaccagcggcggcgugcugcugagccuguacgugagcgccagccugagcuaccugcuguacagcgacauccugcugaaguucagcagaaccgagaucaccgcccccaucaugccccuggacugcgccaacgccagcaacgugcaggccgugaacagaagcgccaccaagggcgugacccugcugcugcccgagcccgaguggaccuaccccagacugagcugccccggcagcaccuuccagaaggcccugcugaucagcccccacagauucggcgagaccaagggcaacagcgccccccugaucaucagagagcccuucaucgccugcggccccaaggagugcaagcacuucgcccugacccacuacgccgcccagcccggcggcuacuacaacggcaccagagaggacagaaacaagcugagacaccugaucagcgugaagcugggcaagauccccaccguggagaacagcaucuuccacaugguggccuggagcggcagcgccugccacgacggcagagaguggaccuacaucggcguggacggccccgacagcaacgcccugcugaagaucaaguacggcgaggccuacaccgacaccuaccacagcuacgccaagaacauccugagaacccaggagagcgccugcaacugcaucggcggcgacugcuaccugaugaucaccgacggccccgccagcggcaucagcgagugcagauuccugaagaucagagagggcagaaucaucaaggagaucuuccccaccggcagagugaagcacaccgaggagugcaccugcggcuucgccagcaacaagaccaucgagugcgccugcagagacaacagcuacaccgccaagagacccuucgugaagcugaacguggagaccgacaccgccgagaucagacugaugugcaccgagaccuaccuggacacccccagacccaacgacggcagcaucaccggccccugcgagagcaacggcgacaagggcagcggcggcaucaagggcggcuucgugcaccagagaauggccagcaagaucggcagaugguacagcagaaccaugagcaagaccaagagaaugggcaugggccuguacgugaaguacgacggcgaccccuggaccgacagcgaggcccuggcccugagcggcgugauggugagcauggaggagcccggcugguacagcuucggcuucgagaucaaggacaagaagugcgacgugcccugcaucggcaucgagauggugcacgacggcggcaagaccaccuggcacagcgccgccaccgccaucuacugccugaugggcagcggccagcugcugugggacaccgugaccggcgugaacaugacccuguga

SEQ ID NO: 190106 - RNA, 1401 nt, Artificial Sequence; identical to SEQ ID NO: 188877
  derived and/or modified CDS sequence (opt4) from neuraminidase__InfluenzaB__AHL92523

SEQ ID NO: 190107 - RNA, 1401 nt, Artificial Sequence; identical to SEQ ID NO: 188877
  derived and/or modified CDS sequence (opt4) from neuraminidase__InfluenzaB__AHL92534

SEQ ID NO: 190108 - RNA, 1401 nt, Artificial Sequence; identical to SEQ ID NO: 188848
  derived and/or modified CDS sequence (opt4) from neuraminidase__InfluenzaB__AHL92545

SEQ ID NO: 190109 - RNA, 1401 nt, Artificial Sequence; identical to SEQ ID NO: 188877
  derived and/or modified CDS sequence (opt4) from neuraminidase__InfluenzaB__AHL92556

SEQ ID NO: 190110 - RNA, 1401 nt, Artificial Sequence; identical to SEQ ID NO: 188877
  derived and/or modified CDS sequence (opt4) from neuraminidase__InfluenzaB__AHL92567

SEQ ID NO: 190111 - RNA, 1401 nt, Artificial Sequence; identical to SEQ ID NO: 188877
  derived and/or modified CDS sequence (opt4) from neuraminidase__InfluenzaB__AHL92578

SEQ ID NO: 190112 - RNA, 1401 nt, Artificial Sequence; identical to SEQ ID NO: 188848
  derived and/or modified CDS sequence (opt4) from neuraminidase__InfluenzaB__AHL92589

SEQ ID NO: 190113 - RNA, 1401 nt, Artificial Sequence; identical to SEQ ID NO: 188877
  derived and/or modified CDS sequence (opt4) from neuraminidase__InfluenzaB__AHL92600

SEQ ID NO: 190114 - RNA, 1401 nt, Artificial Sequence; identical to SEQ ID NO: 189904
  derived and/or modified CDS sequence (opt4) from neuraminidase__InfluenzaB__AHL92611

SEQ ID NO: 190115 - RNA, 1401 nt, Artificial Sequence
  derived and/or modified CDS sequence (opt4) from neuraminidase__InfluenzaB__AHL92622
augcugcccagcaccauccagacccugacccuguuccugaccagcggcggcgugcugcugagccuguacgugagcgccagccugagcuaccugcuguacagcgacauccugcugaaguucagcagaaccgagaucaccgcccccaucaugccccuggacugcgccaacgccagcaacgugcaggccgugaacagaagcgccaccaagggcgugaccuuccugcugcccgagcccgaguggaccuaccccagacugagcugccccggcagcaccuuccagaaggcccugcugaucagcccccacagauucggcgagaccaagggcaacagcgccccccugaucaucagagagcccuucaucgccugcggccccaaggagugcaagcacuucgcccugacccacuacgccgcccagcccggcggcuacuacaacggcaccagagaggacagaaacaagcugagacaccugaucagcgugaagcugggcaagauccccaccguggagaacagcaucuuccacauggccgccuggagcggcagcgccugccacgacggcagagaguggaccuacaucggcguggacggccccgacagcaacgcccugcugaagaucaaguacggcgaggccuacaccgacaccuaccacagcuacgccaagaacauccugagaacccaggagagcgccugcaacugcaucggcggcgacugcuaccugaugaucaccgacggccccgccagcggcaucagcgagugcagauuccugaagaucagagagggcagaaucaucaaggagaucuuccccaccggcagagugaagcacaccgaggagugcaccugcggcuucgccagcaacaagaccaucgagugcgccugcagagacaacagcuacaccgccaagagacccuucgugaagcugaacguggagaccgacaccgccgagaucagacugaugugcaccgagaccuaccuggacacccccagacccaacgacggcagcaucaccggccccugcgagagcaacggcgacaagggcagcggcggcaucaagggcggcuucgugcaccagagaauggccagcaagaucggcagaugguacagcagaaccaugagcaagaccaagagaaugggcaugggccuguacgugaaguacgacggcgaccccuggaccgacagcgaggcccuggcccugagcggcgugauggugagcauggaggagcccggcugguacagcuucggcuucgagaucaaggacaagaagugcgacgugcccugcaucggcaucgagauggugcacgacggcggcaagaccaccuggcacagcgccgccaccgccaucuacugccugaugggcagcggccagcugcugugggacaccgugaccggcgugaacaugacccuguga

SEQ ID NO: 190116 - RNA, 1401 nt, Artificial Sequence
  derived and/or modified CDS sequence (opt4) from neuraminidase__InfluenzaB__AHL92633
augcugcccagcaccauccagacccugacccuguuccugaccagcggcggcgugcugcugagccuguacgugagcgccagccugagcuaccugcuguacagcgacauccugcugaaguucagcagaaccgagaucaccgcccccaucaugccccuggacugcgccaacgccagcaacgugcaggccgugaacagaagcgccaccaagggcgugaccuuccugcugcccgagcccgaguggaccuaccccagacugagcugccccggcagcaccuuccagaaggcccugcugaucagcccccacagauucggcgagaccaagggcaacagcgccccccugaucaucagagagcccuucaucgccugcggccccaaggagugcaagcacuucgcccugacccacuacgccgcccagcccggcggcuacuacaacggcaccagagaggacagaaacaagcugagacaccugaucagcgugaagcugggcaagauccccaucguggagaacagcaucuuccacauggccgccuggagcggcagcgccugccacgacggcagagaguggaccuacaucggcguggacggccccgacagcaacgcccugcugaagaucaaguacggcgaggccuacaccgacaccuaccacagcuacgccaagaacauccugagaacccaggagagcgccugcaacugcaucggcggcgacugcuaccugaugaucaccgacggccccgccagcggcaucagcgagugcagauuccugaagaucagagagggcagaaucaucaaggagaucuuccccaccggcagagugaagcacaccgaggagugcaccugcggcuucgccagcaacaagaccaucgagugcgccugcagagacaacagcuacaccgccaagagacccuucgugaagcugaacguggagaccgacaccgccgagaucagacugaugugcaccgagaccuaccuggacacccccagacccaacgacggcagcaucaccggccccugcgagagcaacggcgacaagggcagcggcggcaucaagggcggcuucgugcaccagagaauggccagcaagaucggcagaugguacagcagaaccaugagcaagaccaagagaaugggcaugggccuguacgugaaguacgacggcgaccccuggaccgacagcgaggcccuggcccugagcggcgugauggugagcauggaggagcccggcugguacagcuucggcuucgagaucaaggacaagaagugcgacgugcccugcaucggcaucgagauggugcacgacggcggcaagaccaccuggcacagcgccgccaccgccaucuacugccugaugggcagcggccagcugcugugggacaccgugaccggcgugaacaugacccuguga

SEQ ID NO: 190117 - RNA, 1401 nt, Artificial Sequence; identical to SEQ ID NO: 188848
  derived and/or modified CDS sequence (opt4) from neuraminidase__InfluenzaB__AHL92644

SEQ ID NO: 190118 - RNA, 1401 nt, Artificial Sequence; identical to SEQ ID NO: 188848
  derived and/or modified CDS sequence (opt4) from neuraminidase__InfluenzaB__AHL92655

SEQ ID NO: 190119 - RNA, 1401 nt, Artificial Sequence; identical to SEQ ID NO: 188877
  derived and/or modified CDS sequence (opt4) from neuraminidase__InfluenzaB__AHL92666

SEQ ID NO: 190120 - RNA, 1401 nt, Artificial Sequence; identical to SEQ ID NO: 188877
  derived and/or modified CDS sequence (opt4) from neuraminidase__InfluenzaB__AHL92677

SEQ ID NO: 190121 - RNA, 1401 nt, Artificial Sequence; identical to SEQ ID NO: 188848
  derived and/or modified CDS sequence (opt4) from neuraminidase__InfluenzaB__AHL92688

SEQ ID NO: 190122 - RNA, 1401 nt, Artificial Sequence; identical to SEQ ID NO: 188877
  derived and/or modified CDS sequence (opt4) from neuraminidase__InfluenzaB__AHL92699

SEQ ID NO: 190123 - RNA, 1401 nt, Artificial Sequence; identical to SEQ ID NO: 188877
  derived and/or modified CDS sequence (opt4) from neuraminidase__InfluenzaB__AHL92710

SEQ ID NO: 190124 - RNA, 1401 nt, Artificial Sequence; identical to SEQ ID NO: 188877
  derived and/or modified CDS sequence (opt4) from neuraminidase__InfluenzaB__AHL92721

SEQ ID NO: 190125 - RNA, 1401 nt, Artificial Sequence; identical to SEQ ID NO: 188877
  derived and/or modified CDS sequence (opt4) from neuraminidase__InfluenzaB__AHL92732

SEQ ID NO: 190126 - RNA, 1401 nt, Artificial Sequence; identical to SEQ ID NO: 188877
  derived and/or modified CDS sequence (opt4) from neuraminidase__InfluenzaB__AHL92743

SEQ ID NO: 190127 - RNA, 1401 nt, Artificial Sequence; identical to SEQ ID NO: 188877
  derived and/or modified CDS sequence (opt4) from neuraminidase__InfluenzaB__AHL92754

SEQ ID NO: 190128 - RNA, 1401 nt, Artificial Sequence; identical to SEQ ID NO: 188877
  derived and/or modified CDS sequence (opt4) from neuraminidase__InfluenzaB__AHL92765

SEQ ID NO: 190129 - RNA, 1401 nt, Artificial Sequence; identical to SEQ ID NO: 188877
  derived and/or modified CDS sequence (opt4) from neuraminidase__InfluenzaB__AHL92776

SEQ ID NO: 190130 - RNA, 1401 nt, Artificial Sequence; identical to SEQ ID NO: 188877
  derived and/or modified CDS sequence (opt4) from neuraminidase__InfluenzaB__AHL92787

SEQ ID NO: 190131 - RNA, 1401 nt, Artificial Sequence; identical to SEQ ID NO: 188877
  derived and/or modified CDS sequence (opt4) from neuraminidase__InfluenzaB__AHL92798

SEQ ID NO: 190132 - RNA, 1401 nt, Artificial Sequence
  derived and/or modified CDS sequence (opt4) from neuraminidase__InfluenzaB__AHL92809
augcugcccagcaccauccagacccugacccuguuccugaccagcggcggcgugcugcugagccuguacgugagcgccagccugagcuaccugcuguacagcgacauccugcugaaguucagcagaaccgagaucaccgcccccaucaugccccuggacugcgccaacgccagcaacgugcaggccgugaacagaagcgccaucaagggcgugacccugcugcugcccgagcccgaguggaccuaccccagacugagcugccccggcagcaccuuccagaaggcccugcugaucagcccccacagauucggcgagaccaagggcaacagcgccccccugaucaucagagagcccuucaucgccugcggccccaaggagugcaagcacuucgcccugacccacuacgccgcccagcccggcggcuacuacaacggcaccagagaggacagaaacaagcugagacaccugaucagcgugaagcugggcaagauccccaccguggagaacagcaucuuccacauggccgccuggagcggcagcgccugccacgacggcagagaguggaccuacaucggcguggacggccccgacagcaacgcccugcugaagaucaaguacggcgaggccuacaccgacaccuaccacagcuacgccaagaacauccugagaacccaggagagcgccugcaacugcaucggcggcgacugcuaccugaugaucaccgacggccccgccagcggcaucagcgagugcagauuccugaagaucagagagggcagaaucaucaaggagaucuuccccaccggcagagugaagcacaccgaggagugcaccugcggcuucgccagcaacaagaccaucgagugcgccugcagagacaacagcuacaccgccaagagacccuucgugaagcugaacguggagaccgacaccgccgagaucagacugaugugcaccgagaccuaccuggacacccccagacccaacgacggcagcaucaccggccccugcgagagcaacggcgacaagggcagcggcggcaucaagggcggcuucgugcaccagagaauggccagcaagaucggcagaugguacagcagaaccaugagcaagaccaagagaaugggcaugggccuguacgugaaguacgacggcgaccccuggaccgacagcgaggcccuggcccugagcggcgugauggugagcauggaggagcccggcugguacagcuucggcuucgagaucaaggacaagaagugcgacgugcccugcaucggcaucgagauggugcacgacggcggcaagaccaccuggcacagcgccgccaccgccaucuacugccugaugggcagcggccagcugcugugggacaccgugaccggcgugaacaugacccuguga

SEQ ID NO: 190133 - RNA, 1401 nt, Artificial Sequence
  derived and/or modified CDS sequence (opt4) from neuraminidase__InfluenzaB__AHL92820
augcugcccagcaccauccagacccugacccuguuccugaccagcggcggcgugcugcugagccuguacgugagcgccagccugagcuaccugcuguacagcgacauccugcugaaguucagcagaaccgagaucaccgcccccaucaugccccuggacugcgccaacgccagcaacgugcaggccgugaacagaagcgccaccaagggcgugacccugcugcugcccgagcccgaguggaccuaccccagacugagcugccccggcagcaccuuccagaaggcccugcugaucagcccccacagauucggcgagaccaagggcaacagcgccccccugaucaucagagagcccuucaucgccugcggccccaaggagugcaagcacuucgcccugacccacuacgccgcccagcccggcggcuacuacaacggcaccagagaggacagaaacaagcugagacaccugaucagcgugaagcugggcaagauccccaccguggagaacagcaucuuccacauggccgccuggagcggcagcgccugccacgacggcagagaguggaccuacaucggcguggacggccccgacagcaacgcccugcugaagaucaaguacggcgaggccuacaccgacaccuaccacagcuacgccaagaacauccugagaacccaggagagcgccugcaacugcaucggcggcgacugcuaccugaugaucaccgacggccccgccagcggcaucagcgagugcagauuccugaagaucagagagggcagaaucaucaaggagaucuuccccaccggcagagugaagcacaccgaggagugcaccugcggcuucgccagcaacaagaccaucgagugcgccugcagagacaacagcuacaccgccaagagacccuucgugaagcugaacguggagaccgacaccgccgagaucagacugaugugcaccgagaccuaccuggacacccccagacccaacgacggcagcaucaccggccccugcgagagcaacggcgacaagggcagcggcggcaucaagggcggcuucgugcaccagagaauggccagcaagaucggcagaugguacagcagaaccaugagcaagaccaagagaaugggcaugggccuguacgugaaguacgacggcgaccccuggaccgacagcgaggcccuggcccugagcggcgugauggugagcauggaggagcccggcugguacagcuucggcuucgagaucaaggacaagaagugcgacgugcccugcaucggcaucgagauggugcacgacggcggcaagaagaccuggcacagcgccgccaccgccaucuacugccugaugggcagcggccagcugcugugggacaccgugaccggcgugaacaugacccuguga

SEQ ID NO: 190134 - RNA, 1401 nt, Artificial Sequence
  derived and/or modified CDS sequence (opt4) from neuraminidase__InfluenzaB__AHL92842
augcugcccagcaccauccagacccugacccuguuccugaccagcggcggcgugcugcugagccuguacgugagcgccagccugagcuaccugcuguacagcgacauccugcugaaguucagcagaaccgagaucaccgcccccaucaugccccuggacugcgccaacgccagcaacgugcaggccgugaacagaagcaccaccaagggcgugacccugcugcugcccgagcccgaguggaccuaccccagacugagcugccccggcagcaccuuccagaaggcccugcugaucagcccccacagauucggcgagaccaagggcaacagcgccccccugaucaucagagagcccuucaucgccugcggccccaaggagugcaagcacuucgcccugacccacuacgccgcccagcccggcggcuacuacaacggcaccagagaggacagaaacaagcugagacaccugaucagcgugaagcugggcaagauccccaccguggagaacagcaucuuccacauggccgccuggagcggcagcgccugccacgacggcagagaguggaccuacaucggcguggacggccccgacagcaacgcccugcugaagaucaaguacggcgaggccuacaccgacaccuaccacagcuacgccaagaacauccugagaacccaggagagcgccugcaacugcaucggcggcgacugcuaccugaugaucaccgacggccccgccagcggcaucagcgagugcagauuccugaagaucagagagggcagaaucaucaaggagaucuuccccaccggcagagugaagcacaccgaggagugcaccugcggcuucgccagcaacaagaccaucgagugcgccugcagagacaacagcuacaccgccaagagacccuucgugaagcugaacguggagaccgacaccgccgagaucagacugaugugcaccgagaccuaccuggacacccccagacccaacgacggcagcaucaccggccccugcgagagcaacggcgacaagggcagcggcggcaucaagggcggcuucgugcaccagagaauggccagcaagaucggcagaugguacagcagaaccaugagcaagaccaagagaaugggcaugggccuguacgugaaguacgacggcgaccccuggaccgacagcgaggcccuggcccugagcggcgugauggugagcauggaggagcccggcugguacagcuucggcuucgagaucaaggacaagaagugcgacgugcccugcaucggcaucgagauggugcacgacggcggcaagaccaccuggcacagcgccgccaccgccaucuacugccugaugggcagcggccagcugcugugggacaccgugaccggcgugaacaugacccuguga

SEQ ID NO: 190135 - RNA, 1401 nt, Artificial Sequence; identical to SEQ ID NO: 188877
  derived and/or modified CDS sequence (opt4) from neuraminidase__InfluenzaB__AHL92853

SEQ ID NO: 190136 - RNA, 1401 nt, Artificial Sequence; identical to SEQ ID NO: 188877
  derived and/or modified CDS sequence (opt4) from neuraminidase__InfluenzaB__AHL92864

SEQ ID NO: 190137 - RNA, 1401 nt, Artificial Sequence; identical to SEQ ID NO: 188730
  derived and/or modified CDS sequence (opt4) from neuraminidase__InfluenzaB__AHL92875

SEQ ID NO: 190138 - RNA, 1401 nt, Artificial Sequence; identical to SEQ ID NO: 188687
  derived and/or modified CDS sequence (opt4) from neuraminidase__InfluenzaB__AHL92886

SEQ ID NO: 190139 - RNA, 1401 nt, Artificial Sequence
  derived and/or modified CDS sequence (opt4) from neuraminidase__InfluenzaB__AHL92897
augcugcccagcaccauccagacccugacccuguuccugaccagcggcggcgugcugcugagccuguacgugagcgccagccugagcuaccugcuguacagcgacauccugcugaaguucagccccaccgagaucaccgcccccaccaucccccuggacugcgccaacgccagcaacgugcaggccgugaacagaagcgccaccaagggcgugacccugcugcugcccgagcccgaguggaccuaccccagacugagcugccccggcagcaccuuccagaaggcccugcugaucagcccccacagauucggcgagaccaagggcaacagcgccccccugaucaucagagagcccuucaucgccugcggccccaacgagugcaagcacuucgcccugacccacuacgccgcccagcccggcggcuacuacaacggcaccagaggcgacagaaacaagcugagacaccugaucagcgugaagcugggcaagauccccaccguggagaacagcaucuuccacauggccgccuggagcggcagcgccugccacgacggcaaggaguggaccuacaucggcguggacggccccgacaacaacgcccugcugaagaucaaguacggcgaggccuacaccgacaccuaccacagcuacgccaacaacauccugagaacccaggagagcgccugcaacugcaucggcggcaacugcuaccugaugaucaccgacggcagcgccagcggcgugagcgagugcagauuccugaagaucagagagggcagaaucaucaaggagaucuuccccaccggcagagugaagcacaccgaggagugcaccugcggcuucgccagcaacaagaccaucgagugcgccugcagagacaacagcuacaccgccaagagacccuucgugaagcugaacguggagaccgacaccgccgagaucagacugaugugcaccgacaccuaccuggacacccccagacccgacgacggcagcaucaccggccccugcgagagcaacggcgacaagggcagcggcggcaucaagggcggcuucgugcaccagagaauggccagcaagaucggcagaugguacagcagaaccaugagcaagaccgagagaaugggcaugggccuguacgugaaguacgacggcgaccccugggccgacagcgacgcccuggccuucagcggcgugauggugagcaugaaggagcccggcugguacagcuucggcuucgagaucaaggacaagaagugcgacgugcccugcaucggcaucgagauggugcacgacggcggcaaggagaccuggcacagcgccgccaccgccaucuacugccugaugggcagcggccagcugcugugggacaccgugaccggcguggacauggcccuguga

SEQ ID NO: 190140 - RNA, 1401 nt, Artificial Sequence
  derived and/or modified CDS sequence (opt4) from neuraminidase__InfluenzaB__AHL92908
augcugcccagcaccauccagacccugacccuguuccugacccugggcggcgugcugcugagccuguacgugagcgccagccugagcuaccugcuguacagcgacauccugcugaaguucagccagaccgagaucaccgcccccaucaugccccuggacugcgccaacgccagcaacgugcaggccgugaacagaagcgccaccaagggcgugacccugcugcugcccgagcccgaguggaccuaccccagacugagcugccccggcagcaccuuccagaaggcccugcugaucagcccccacagauucggcgagaccaagggcaacagcgccccccugaucaucagagagcccuucaucgccugcggccccaaggagugcaagcacuucgcccugacccacuacgccgcccagcccggcggcuacuacaacggcaccagagaggacagaaacaagcugagacaccugaucagcgugaagcugggcaagauccccaccguggagaacagcaucuuccacauggccgccuggagcggcagcgccugccacgacggcaaggaguggaccuacaucggcguggacggccccgacagcaacgcccugcugaagaucaaguacggcgaggccuacaccgacaccuaccacagcuacgccaagaacauccugagaacccaggagagcgccugcaacugcaucggcggcgacugcuaccugaugaucaccgacggccccgccagcggcaucagcgagugcagauuccugaagaucagagagggcagaaucaucaaggagaucuuccccaccggcagagugaagcacaccgaggagugcaccugcggcuucgccagcaacaagaccaucgagugcgccugcagagacaacagcuacaccgccaagagacccuucgugaagcugaacguggagaccgacaccgccgagaucagacugaugugcaccgagaccuaccuggacacccccagacccaacgacggcagcaucaccggccccugcgagagcaacggcgacaagggcagcggcggcaucaagggcggcuucgugcaccagagaauggccagcaagaucggcagaugguacagcagaaccaugagcaagaccaagagaaugggcaugggccuguacgugaaguacgacggcgaccccuggaccgacagcgaggcccuggcccugagcggcgugauggugagcauggaggagcccggcugguacagcuucggcuucgagaucaaggacaagaagugcgacgugcccugcaucggcaucgagauggugcacgacggcggcaagaccaccuggcacagcgccgccaccgccguguacugccugaugggcagcggccagcugcugugggacaccaucaccggcguggacauggcccuguga

SEQ ID NO: 190141 - RNA, 1401 nt, Artificial Sequence
  derived and/or modified CDS sequence (opt4) from neuraminidase__InfluenzaB__AHL92919
augcugcccagcaccauccagacccugacccuguuccugaccagcggcggcgugcugcugagccuguacgugagcgccagccugagcuaccugcuguacagcgacauccugcugaaguucagccccaccgagaucaccgcccccaccaugccccuggacugcgccaacgccagcaacgugcaggccgugaacagaagcgccaccaagggcgugacccugcugcugcccgagcccgaguggaccuaccccagacugagcugccccggcagcaccuuccagaaggcccugcugaucagcccccacagauucggcgagaccaagggcaacagcgccccccugaucaucagagagcccuucaucgccugcggccccaacgagugcaagcacuucgcccugacccacuacgccgcccagcccggcggcuacuacaacggcaccagaggcgacagaaacaagcugagacaccugaucagcgugaagcugggcaagauccccaccguggagaacagcaucuuccacauggccgccuggagcggcagcgccugccacgacggcaaggaguggaccuacaucggcaucgacggccccgacaacaacgcccugcugaagaucaaguacggcgaggccuacaccgacaccuaccacagcuacgccaacaacauccugagaacccaggagagcgccugcaacugcaucggcggcaacugcuaccugaugaucaccgacggcagcgccagcggcgugagcgagugcagauuccugaagaucagagagggcagaaucaucaaggagaucuuccccaccggcagagugaagcacaccgaggagugcaccugcggcuucgccagcaacaagaccaucgagugcgccugcagagacaacagcuacaccgccaagagacccuucgugaagcugaacguggagaccgacaccgccgagaucagacugaugugcaccgacaccuaccuggacacccccagacccgacgacggcagcaucaccggccccugcgagagcaacggcgacaagggcagcggcggcaucaagggcggcuucgugcaccagagaauggccagcaagaucggcagaugguacagcagaaccaugagcaagaccgagagaaugggcaugggccuguacgugaaguacgacggcgaccccugggccgacagcgacgcccuggccuucagcggcgugauggugagcaugaaggagcccggcugguacagcuucggcuucgagaucaaggacaagaagugcgacgugcccugcaucggcaucgagauggugcacgacggcggcaaggagaccuggcacagcgccgccaccgccaucuacugccugaugggcagcggccagcugcugugggacaccgugaccggcguggacauggcccuguga

SEQ ID NO: 190142 - RNA, 1401 nt, Artificial Sequence
  derived and/or modified CDS sequence (opt4) from neuraminidase__InfluenzaB__AHL92930
augcugcccagcaccauccagacccugacccuguuccugaccagcggcggcgugcugcugagccuguacgugagcgccagccugagcuaccugcuguacagcgacauccugcugaaguucagccccaccgagaucaccgcccccaccaugccccuggacugcgccaacgccagcaacgugcaggccgugaacagaagcgccaccaagggcgugacccugcugcugcccgagcccgaguggaccuaccccagacugagcugccccggcagcaccuuccagaaggcccugcugaucagcccccacagauucggcgagaccaagggcaacagcgccccccugaucaucagagagcccuucaucgccugcggccccaacgagugcaagcacuucgcccugacccacuacgccgcccagcccggcggcuacuacaacggcaccagaggcgacagaaacaagcugagacaccugaucagcgugaagcugggcaagauccccaccguggagaacagcaucuuccacauggccgccuggagcggcagcgccugccacgacggcaaggaguggaccuacaucggcguggacggccccgacaacgacgcccugcugaagaucaaguacggcgaggccuacaccgacaccuaccacagcuacgccaacaacauccugagaacccaggagagcgccugcaacugcaucggcggcaacugcuaccugaugaucaccgacggcagcgccagcggcgugagcgagugcagauuccugaagaucagagagggcagaaucaucaaggagaucuuccccaccggcagagugaagcacaccgaggagugcaccugcggcuucgccagcaacaagaccaucgagugcgccugcagagacaacagcuacaccgccaagagacccuucgugaagcuggacguggagaccgacaccgccgagaucagacugaugugcaccgacaccuaccuggacacccccagacccgacgacggcagcaucaccggccccugcgagagcaacggcgacaagggcagcggcggcaucaagggcggcuucgugcaccagagaauggccagcaagaucggcagaugguacagcagaaccaugagcaagaccgagagaaugggcaugggccuguacgugaaguacgacggcgaccccugggccgacagcgacgcccuggccuucagcggcgugauggugagcaugaaggagcccggcugguacagcuucggcuucgagaucaaggacaagaagugcgacgugcccugcaucggcaucgagauggugcacgacggcggcaaggagaccuggcacagcgccgccaccgccaucuacugccugaugggcagcggccagcugcugugggacaccgugaccggcguggacauggcccuguga

SEQ ID NO: 190143 - RNA, 1401 nt, Artificial Sequence; identical to SEQ ID NO: 188687
  derived and/or modified CDS sequence (opt4) from neuraminidase__InfluenzaB__AHL92941

SEQ ID NO: 190144 - RNA, 1401 nt, Artificial Sequence; identical to SEQ ID NO: 188695
  derived and/or modified CDS sequence (opt4) from neuraminidase__InfluenzaB__AHL92952

SEQ ID NO: 190145 - RNA, 1401 nt, Artificial Sequence; identical to SEQ ID NO: 188695
  derived and/or modified CDS sequence (opt4) from neuraminidase__InfluenzaB__AHL92963

SEQ ID NO: 190146 - RNA, 1401 nt, Artificial Sequence
  derived and/or modified CDS sequence (opt4) from neuraminidase__InfluenzaB__AHL92974
augcugcccagcaccauccagacccugacccuguuccugaccagcggcggcgugcugcugagccuguacgugagcgccagccugagcuaccugcuguacagcgacauccugcugaaguucagccccaccgagaucaccgcccccaccaugccccuggacugcgccaacgccagcaacgugcacgccgugaacagaagcgccaccaagggcgugacccugcugcugcccgagcccgaguggaccuaccccagacugagcugccccggcagcaccuuccagaaggcccugcugaucagcccccacagauucggcgagaccaagggcaacagcgccccccugaucaucagagagcccuucaucgccugcggccccaacgagugcaagcacuucgcccugacccacuacgccgcccagcccggcggcuacuacaacggcaccagaggcgacagaaacaagcugagacaccugaucagcgugaagcugggcaagauccccaccguggagaacagcaucuuccacauggccgccuggagcggcagcgccugccacgacggcaaggaguggaccuacaucggcguggacggccccgacaacaacgcccugcugaagaucaaguacggcgaggccuacaccgacaccuaccacagcuacgccaacaacauccugagaacccaggagagcgccugcaacugcaucggcggcaacugcuaccugaugaucaccgacggcagcgccagcggcgugagcgagugcagauuccugaagaucagagagggcagaaucaucaaggagaucuuccccaccggcagagugaagcacaccgaggagugcaccugcggcuucgccagcaacaagaccaucgagugcgccugcagagacaacagcuacaccgccaagagacccuucgugaagcugaacguggagaccgacaccgccgagaucagacugaugugcaccgacaccuaccuggacacccccagacccgacgacggcagcaucaccggccccugcgagagcaacggcgacaagggcagcggcggcaucaagggcggcuucgugcaccagagaauggccagcaagaucggcagaugguacagcagaaccaugagcaagaccgagagaaugggcaugggccuguacgugaaguacaacggcgaccccugggccgacagcgacgcccuggccuucagcggcgugauggugagcaugaaggagcccggcugguacagcuucggcuucgagaucaaggacaagaagugcgacgugcccugcaucggcaucgagauggugcacgacggcggcaaggagaccuggcacagcgccgccaccgccaucuacugccugaugggcagcggccagcugcugugggacaccgugaccggcguggacauggcccuguga

SEQ ID NO: 190147 - RNA, 1401 nt, Artificial Sequence; identical to SEQ ID NO: 188695
  derived and/or modified CDS sequence (opt4) from neuraminidase__InfluenzaB__AHL92985

SEQ ID NO: 190148 - RNA, 1401 nt, Artificial Sequence; identical to SEQ ID NO: 188695
  derived and/or modified CDS sequence (opt4) from neuraminidase__InfluenzaB__AHL92996

SEQ ID NO: 190149 - RNA, 1401 nt, Artificial Sequence; identical to SEQ ID NO: 190068
  derived and/or modified CDS sequence (opt4) from neuraminidase__InfluenzaB__AHL93008

SEQ ID NO: 190150 - RNA, 1401 nt, Artificial Sequence; identical to SEQ ID NO: 190077
  derived and/or modified CDS sequence (opt4) from neuraminidase__InfluenzaB__AHL93019

SEQ ID NO: 190151 - RNA, 1401 nt, Artificial Sequence; identical to SEQ ID NO: 190077
  derived and/or modified CDS sequence (opt4) from neuraminidase__InfluenzaB__AHL93030

SEQ ID NO: 190152 - RNA, 1401 nt, Artificial Sequence; identical to SEQ ID NO: 190091
  derived and/or modified CDS sequence (opt4) from neuraminidase__InfluenzaB__AHL93041

SEQ ID NO: 190153 - RNA, 1401 nt, Artificial Sequence; identical to SEQ ID NO: 190091
  derived and/or modified CDS sequence (opt4) from neuraminidase__InfluenzaB__AHL93052

SEQ ID NO: 190154 - RNA, 1401 nt, Artificial Sequence; identical to SEQ ID NO: 188877
  derived and/or modified CDS sequence (opt4) from neuraminidase__InfluenzaB__AHL93063

SEQ ID NO: 190155 - RNA, 1401 nt, Artificial Sequence; identical to SEQ ID NO: 188877
  derived and/or modified CDS sequence (opt4) from neuraminidase__InfluenzaB__AHL93074

SEQ ID NO: 190156 - RNA, 1401 nt, Artificial Sequence; identical to SEQ ID NO: 188877
  derived and/or modified CDS sequence (opt4) from neuraminidase__InfluenzaB__AHL93085

SEQ ID NO: 190157 - RNA, 1401 nt, Artificial Sequence; identical to SEQ ID NO: 190134
  derived and/or modified CDS sequence (opt4) from neuraminidase__InfluenzaB__AHL93096

SEQ ID NO: 190158 - RNA, 1401 nt, Artificial Sequence; identical to SEQ ID NO: 188877
  derived and/or modified CDS sequence (opt4) from neuraminidase__InfluenzaB__AHL93107

SEQ ID NO: 190159 - RNA, 1401 nt, Artificial Sequence; identical to SEQ ID NO: 188877
  derived and/or modified CDS sequence (opt4) from neuraminidase__InfluenzaB__AHL93118

SEQ ID NO: 190160 - RNA, 1401 nt, Artificial Sequence; identical to SEQ ID NO: 188848
  derived and/or modified CDS sequence (opt4) from neuraminidase__InfluenzaB__AHL93129

SEQ ID NO: 190161 - RNA, 1401 nt, Artificial Sequence; identical to SEQ ID NO: 188877
  derived and/or modified CDS sequence (opt4) from neuraminidase__InfluenzaB__AHL93140

SEQ ID NO: 190162 - RNA, 1401 nt, Artificial Sequence; identical to SEQ ID NO: 188848
  derived and/or modified CDS sequence (opt4) from neuraminidase__InfluenzaB__AHL93151

SEQ ID NO: 190163 - RNA, 1401 nt, Artificial Sequence; identical to SEQ ID NO: 188877
  derived and/or modified CDS sequence (opt4) from neuraminidase__InfluenzaB__AHL93162

SEQ ID NO: 190164 - RNA, 1401 nt, Artificial Sequence; identical to SEQ ID NO: 188877
  derived and/or modified CDS sequence (opt4) from neuraminidase__InfluenzaB__AHL93173

SEQ ID NO: 190165 - RNA, 1401 nt, Artificial Sequence; identical to SEQ ID NO: 188848
  derived and/or modified CDS sequence (opt4) from neuraminidase__InfluenzaB__AHL93184

SEQ ID NO: 190166 - RNA, 1401 nt, Artificial Sequence; identical to SEQ ID NO: 188877
  derived and/or modified CDS sequence (opt4) from neuraminidase__InfluenzaB__AHL93195

SEQ ID NO: 190167 - RNA, 1401 nt, Artificial Sequence; identical to SEQ ID NO: 188877
  derived and/or modified CDS sequence (opt4) from neuraminidase__InfluenzaB__AHL93206

SEQ ID NO: 190168 - RNA, 1401 nt, Artificial Sequence; identical to SEQ ID NO: 189021
  derived and/or modified CDS sequence (opt4) from neuraminidase__InfluenzaB__AHL93217

SEQ ID NO: 190169 - RNA, 1401 nt, Artificial Sequence; identical to SEQ ID NO: 189021
  derived and/or modified CDS sequence (opt4) from neuraminidase__InfluenzaB__AHL93228

SEQ ID NO: 190170 - RNA, 1401 nt, Artificial Sequence
  derived and/or modified CDS sequence (opt4) from neuraminidase__InfluenzaB__AHL93239
augcugcccagcaccauccagacccugacccuguuccugaccagcggcggcgugcugcugagccuguacgugagcgccagccugagcuaccugcuguacagcgacauccugcugaaguucagccccaccgagaucaccgcccccaccaugccccuggacugcgccaacgccagcaacgugcaggccgugaacagaagcgccaccaagggcgugaccuuccugcugcccgagcccgaguggaccuaccccagacugagcugccccggcagcaccuuccagaaggcccugcugaucagcccccacagauucggcgagaccaagggcaacagcgccccccugaucaucagagagcccuucaucgccugcggccccaacgagugcaagcacuucgcccugacccacuacgccgcccagcccggcggcuacuacaacggcaccagaggcgacagaaacaagcugagacaccugaucagcgugaagcugggcaagauccccaccguggagaacagcaucuuccacauggccgccuggagcggcagcgccugccacgacggcaaggaguggaccuacaucggcguggacggccccgacaacaacgcccugcugaaggugaaguacggcgaggccuacaccgacaccuaccacagcuacgccaacaagauccugagaacccaggagagcgccugcaacugcaucggcggcaacugcuaccugaugaucaccgacggcagcgccagcggcgugagcgagugcagauuccugaagaucagagagggcagaaucaucaaggagaucuuccccaccggcagagugaagcacaccgaggagugcaccugcggcuucgccagcaacaagaccaucgagugcgccugcagagacaacagcuacaccgccaagagacccuucgugaagcugaacguggagaccgacaccgccgagaucagacugaugugcaccgacaccuaccuggacacccccagacccgacgacggcagcaucaccggccccugcgagagcaacggcgacaagggcagcggcggcaucaagggcggcuucgugcaccagagaauggagagcaagaucggcagaugguacagcagaaccaugagcaagaccgagagaaugggcaugggccuguacgugaaguacgacggcgaccccugggccgacagcgacgcccuggccuucagcggcgugauggugagcaugaaggagcccggcugguacagcuucggcuucgagaucaaggacaagaagugcgacgugcccugcaucggcaucgagauggugcacgacggcggcaaggagaccuggcacagcgccgccaccgccaucuacugccugaugggcagcggccagcugcugugggacaccgugaccggcguggacauggcccuguga

SEQ ID NO: 190171 - RNA, 1401 nt, Artificial Sequence
  derived and/or modified CDS sequence (opt4) from neuraminidase__InfluenzaB__AHL93250
augcugcccagcaccauccagaugcugacccuguuccugaccagcggcggcgugcugcugagccuguacgugagcgccagccugagcuaccugcuguacagcgacauccugcugaaguucagccccaccgagaucaccgcccccaccaugccccuggacugcgccaacgccagcaacgugcacgccgugaacagaagcgccaccaagggcgugaccuuccugcugcccgagcccgaguggaccuaccccagacugagcugccccggcagcaccuuccagaaggcccugcugaucagcccccacagauucggcgagaccaagggcaacagcgccccccugaucaucagagagcccuucaucgccugcggccccaacgagugcaagcacuucgcccugacccacuacgccgcccagcccggcggcuacuacaacggcaccagaggcgacagaaacaagcugagacaccugaucagcgugaagcugggcaagauccccaccguggagaacagcaucuuccacauggccgccuggagcggcagcgccugccacgacggcaaggaguggaccuacaucggcguggacggccccgacaacaacgcccugcugaagaucaaguacggcgaggccuacaccgacaccuaccacagcuacgccaacaacauccugagaacccaggagagcgccugcaacugcaucggcggcaacugcuaccugaugaucaccgacggcagcgccagcggcgugagcgagugcagauuccugaagaucagagagggcagaaucaucaaggagaucuuccccaccggcagagugaagcacaccgaggagugcaccugcggcuucgccagcaacaagaccaucgagugcgccugcagagacaacagcuacaccgccaagagacccuucgugaagcugaacguggagaccgacaccgccgagaucagacugaugugcaccgacaccuaccuggacacccccagacccgacgacggcagcaucaccggccccugcgagagcaacggcgacaagggcagcggcggcaucaagggcggcuucgugcaccagagaauggccagcaagaucggcagaugguacagcagaaccaugagcaagaccgagagaaugggcaugggccuguacgugaaguacgacggcgaccccuggaccgacagcgacgcccuggccuucagaggcgugauggugagcaugaaggagcccggcugguacagcuucggcuucgagaucaaggacaagaagugcgacgugcccugcaucggcaucgagauggugcacgacggcggcaaggagaccuggcacagcgccgccaccgccaucuacugccugaugggcagcggccagcugcugugggacaccgugaccggcguggacauggcccuguga

SEQ ID NO: 190172 - RNA, 1401 nt, Artificial Sequence; identical to SEQ ID NO: 189021
  derived and/or modified CDS sequence (opt4) from neuraminidase__InfluenzaB__AHL93261

SEQ ID NO: 190173 - RNA, 1401 nt, Artificial Sequence; identical to SEQ ID NO: 189021
  derived and/or modified CDS sequence (opt4) from neuraminidase__InfluenzaB__AHL93272

SEQ ID NO: 190174 - RNA, 1401 nt, Artificial Sequence; identical to SEQ ID NO: 189021
  derived and/or modified CDS sequence (opt4) from neuraminidase__InfluenzaB__AHL93283

SEQ ID NO: 190175 - RNA, 1401 nt, Artificial Sequence; identical to SEQ ID NO: 189021
  derived and/or modified CDS sequence (opt4) from neuraminidase__InfluenzaB__AHL93294

SEQ ID NO: 190176 - RNA, 1401 nt, Artificial Sequence
  derived and/or modified CDS sequence (opt4) from neuraminidase__InfluenzaB__AHL93305
augcugcccagcaccauccagacccugacccuguuccugaccagcggcggcgugcugcugagccuguacgugagcgccagccugagcuaccugcuguacagcgacauccugcugaaguucagccccaccgagaucaccgcccccaccaugccccuggacugcgccaacgccagcaacgugcaggccgugaacagaagcgccaccaagggcgugacccugcugcugcccgagcccgaguggaccuaccccagacugagcugccccggcagcaccuuccagaaggcccugcugaucagcccccacagauucggcgagaccaagggcaacagcgccccccugaucaucagagagcccuucguggccugcggccccaacgagugcaagcacuucgcccugacccacuacgccgcccagcccggcggcuacuacaacggcaccagaggcgacagaaacaagcugagacaccugaucagcgugaagcugggcaagauccccaccguggagaacagcaucuuccacauggccgccuggagcggcagcgccugccacgacggcaaggaguggaccuacaucggcguggacggccccgacaacaacgcccugcugaaggugaaguacggcgaggccuacaccgacaccuaccacagcuacgccaacaagauccugagaacccaggagagcgccugcaacugcaucggcggcaacugcuaccugaugaucaccgacggcagcgccagcggcgugagcgagugcagauuccugaagaucagagagggcagaaucaucaaggagaucuuccccaccggcagagugaagcacaccgaggagugcaccugcggcuucgccagcaacaagaccaucgagugcgccugcagagacaacagcuacaccgccaagagacccuucgugaagcugaacguggagaccgacaccgccgagaucagacugaugugcaccgacaccuaccuggacacccccagacccaacgacggcagcaucaccggccccugcgagagcaacggcgacaagggcagcggcggcaucaagggcggcuucgugcaccagagaauggagagcaagaucggcagaugguacagcagaaccaugagcaagaccgagagaaugggcaugggccuguacgugaaguacgacggcgaccccugggccgacagcgacgcccuggccuucagcggcgugauggugagcaugaaggagcccggcugguacagcuucggcuucgagaucaaggacaagaagugcgacgugcccugcaucggcaucgagauggugcacgacggcggcaaggagaccuggcacagcgccgccaccgccaucuacugccugaugggcagcggccagcugcugugggacaccgugaccggcguggacauggcccuguga

SEQ ID NO: 190177 - RNA, 1401 nt, Artificial Sequence; identical to SEQ ID NO: 189021
  derived and/or modified CDS sequence (opt4) from neuraminidase__InfluenzaB__AHL93316

SEQ ID NO: 190178 - RNA, 1401 nt, Artificial Sequence
  derived and/or modified CDS sequence (opt4) from neuraminidase__InfluenzaB__AHL93338
augcugcccagcaccauccagacccugacccuguuccugaccagcggcggcgugcugcugagccuguacgugagcgccagccugagcuaccugcuguacagcgacauccugcugaaguucagccccaccgagaucaccgcccccaccaugccccuggacugcgccaacgccagcaacgugcaggccgugaacagaagcgccaccaagggcgugacccugcugcugcccgagcccgaguggaccuaccccagacugagcugccccggcagcaccuuccagaaggcccugcugaucagcccccacagauucggcgagaccaagggcaacagcgccccccugaucaucagagagcccuucaucgccugcggccccaacgagugcaagcacuucgcccugacccacuacgccgcccagcccggcggcuacuacaacggcaccagaggcgacagaaacaagcugagacaccugaucagcgugaagcugggcaagauccccaccguggagaacagcaucuuccacauggccgccuggagcggcagcgccugccacgacggcaaggaguggaccuacaucggcguggacggccccgacaacaacgcccugcugaaggugaaguacggcgaggccuacaccgacaccuaccacagcuacgccaacaagauccugagaacccaggagagcgccugcaacugcaucggcggcaacugcuaccugaugaucaccgacggcagcgccagcggcgugagcgagugcagauuccugaagaucagagagggcagaaucaucaaggagaucuuccccaccggcagagugaagcacaccgaggagugcaccugcggcuucgccagcaacaagaccaucgagugcgccugcagagacaacagcuacaccgccaagagacccuucgugaagcugaacguggagaccgacgccgccgagaucagacugaugugcaccgacaccuaccuggacacccccagacccaacgacggcagcaucaccggccccugcgagagcaacggcgacaagggcagcggcggcaucaagggcggcuucgugcaccagagaauggagagcaagaucggcagaugguacagcagaaccaugagcaagaccgagagaaugggcaugggccuguacgugaaguacgacggcgaccccugggccgacagcgacgcccuggccuucagcggcgugauggugagcaugaaggagcccggcugguacagcuucggcuucgagaucaaggacaagaagugcgacgugcccugcaucggcaucgagauggugcacgacggcggcaaggagaccuggcacagcgccgccaccgccaucuacugccugaugggcagcggccagcugcugugggacaccgugaccggcguggacauggcccuguga
